United States Patent Application Publication US 2007/0281896 A1 - sequence listing, part 4

SEQ ID NO: 377 - DNA, 111032 bp, Homo sapiens
cccctgtaggtctggatgtaccgactgcttttggaataaaaagattcccaggatgtgagcaacacgggaccggtgagtaccgtcgcgtttggcagtgtggggcctaggctggatttcaacaagggaaaggagagggatgggaggggcaggggcagctgagctctggcagctctgaaactgtatttccatgcacgtgtgcctggaaacagcacagggcccagaatctaggtgtgagtcccttggaatccactgggttcctgccaatccctccccaggagcactggagcctgcaggtagctggactgtcctccctctgctctgatgatagcagcccagactcaccatccagagggcatgtgctcagaagtgtttccagtaaacctctagccagggctagggagatattcttagaacagagagggagctatctggctcacaccatttaggaaaccatggccccgaggagacagtgctaaagtgaggcaggaaagccacctttgcacatttgaaaaactgtcatgagcagggcagaggtgggcagctgttgactccacctaaggaaacattcctaacagaagagctatgcaagagtgcaataggaaacttgggaagtagagtgagttccctgttgctggcagaattcaagcagaggttggagaaatgtctgtgggacacgtcgaaggggagagtgcaatgttttacagaccctgttccctggtgatctagaatgctgtgagggacaggcagtgggaggagggaggtagtgtagggaaagtctgaatgaaggaagcttttgaactcgtgcctgcaaatgctcagcattgcctccgttttaggtgcaggttctcctgtaaaactgtttggaagccaccagatgaaatgaccctcatgtctctcctacgttgttgcccattggctggctgtacctgagctaatgccagacaatgcacatatcatagacatgagcccaaacacctgctgtatgtggtccagggggcaactctcaaagcataatgagagttttgctcagaggctctggggagcctatctcatgccagaaccaccaaaagagttactggctagtcatgtcatcaagggactcggcccaagatccagaccacatagacaagaggaaaaggcatgggggaacaggtggcaagactcacccacccccccactccccagggccccagagaaggcaaaagcgggtgtggtccaggcaggtggcttggcttcagcttcacctggaatcgtgggctcttgggcaggggcagtatcacatactccagtggccaaaacctggcccactgagcgtgagaaaaattgcactccagacacaaatggggaagttacgcaggagggacacccattgcgcttgggagggtctgaataatgagcacacgggttcctttgtgctttgtaactgggtcttcttcccctggggtctgggtcagctgcaacagtaaatatttaccaagggcccctgagggcagggctctgtgggaggccagagacggtgtttttctttaagaaactgacagcctggatgagaatcgagtttgacagtggttgtgcacaggctgtatattcagctgagccctgtttgctgtcaggggctggggaaaggagggagaggagaggactgaactgtgacttggcaagtcttttttttttttttggagacagagtctcactctgtcgcccaggctggagtgcagtggcacgatctctgctcactgcaagttccgcctcccaggttcatgccattctcctgcctcagcctcccgagtagctgggactacaggtgcccaccaccacgcccagctaattttttgtatttttagtagagatggggtttcaccatgttagccaggatggtctcgatctcctgacctcatgatccgcccgcctcagccttccaaagtgctgggattacaggcgtgagccaccacgcccggccgacttggcaagtctttaagcaggacttgagctttgaggacaggtactgtgtgcttgcattcatagaacctggcacgtagtaggtgctcagtaaatgattgtcaaatatagtgatgaggaggcagcccagggaggcaatgtctgtggttcagagcatggtccctggagtcagaatgccggattcccatcccagcccttccactagctgtggggcctcaagcatcagtctcctcctaagatagagatagtgatagttcaatttaatgagttaattcacatgaagctgctgggatatagtaagtgctcaataaatattaatccttattcttattctggatgtgagacatgaacccaggttaaggcccaatgatgggacaggaaaaagtagtgtaggttggaggacagagcactgggctgggagtcagaagccctggcatagctgcagggcagggtcaaggaagcaatccccaccggttagcacatcctctaagctggagatgctgtggaaggctgtcaaggtggcactgtttttcctcctggctccctctggtccctcctggttgaaagcggaggtggccctgctatttattcctagctgtgggcctcctggagagtggtgtgacctctcagaacacccctttttcccagtgaatggggacacccttactatcctccttccctccgggaagtagtcgtgaagactgagaaacaccagcacaaaagaaatattccattgatacagatggagaatcatttaggaccccagcttaggtagtgtggtctcaagccacacagttccctgttccttccccagtgaggtctggctgtctccatggctggaagacaaacagcgtgtcgccagattcccatagtgatgattcactttgcaaaaggcactcccccccaccccaggatttggagcatatttcagataaaaattgcattcgcctgaaacacttgtcaggtttacatttcttacgtgagtggtagacctggagttacagaatgagcttgcttagtgccctgcctttggctccctcaccccatctcacccagaccttagtggatagcaggattgtaatgtaagccaaaattgtatatgacacaaacacagcgcctgtgcctaggggatctaaaactattctagattccttttcccatcaacccccctgacatctgccaggtggccacagcctcacttccaatttgggtgggaagacagatggcatgaggggatcaattggtcatggctgccaggggcactatgctgagaagtgtgtcgaggcatatccaggaaagagtatgctgcagtggattactgatgtctgctgaggaggcaagaagaactgtagcattcctgccactttttggcatctctagacaaaataatttctttattttttattttttatttttgagacagagtctcgctctgccacccaggctggagtgcggtggcacgatcgcagctcactgcaacctccatctcctgggcttgaacaattctcttgcctcagcttcccaagtagctgggattacaggtgcctgccaccatgccagctatttttttttttttttgtatttttagtagagacagggtttcaccatgttggccaggcgggtctcgaacccctggacctcaagtgatccgcccacctcagcctcccaaggtgctggggttacaggcatgagctactgcacccagcccctagacaaaacaatttctaagtctaccttcctgcatcctactttgtggtcttatatcagcaatcttgttttatatcagagggacaaggagtagtcaaacctcattaatctggaccactttaggagcaacccaagtgagtgaaaagtcttcagcccagggtgtttcctgcaggcagttgagccttcttaccattcagtccacagactcagctcagcccagctcaccaactggtgctaacggaggagccacaggacctgtgcttagcaggtctgaccacatggctgaatgcacctgacctgtacttttaagccatttactctctttgcatgcttaggaataaataccactgaaactctaacagaagcagtgtgttttttgaatagaaaatcattcaatgggcagctttgcttctatttcaaattgccagggaatttgaattagagaaactttgtactagctgggaataagctgtttttccagagttatatgcagaaaatgagacaaaatagttcagaactaggtttcccctgagtttcctgatctgtaaaatggggaaataatacatctcacagggttatttgggagagtaaatgagataaaatgtggaagagacgtagcgtgcaaactcgctcacaaaagatggtcaagaaatgctatttcttttcccccgtaccacctcccatctatcttcacactgaaagcatagcttttttcttgcaatatgttcaagaaatgatgttacagatagattttttaaaatagcatcatacttttcaaatgactcctgttagtttttcagaggctcttcctttttattgctgatgatccttcagtgggaaatgtccacttaattcttcagcctgagttcctctgctctggtcttctgggtggaatagctccaagggtcctgacatgcatgtggacgaatgtctttgtgacacgattgagccttttagcgggtttctctagtacagactgagtcatacggtgattcggctattccacatctttccttcaacacagcaagtgtccacacctgaattccattgtcgggagattcaggacaggaagggtgatctaatgccaaactgacaccaaccatgtgtcagaaggatgggctttacttgttaataacgggtaagaagtttgcaatgaaaatcttctttcatctttagtctctgagaatcttcaggagaaagattaagttaacacttaaaaaaagaaaaatcaaggccgggcacagaggctcacacctataatctcagcactttgggaggctgaggcgggaagatcacctgaacccaagagtttgagaccagcctgggcagcatagggagaccctgtctctacaaaatatgctttaaaaaatagccagacaaacacggtgaaaccccgtctctactaaaaatacaaaaaattagccgggcatggtggcaggcacctgtagtcccagctacttgggaggctgaggcaggagaatggcgagaacccgggaggcggagcttacagtgagccgagatcgcgccactgcactccagcctgggtggcagagcaagactccgtcaaaaaaaaaaaaaaaaaaaaaaatagccagacatggcggggctcacctatggtcaagaggctgaggcaggaggattgcatgagacaagaagatcaaggttgccctgagctacgatcacaccactgcacttcagcctgggcaacagtgagaccctatattggaaaagaagaaaaatcaagactaatgaaatctatgcgaagcagggagagggacctgcatggctggaggagcagcacccctgatcacagaagccgagactcattaggactcctgggttattgagtgagagctggggctctaaggcagacaacagacaagtgcacctttattctagccaccctgagcatcagcctccagtcctctctggcctgcaacctggtgagctgggctgcacaaccctcctcttctctcttgtcctctcccctgaggcctagagcagaacttctccacagcctgtgctctgcccttacctgaggagctacctgcctccttcccaggagaaagggtggccagtggtcttccaaggctccatgcgcagggcagaaggaggaatataatcctatcccaccctcccattctccgtagtgtggctgccctgtggtgtatccctctcctcatccttttttgttttttttttttgttttttgagacaaagtttcgcttttgtcgcccaggctggagtgcagtgctgcgatctcggctcactgcaacctccgcctcctggattcaaacaattctcctgcctcagcttcccaagtacctctcttcattcttatccagcctcagactcttcccgcctgaggatggagctgggggacaccatggggctggagagaaggccttgagatgagagtgcatggccaacacaggctccctcagggagctgtcgccgggaggcccaggcaggggcatcagaactccatgcaggtcctgcagcctcctctgaggctctggtctcctctctgagcatctgtggatcttacagttgacacatccaatgtgaggcaatattgcagagccatcgagagtgtgcactttggagccagactgctcctcagttagaatctcagctccacctttgctagttctgtgattctggatgagttatctaacttccatgtgctgtgccttcctcatctataaaatgggttccctcatagggtagttaggatgactaaatgagtctgtggaaggtgcttggggtagtgtccaccacagagtaaaagtgttagtaaaaacaaaattaataagtaaatgaacacagaagtcagtatgtcattgattactggattcacctcagcaagatggtaagtttcctacccacagattcaaagtctttcattctgcctgtgggttcagggaggctttcaattagaccctgaaggaggggaaacctgggcagaggtggcagaggtggacaaagcttggacatttggaggctttggggagtctgaggttgctggagcaggtagagcctcatgggggagcacatggcaattgagatgggcaaggtcaatgaggcagactgcagaggctctcaggtgccgtgctcaggatggagctgtttgcagggagcaatgagcggctttcagaggtttttaaccaagggagtgatatgatgcaaccttgggcttagaaaggtgagctggtgccaggcacggtagctcacgcctgtaatcccagcactttgggaggccaaggggggtggatcatctgaggtcaggagttcaagaccagcctggccaacaaggtgaaaccccatctccactaaaaattaaaaataaaaaaaaaatagctgggcgtagtgacaggtgcctgtaatcccagctacttgagaggctgagacatgagaattgcttgaactcaggaagcagaggttgcagtgagccaagatcataccactgcactccagcctgggtgacagagcaagtctctgtctcaaaaaaaaaaaaaaaaaaaaaaaaaaaagaaagagaaagatgaactggtcagagtgcagatggcactgcaggtaggagaagtcaaagacaaggaagcagtgaggagatggtggctgttccgatggccccagagagagggagtgaccctctcaactgagcagtcacagcagaaatggagtggggaactcactccagagcaccaattcagagaaagaatggactgcatgtgaagatagaaagtgagaaaggacaggtccagagtgagcctcaggttcctggcttgagaatctaagagactgatcttgttaaccaagtagtggacaaaagcagaaaaagtggcaggtggtgttgaaggctctggaagcgttgcatttgatgaaccggtggagcgggcaggacggggagcagcatggagtagcagttaacaggtaggctcaggagtccacgtggcttcaattcacatcctggcccagccaagtgctagctgtgtaaccttggagagatcgtttaactttcctgagcctcagtttccttatctgcataatgaggattgtgtagtgattattacctacctgagaaggcttttaggatcagcacatgtacagtgttaagaactatgtctggtacttggaaccaacccaaatgtccatcaatgatagactggattaagaaaatgtggcacatatacaccatggaatactaagcagccataaaaaatgatgagttcatgtcctttgtagggacatggatgaagctggaaaccatcattctcagcaaactatcgcaaggacaaaaaaccaaacactgcatgttctcattcataggtgggaattgaacaatgagagcacatggacacaggaaggggaacatcacacaccggggcctgttgtggggtggggggaggggggagggatagcattaggagatatacctaatgtaaatgacgagttaatgggtacagcacaccaatatggcacatgtatacatatgtaacaaacctgcacgttgtgcacatgtaccctagaacttaaagtatatatatatatatataaaccctttacatataataaataaattcctttctcagggcaaaaaaaaaaaaaaaaaaaactatgtctggtacagagggagtgctcctaagtgtgagtttccattacattagtactagcattgaaactgattttaggattagtgtttatcatcctagagatgtccaacatgggcctggagcacagaaacaagctcaggaagggatagatgtattgggaatcaatagtacatacaggctggtgattaccaacctatagatgtgttcctaaggaggaagaaatgggcatcacccgggttcttttcaaagcgtatcatcctacccaactgcactataaccctgaccctggcccctgcagtcctgctgtcctatgaaaaatcagcataggcaggtatcaccatgaccaatgggaatgtgccgcatccttcaggtctgcaggcgaagaaaaaagatgcacagacagctgatggaggtgacaggtgaacctatggggtgactgaactcactcagggacagctcagagatagaagactgctgggctgaagacagaaccctgaggcagcatcagcatttaagatgcaggatccaaagcggtagctccatcagttcacagagctacaactgccccatgtgccactcgtatgaaattcactttgccctcatggactagatatgaaaaccctgttgtaggcatttggtccatctacagattcaggggcaagttccaaccaggccccattcaatagcataagaggcttcctttgcctcttcctccactattaggagtggactcagtgtggctaagctaaaccaaagagatgaagaaagaagtgagagaggccacttcatccttctctgtagtccagctaaaactttgccctaagtgccctggcctaaccccccgttccgtgatatttcagagctcaaagtttcttggccaaggaaatgaaaacacctataactcgtagataccaatacttaagttggtatttgattatattagtcagacttttggttacaagatggaaatccaattcaaattgacataagtgtaaaacaaaaaggcggttcgttcgtgtaattgaaaagtctgagctggcctggctttgcgcccagctggatctaagcaatgtctgcaggcgtcgtgtctctccatctctcggctcagctttcttctgtgtgggatttactcagacaggtttcccccaccgacagccagcagcttttctcagcaacccccgtagaaagaaggctgtgcttccacagtgctcccagcaaatgccctggaattgagaaactcaggtcacctgtctatccccaagccaactgctggagccaaagggtgcacggtgccaactggccaggcctgtgtcacgcactcccaccgggcattgtgggaccacatggaccaagaatgggtggtgaggaaattggggagagggaataaaccaaagccaaattaccatatgtaagtcctgcactgccttaaaagcctagtcgttaagaaaaaggagtgaccgtggcggtaattctcagagcagactcagtggggagcactgaacctggagctggcctttgtggcccagaacacatgtgagagtgaaggctaggcagtggaatatttccacagaagtgatattccacatgcgggtccccctctgtagcatgctaaccccacgtgcagaagtgtcatctcccccgggggcttgggcagtatcctctgtatgcttccacttctctccactcccctgcagcccctgagctggtgcctgtccgtacttggcccctgtgcagcactcagtagatggtcactggttgagcagcatcagagcgggcatgcagagaagggcccctcgtcctgcggccggtgcaggacgccatctttgcttcaggtgatgctcccactctggtgagttctctggtttatattgcagacaacaatgtatttgatctaatggctgctataacatattcccacaaacttaggcttaacaccagtttattatcttatggtactagaggtcatagtccgaaatgggtctcactgagctgaaggtgacaaacaaagtattgacaaagtgtactccttcctggaagctctcagggagaatccatcttcttgcttcccagcttctagaggcctcccgaattgcttagctcagggcccccttccatcttcaaagccagcaatggatgcttgagtttttcttatgctgcagaacatgagaacatgcagtttctcagactctgacgttcattggcttcctacatctttaaaggactcttatgattaccttgtgcctaccctgataatccagaataatctgtttatcctaaggtcagatgattagcaaccttaattccatctgcaatcttgtctgttttagactagtcaagtgcagttctgagaagggggaaagagtagacaaggagttgaatctgtgactgcctgtgaaccatgcgttgagatcactgactacctccatctgcaatattcattcctctttgccatttaacataaaatattcacaggttccagggattagggcacaggcatctttgggggtccattactctgcctaccacagcattgttacaatcatcagttctaatattcatccagcactcactcaataccatttgctaagtccttgacaagagttttgctcttggcacccagactggagtgccaatctcagctggagtgcacaatctcagcttactgcaacttccgcctcctggggttcaagcaattctcctgcctcagcttcctgagtaactgggattacaggcatgcaccaccacgcccagctaattttgtatttttagtagagatggggtttcaccacgatggccaggctggtctcgaactgctgacctcaagtgatccgcctacctcggcctcccaaagtgctgggattacaggagtgagccaccatgcccggccattgaatctccataaccatcaagaggtacagtaaacatccccattttaccactgagaaaacagaggcacctaaaagtcagttatctccaagataatatccacagacccagtaaacagtagatcatagttctgccagaccataaagtctgagcttctagacagtcagctgatagagggtgtcaggagattcagaatagaagaaaatggagattcttttctacatcagcagcagggcatggggcagtggggacgttctcaggtgccagaccacctgggtttatgtcccagctctatcccttactagcaacgtgaccttgggcaggtcaccccacctctgtatgcctccctttccttgactgtaaaatgagcagacaaggctatagtgaatcaccatggctggttttatttttatttttaaagtcaaacaaattcctggatccagatttctcttttttatgcttgtcttcaacctgcttttagaggaaggaaaactctgttttatatatatatatatatatatatatatatatatatatatatatatccttttactttgccttccttttctcttgtcttttctcagaaggcagcagggcagggaccagctaactatgcctgtctctgtgtggcctgtgggctaagaatggtattgtatttttaaagggttgtaaaaaacaaacaaaacaaagaagaacaatatgcaaccgaggttgcatgtggcccacaaagcctaagatatttactgtctggcccttgactgaaaaagtttgctgacctcagaaagaacacaggcagtagtgtcaaccacacctggggttgggtgctgtactagatgatcaggactcaattggacctttgggtcatgaaagcaccttggggccttcccacagtggtgactttcataagatttgtagcaacagcagcagcgccggtagcaacagcaggtgcggtagtagtagacgtggtagttggaatttactgagcataatctgctttaatctcctcaacaatcctctgcgataagcatgactatgagcccccttttacacatgtggaaacagaagctgcctgggggtgcgggtcccccgcccgtggttacacagtgagatgggacagaaccaggattggaacgtaggcagcctgactctgaatttttctacattgcctccctatcattgccatcagctctcccttcaggcaagataaatctttgccttcccttgttttcttccctgacccctttccctaattctctgacaaaattcatttccactgtaaaagggcaactgaaaaatagaagagctttcaaaacagctctgacacagacatctataatttgggttttggcatccatccatccatcccattcatccatccatccctccacccacccatccatccatccacctacccatccacccacccatccctccatccctccacccacctactcactcatccatccatcccatccattcacccctcccttgatccctccctccctccctccatccatcacaacacagcaccaggaactcataagagcccacatcttcgacactgacaactggggcaaaccccaagtgcctgggtcctccaaattcattgttgccaggaagcacagagggaagctcattaaatagtaccaagtacttgattaatatgctgcaattcgggcagcaccagactatttcagcaccccctccccttaccccgttaccatgacaatattattttaacaaacagctccttaatattaaatgaaaattatgctcctgacagacgagcagaagagcagctgaactacaaagggcttagagggtccgccaggacatttttgcatgaagccatcagtttcccctgatccctggatgccatttgttgccagaaaatgcaagtgttctggaggctgggagccaacgtgatgccaggccttggttacaagcagcaattgagggttgtcacttttttaatgcagaatgtcacaacggctccacgaggacggggtagcgtgatagcattattaaacactcctttgtacaccgatcggctaatttcacccctgctcgcctgaggctgctgaaagccttgtttgcttcccgtcttgaatcgagttggattgtaagactgagtgtagagagcccttgcctgtgtgcaccagggtgagaagaagcccatctttcctctgcaaggagccatctgtcccacccagtcaattcagcaacaagcagttgcagggattgggggacccaagcctctgccctcaatgggggtgaatgtcaagagagaaaagacgaaggacatacaggctactctatggtaacctccatcagtatgttggtgggtttatgtgccaggcactgtgctaagcacttgaaagcaaaaattaaggacacatccgagatccccaatggcaaagatgagtgaataactatagtaaagtggagagaggatggcaatggcagtgggtgacctattagctgtgtgaccttgggtaacttacttaacctctctgtgcctcaattttctcatccacaaattggggataataacactatctaccttaaccattgccatgaggtttaaaatgaaataaacacataagaagcactagaacagtacttaaaatacttaaaacagtgggcacatggtaagcagtaaataaatgctagctaggactgcaagttcccatggtaccatgcatacaattataataatggctaacatgtagtaagtgcttactccatcccaggcactatgtgaagtgttggagttgtactacatcatttaatcttcataggcaaccctgtgagataggtactatgtcatcattgttatcctcaccttgcaaatgaggaaactgaggctctgtgggtttgcggaacttgtcctaggtcctgaggctgggaagaggggatttgaatccagcttcatctggatttgctgcctcatcaaaacacgaactacagtatcacaaaaagcacacaaatggtggtactccaggaacacgggaacctcgctggggaggcctgtcccggggaagtggctgcaggtgacttgaaggctgatgcattttcatggactgagaggatgggactggaaagtggaagaggaattctaagaaggaggacttgggggagctaagacctggaggaggggaactatggactgcatttggagaaggaagcacgatctggtttgattgactctacaataggcagattcttggtaccaagtgggagcttgtcttaaacaaatatgacctatttatttaaaatatacgttggatttttatttaaaataaatagattggaagaggaagagtgagacataagggggagagcaaagcttgtagagatttctgttccctcctatcaggatttcactgggtggactaatatgagaatgtcggtaaaagttctgtgtgtgtgtgtgtgtgtgtataaaataaaaacatttcttgccagtacctccaaaagcaaagatagaggcaaagaaaggaaggcttgaacagtgtagcaaaatacaatcaaagccatggtatgttacatttaaaaatacatgtgtgtgtttgtgtgtgtatgtatatcagctatttattgccacaatagtgcttcatgacaactgcccacaaacctcagtggtgaacaagaagaaacacttatttagcatgaaagtctacagggttcagttgatctcagtttgggttgggcctgctcacatacctaggtcagtgagggggtcctgctaatctcagctggagtcagccatatcttagggggttttctggatgctggctgatctaagatgacctctactgggatgacaggggtgagttgacaaagcttcgcacatcattcatcctccagcagtctcacccaggcatgatttcatgggagtggcagaggagcgagggtgcttttgcagaaaggtacaagagctttttcaggtcttggcttgcatcacatccttatccaatgaaccaaagcaagtgacatggctgagagtccctgtaggaggtgcagggagtgtggggactctacaaggtgacatgtcaaaaggcaggaatacagggaacagtaaagcactgggactgttattacaaccagtaacttgtttctagaagtctgcttgatgaaaccttcaagccacatggaggagtcctcaaagatgtgcttgagatattcatataatttcttctgctctaagaaccatgaggtgaacttgacctcaaagtgagaccttgacattggggcatttaagtcagtatctgtgtcttccaccccacacctgatccctgacccaaagtgtccacagagactaatagaacccatcattagaggaatggggacctactgcactcttcgtagtgccagggttggatgtgttgcttctcctaagctgtttccctgcagggcagcacagcactgcctcggaactcaaggttagcctcgtgcctctcggcagaatctgttactcaaggattcctgaaaggcagtctgcctagaaatggaggtcaaatgaaagaaaggcctaagggttttttttgtcttgttttgttttgggttttttttgagacagagtctcgctctgtcaccaggctggagtgcagtggcacgatcttggctcactgcaacctctgcctcccaggttcaagcgattctcctgcctcagcctcccgagtagctaggataacagacacatgccaccacgcccagctaacttttgtatttttagtagagatggggtttcaccatgttggccaggatggtctcaatctcttgacctcgtgatccacccaccttggcctcccaaagtgctgggattataggtatgagccactgcaccgggctggttttttttttttttaattctgcgtcatttttttcatataactcaatactttgagtttatttcatacttgatatcttccacaacaaggactagcattattcccatttcacagatgaagtaagtgaggcccagttatgtgactttctcagagtggcaaaggcagatgttaccccagccctatttctacctctgccaccaccaatctctaactcagccctcgggccacgttcccacacactcttaagactgtgttcaaatcctaattctgtttcctgccaacatgtggccttggatatatcacttgccctttctgagcttctggagaacatcttgccttcatgatagtgttgttatgaggactaaatttaaggactaggattcttgagtgctgccctgtggttcagaatgtacctagaactctctcatttaatccttaaaccaacactgagagaggttctattgttacctttttttttttttttttttagatggagcctcgctctgttgtccaggctagagtacagtggtgcaatctcagctcactgcaacctccacctcccgggttcaagtgattcgtctacctcagcctcccgagtacctgggattacaggtgccgccaccaaacctggctaatttttttgtatttttcgtagagatggggtttcaccatgttggccaggctggtctcaaacttgtgacctcaggggattcacccgcctcagcctcccaaagtgctgggattacaggcatgagccactgcacccagctgttatctcatttttataggtaggaacctgaggctggtgacacggagtgactcccagaggacccaccatggtggggctgggactcagaggcaagctgtctggtccagaccctgtgcactctgccctctcccctctttcctgtgaaaaggcccagcaagaacactggaaatactccctacccttgtccctttggaaccttgagatagagatgctcatgaggggctgggcacagtggttcatgcctgtaatcccaacacttcaggaggccaagacaggtagatcacctgaggtcaggagttcgagaccagcctgggcaacatggtgaaatcccatttctactaaaaatacaaaaattagccaggcacagttgtgcacacctgtaatcccagctattcaggaggcagaggcaggaaaatcacttgaacccaggaggctgaggttgcagtgagccaagatcatgccactacactccagcttgggcaacagagtgagactccacctcaaaaaaaaaaaaaaatagagagagtgagagatgctcatgagtgagaacatgccacagtggaagtccaggtaacaccctggacattaccctaaagagcagctaaaacagatgctgcccaatcgcccgatcactttgacaataggaagtcaagttagagaaccctgatttcatgtcccaagaaaccacaggagaaaagaaacccacccagggtttcagtgcagtaaacctgagtgactgagaaagcagtggcatcatctctccaagtcccaacacttgattaacgcccattgacctacgtgactgagtgcctgatgcggatgtgatattgctgacagatcatttgctgggaatgtgagcgtggctgcaggatccgtgcgggagcactcgggccctcctccctcatcctgaggcatcagtacctataaaacccctctaagcaccttgacattggagccttttaactcctggagggaggtcatagtgaagatgagagtctgtattttacagataaccaaactaaggaggtaaagtctgatactaattaaagctctgtttctttgcctttgatcaaaatcttaggttcatatttgtggcccaccatttaccatctgtgagactttgggccaagttattgacttctctgtgcctccattttatcctctgtaaaatggggataattgtatttacctctcagagttgttttgagaattaaatgtgttaatccatattgttgcgcttagaacaatatctggagtaaacataggaaccgtttggtaaatattacctatttaacattaatgtgtgcattttaatcataggtagagatgaagtagaatttgataaatttagtttggggcatgggggtgaaaccgcaaaaggcatctcatgatgacaacatttacgggtccattggaatagatgacttgcccaaggccaccctgcaggtgacaggccacgtagggactagaagccagcttccctgattccaagatccataccctttctgcttttccaagctacttgactttctgagaaggggcttctgttccatccctaaatcaagccactgcgcgactctcactatccaaaagtacctgcattcatttggaaacccccatttccttaaaactttcaaccggcaaatttagtggcactgtgcacccagatttgcattaaccatggaagaaggatacagtttgtttccaagaacacttaattaagcactaggtttaattaacttaaatcaacctctctccctgctcccatgtcccccctcctcgaaaaagagggctgctttaagtatagtccctaactggaagttctgattttaggagtttctaatcagactcaaaattgccagctccttgtcttaatctgcccctgagataccagccctccctgtgtgattaatctccccctctttttttggccacatttcaaacttaggcaagctttgcactgcagtttatcatgttgtggttattgttcctgaatggaaacaatagcctctacttgcattgttcttcaaacacacacacacagagagagagagagagagagagagacagctctcttatttcccaagccagtagataagctttgcccttctgcaaccaccgtgaatgtggttctttgcctctactctcaagaatcttcatgaattttttgcaagttttttcttcctctctctaaagaatcatgacccaccccaaattggacaataacgaaatatacagaattggactttgggtcccctagactttctcccttccctcccaaattcccagaaacaacagcagtgctgaccacttcctgagcgctcctcagccaccccgcctgagtggtctgctcactcccagccttgctgcttgcaatctttccatcacaccccagccagggttatcttttaaaaatacaaaccaagaggctgggcacagtggctcatgcctgtaatcccaacactttgggaggctgaggtgggaggatcacttgaggccaggagttcgagaccagcctagccaacatgatgaaaccccatctctactaaaaatacaaaaattacccaggtgtggtggtgcacacctgtaatcccagctactcaggaggctgaggtaggagaatcgcttgaacctgacaggtggaggttgcagtgagctgagatggcaccactatactccagcctgggtggcagagtgagactctgtccccaaaaaacaaacaaacaaacaaaaaatcacatcactcccagagattgtaaccacctgagagcttctcattgcatttggcctgatgtccagactcttttctctggtgatccaaaccccccaagatctcgcccttcccttcctccccaccctcgtttcttcccacatcccctcatctgccgtgcagcaaccatgcaggctttctcttgttcttcagatacaccaagcctggttccaccttatggttttgcatttgctgttccctatgtgtgcaatgctcgacctgagcccgggttccctggctcagggaacagaggctgacaccacactcataacacctgatgggatggaggagatggaggtgggcggaagaatgtgtaatcccagacagcagcaagagtaagggagaagggaagcaagagagagaaaacaaaggctgcaaatgcattactgagctgacccatcacttcttgagaaactctagccagttgctctgacacatgggattctttggagtggcaatatggaacacacttataccataatgcaacatatgtgttcccccaaaccaccacactatgcagaattgcactttacaaatcacagggcttatggggaaaatgttgttagggactcaacactggaaaaaaaaagagataataaaagcagtagcatagttttacatgtcacatatggtttagaaatacacaaatagtacagtcaatgtggtactttaccttgcagaaagaaagacccgtttgttggtggaaccaaatgtcagaagggtttcagcttgtgagtttctgtgaagttgtggaaagtagttgaaatcagatgaaagttgtaacaccaggtgtggacgggtttggctcttaatgcatgacgtaaattgaggtagctggcagacatttgagataaatgcatgtgtgtattttgtgtgtagtcatgtgccatgtaatgacgggaatacgctctaagaaatgcattattaggccattttgtcatttgtgaacctcatagagtgaactcacacaaacctagatggtatagccaactacacacctaggctgggcggtagagcctattgctcctaggctatagacctgtacagcatgttactgtactaaacactgcaggcaactgtaacacaatgataactatttgtgtgtctaaacatatctaaatattttaaaagtacagtcaaaatacagtatcctaattgtaggagaccaccacagtacacgtggtctgtcattgactgaagtgctgttatgtggggcatgactgttttcctatatggctccgttcagtcggataaagttttctgtgctcacctactgtttctcactgataaagctgggcacaagcaaatgcaagattcatggtatattcaacttgttttctaatttgtcagtcacattggaacagatttttcaagcattacagcagaactgacagtgctgtgtctcagaagaaagttcattggggtggaaagagggaggaatttgtcagctcttccattttgtgcctcttgctggtgtcacaaatcccccccaccagcactaccttgccttcacattcaggagccagagctcttgggtcaatcaggtagaacctgagtgcaaaagctgcagcaactcccgcaagtatcgtgggcgtccgctggccatggaagcctggtcttcaccgaggaggaggggtgatggaggaaactggtagaatcaggaacatgtggtggaaatgcagggtgcagtgggccaagcagacctgtgggagcatgtgagcccggtccagacctgccctttcaggagccttacacatccagcttccagtccttcacaattctacttaagaacaccccttcagaagatggaggcaagcgccataaacaaggtggtaacaacactgcagaactcatccatggggctttggaatttcaaaaaaatgggaagccattggagccggggagtgatgtgatctgatttacattttttagatattgtgctgggtcagtgtaaaaagatggattgttggagaactaaggtcaaagcagaaggccaggcaagaggtgacgatggcttggaccagggttagacaagcagggctggtgagacacagtcagatccaggatatatttttcaggaagagccaacaggagctgctgatgagtaaaccaggtcgactggaagagccagttgtggcctgtcagaacttcactggcgagacctttctggctcatggaagtcactggattgcagtcaggagacaggcctgacctcagctagcagaatgatctttggcaagtcagtaaaagcttaaactcatcaagatgttgcatttgtcatcttctgagggaccagccagaggccagtctgcatgcatcagcatttggttgtgatcaaagcaaactcatccagcaagagtgaaatgcagggagccatcgggacggtggacaccttcactctgccttgtaaagaaaaggccctcctagagcgtaggagttttcttggagtttttgggtggcatggaaagttctcatcataacagcactgacaataacaaaatatttaacagtggttctcagtagtgggttgggtgacagtgaggaatcaattttacctccaaggggacattgggcaacgtctagagacatctttttttgtcacaatttgaggcagcgttgctagtggcatctagtgggtgaaggattttagcatgcactaagccttctacaccacacatgacagaccccccaactaagagttatctggcccaaaatatcagttctgccaaggttgagagacccttgagaatatcataaacattcaacattggaggaataggtaattcttttgaagcctcctgcaaaagcccatagtctgtagccctggctgtgtggcctagtgggctctgctagtgtctaagcctgatccagacctttcttcctctatatgtttgggaggcattcatgaagaattgagtacacatatatatgggtcagggtgtttgaaaggctgccaattcaggaaaaaaaagagaaaattataccaaaatgccaatacaagttaggtaatatgtgctaaaaattagaaacaaccagaatgcccttcagtaggtgaatggataaacaaactgtgatacatccatccagtggggtgttattcagccataaaaagaaatgagctatcaagccaagaaaagacacggagaaaccttcaatgcatattgctaagtgaaagaagccaatctaaaaaggctagatactgtatgattctaactatataacattctggcacaggcaaaaatatgcagacagtaaaaagatcagtgttgccaggagttcagggggaggtatgaatagacagcacaaaagatttttagggcggtgaaacttctatgtgatactgtcatggtagatacaggacactatgcatttgtcaaaacccatagaactggacagcacaggggtgaacgctcatgtaaaccatggacttaagttaataataatgtattcatattggttcatcacttgtaacaaacgtaccccaccatgccggatattcataataaaggaaaccaggaaaagaaggggagagggattatacggaacccctctgtacttcgtgtctatttttttctgtagacctaaaaccactctaaaaatcaaagcgtattaatttttgtttaaagttaagcaatgtgatataacagaattaacaaaattattgtaatcataatagtgaacacttaactgagtacttccaaagagacaaacacataatagaaattattgctggagaggatataacagaagaactaagaggaaggaacagctgttccctaatgagcacttcctgaggtccaagcagacaaatatttgagccttttgtatttggtccacaccactgccctacaagcaaggccctattagtatctttattttataagacaaggaaatggaggctcagataggttaaggcatgtgcccagggtcacagagcatcagaggcagaatttgaatcagatctaattgactgcagggcttatgtacctgacacggtgctctgccaccgtgtgtgtgtgtgtgtgtgtgtgtgtgtgtgtgtgtgtgtgtgtacatgagtgagttaggagtgtggaagtgggtgtgaagtgcatgagtgggagtgtggggatgtgagcacgtgtgagtgtgtgacacagatggagatggagtggtgattcatgagtgtgggtgaaaagaaataaacttcagccgggcgtggtggctcacgcctgtaatcccagcgctttgggaggccgaggtgggtggatcacttgaggtcaggagttcaagaccagcctggccaacatggtaaaaccccatccttctaaaaatacaaaaaaaaaagtagccgggtgtggtggcaggcgcctgtaatcccagctacttgggaggctgaggcaagagaatagcttgaacctgggaggcagaggttgcagtgagccgagattgcgccactgcactccagcctgggtgacagagcgagactccatttcaaaaaaagaaacatcaaaaatgaaaaaatatatatacatatatacaagtgtatatgtacataacatagatatgttggtgcaaaggtaaagcggtttttgcaattacttttcattgcaaaagtgtgctaaaaattagaaataaccaaagcaaagaaaagaaaatggaaaaccggaggtagtagaaggagcccccggaaaagggcaaggagccgtgtggcctggagctgcctggaattgcagtcctgggccttgggctgagaaaggtttttccaggtggtccctgtcttgcttctcccaccctcgcgccgcccccaccacccccatgtctgagtctcttcctgttggtgttgccaccctctgccgcgcttgccggccagggctcatcaggggacagtgtgcagcatgacccaggctgaccagtgtttgcgttgggctctggccagtcggagagctgtactgcagccagcctcctgccgtgggtggtcctggattacttctctcaccccaggttgttccgagggttccaagccacacagcaggagccccctctctaccccttctccaggggtattccctttttaaaagggactaagaggaccaggcagcagtcatctcattcttcagtggggccaagcaactcgggatccacagagctgcctctgcctctgaaaatgcagacagagcctgcagagttcagagtccagaaacacagaaacggcccttgatttttttttttgtttttctttttttaaaattattttaatggacacataattattgtacatatttatggggcacagagtgatatttctatatatgtatacaatatgtaagaatcaagtcagggtaattagcatattcatcacttcaaacatgtacatttctttccgttaggaagattcaaaatcctctctgctagctattcaaaaatatacaaacaattattggggtttctttgttttttgtttttttgtttttttggcgatggagtttcactcccattgcccaggctggagtgcagtggtgcgatcttggctcactgcaacctccgcctcccgggttcaaaacgattctcctgcctcagtctcctgagtagctgggattacaggtatacgctgccacatctggctaatttttgtattcttaatagagacagggtttcaccatgttggtcagtctggtctcgaactcctgacctcaggtaatctgccctcctcggcctcccaaagtgctgggattataggcgtgagccaccgcgcacagccacaaagaattattgttaacggtaatcactctacagtgctgtagaacactagaacttagtcctcctatctagctatgattttgtctccatttaccagcctctccctatcccctcttttctacccttcccaacctatagtaaccactcttctactctctacttgtatgagatgaactttattagctcccacatatgaacaaaaacatgcagtatttatctttctgtgtctgacttatttcacttaacataatgttcccagtttcatccatgttgctacaaatgacaagatttcattctttttcacgactgaatagtatttttgatacacatttttttctttatctgttgatggacatttagtttgatttcatatctcagctattgtgaatagtgctgcaataaacatgggagtgcagatatctcttcaacatactgattttgtttcctttggatatatacccagtagtgggattgctagattatatggtagttctatttttagctttttgaggaacttctatactattttccatagaggctgtactaatttacattcctaccaacagtgtacaagggttcccatttccctgcatcctcaccagcatttgttattttttgtctttttgataatagccattctaactagggtgaggtgatttctcattatggtttcgatttgcatttccctaatgattcacgatgttgagcattttttccatatacttcttggccatatgaatatcttcttttgtgaaatgttgattcagatcaactgcccattttttaattggatttttattttttgctgttgaatttcttgtatatgctcaatataaatcccttgttggatgaatagtttgcaaacatagttgacccttgaacaacacgggtttgaactgtgtgggtctacctattcacggatttttctttcaaccaaataaaaacagaaaatacagtattcacaggatgcaaaacctgcatattccaagggccaacttttcatatagtagggtttgcaggactcaaatatatgcagattttggtatagatgatggaggttgggggatggggggatcctggaatcaatcacctgcatataccatgagaggactgtatttcctcccattctgaaggctgttacttcactctgatggtttcctttactatgcagaaactttttagtttgatataatcctgcttgttttgcttttgatgtctgtgcttttgaggtcttatccataaactttttggctagaccaatcctgaaacatttctcctctgattttttctagtagttttatagtttggggtcttacatttgtatcttaaatccactttgagttgatttttatatacagtgagagatagggatctagtttcattcttctgtgcgtggatattcagttttcccagcgccatttattgaagagactatcattttcctgatgtaggttcttggtgcctttgtcgaaaataagctggctataaatacatggatttatttctgggttctgtattctgtttcattggtctatatgtcttttataatgcccataccatactgttttgttaactatagctttgtggcatattttgaagtcaagtagtgtgttatctccagttttgttctttttgctttaggattgcttttgctacatggggtcttttgtgattccatatgaattttaggatttttttctatttctgtgaagagtgtcattggtattttgaaagaggttgaattgaatctgtagatgtctttatatagtatggtcattttaacaatactaattcttctaatccatgaatatgaaatctctttcctttgttgtgtatgtcttcttcaatttctttcattagtgttctattgttttcattgtacagatctttcacatccttggttaaatttattcctaggtattttattcttgtagctattgtaaatggaattgcttcttgagttctttttcagccagttcgttattggtatatggaaacactactttttattttatatgttgattttgcatccttcaactttactaaattcatttgtcatttctaagagttttttagtggagcctagctttttctatatgataagatcatgtcatcttcaaacactgatgattttacatcctcctttcccatatgcaaatcatatgcttgtattttgttgagaatttttgcatccatgttcaccaggtatattggcctgtagttttcttgttgttgtatccttgtctggttttggtatcagggtaatgctggcctcatagaatgagtttagaagaattctctctgctttaattttttggactagtttgagaagaattggtgttagttcttctttaacagttttgtagaattcagcaatgaaaccattggtcctaggcttttctttgttgggagactttttatttttgatttaatcttcattattgatctattcaagttttctatttcttcctggttcaatcttggtagattgtgtgtgtgtgtgtgtgtgtgtgtgtgtgtgtgtgtgtgtgtgtgtgtgtgtgtagtgtcttttagtctagctaatggtttgttgattttgtttacctttgcaaaaagccaacttttcatcttttgtattgttttctaatctctgttttgtttatttctgctctgatctttattatttctttccttctactaattttgggtttgatttgttcttgattttctagatccttgaggtgtatcattagattgtttatttgaaattgttctactttttagatgtaggtgtttattgctgtaaacttccctcctagtactgcttttgctgtatcccataggttttggtatgttgtgtttatgttttcatttggctcaagaaatgtgtcaatttctttcttaacctcttcattgaaccagtggtcatttaggaacatgtagtttaatttccatgtatttgttcagtttccaaagtttttgtggttgatttctagttttattccattgtggtgtgagaacatacttgatatgattttgatttttaaacttatcgagagttgttttgtggcctaatgtatggtctatcctggagaatgttccatgtgctaatgaaaagaaagtgtattctgcagctgttggatgaaatgttccgtaaatgtccgctaggtctatttagtctatagtgtagtttaaataggatactggtttggtgattttctgcctagatggtctgtccaatgctgacagtgtggtgttgcagtcctcagctattattatattggggtctctctctctccctttaggtctagcaatgtatgctttttatatccgggtgttcctgtgctgagtgcatatatatttacaatcattgtatcactttgctgaattgatccatttatcactatataatgaccttctttgtctctttttttactttttggcttaaagtctattttatctaatataagtatagctactgctgcttgtttcagattctgtttgcatggaatatctttttctagtcctctattttctgtctatgtgcgtctttacaaagtaagtgagtttcttataggcagcatatagttgggtcttgtgtttaactcattaagccagtgtatttttttaaattggaaattttaatccatttacattcaaggttattattgataagtgaggtctgactcccatcattttgttaactgttttctggttgttttgtaatttttttgttcctttcttcctctcttattgtttatctttgtggttttgtagtttaaggtttgattcctttctctttctcatttgtgtatctgctttaccagtgacttttacacttttgtgtgttttcatcgtggtagttaatcatccttttgcttctagatataggactccattaagcatgtctttttttattttttatttatttatttttttgagacagagtctcgcactgtcgcctgggctggagtgcaaaggcacaatcttggctcactgcaacctctgtctcccaggttcatgtgattctcctgcctcagcctcccgagtagctgggattacaggtgtacaccaccacatttggctaattttttgtatttttagtagagatggggtttcactatgttggccagactggtatcaaacttcagaccttatgatctgcctgccttagtctcccaaagtgctgggattacaggcatgagccaccatgcccagcccaagcatgtcttataaggccagtctagtgatgatgatttccctcattttttgcttatctggggaaaactttatttctcctttatttctgaaggatagctttgctggctatgatattcttgagtagttggtttttgttttgttttttttctttcagcactttgattacataatctcattctctcctgctctgtgaggttttggctgaaaaatatggtgttagtctaatgcgaattctcttatatgtgagttgatgcttttttataattctttgtctttgacatttgacagtttgactatagtgtgcctctgaaagtacctgttaggctgaatgtactagagaacctttgaaattcctagatctggatgtctaaatctctcccaagacttgggaagttttcatctattatttcattaaataggttttctgtgcctttttccatctcttctccctctggaaccctatactgtgaatatttcactttatagtatcctataggccctgtaggcttttttcatactttttttattctttattttttaaaaaaacgaaaagtttgactgggttatttcaaagacctgttttaagtttagaaattcttttttctacttgatctagtctattgttgaggctttcaattgtaatttttactttcttcattgaatcctttagccccaagatttctgtttggctctttttatatctctttgttgactttctcattgagatcatgaattattttcctgatttcactgaattgtctatctgtattctttgtatcttgctgaatttctttaagatcattattttgtatttctcttcagacattttgtagatttcctcttctttgggatctgttactggaaaattattgttttcctttaaaggtgttgtgtttccttgttttttcttatttctgtgtccctatattgatatctgtgcatctggtgggacagttgcctcttccaattttatattcataggcaaagactttttcctgtagatgtgtcctatagcgttggctgggtaggtgctttggctttggtggtaggtggatgcagcagtgtagtctccatgtgatttctttggctgtaatcagtgtaagaagtgcctacaagtgctttagtggcctaggctgcaggtttttgtggagacagtggcatggcccttctgggggcaggggatgccaggcaggctgatgcttgggctgtggcggttatgcactaggtgctaggcaatgccagttgagaagggaggacactggccttttctcctttgaaggtgctagaataaattaccctgtaccacccagtttcccaagggcttctggccaggtcactctgtatgaaaccatgaaataaagatccagctgccctgcctgacattttcacatcctttataaggtgacaccatgcatggaaaagaaggcagccattcatcctctctttagccatttttctgattctgctttgtcatttaaaaaaatccatcttatgagttcatgtcctttgtagggacatggatgaagctggaaaccatcattctcagcaaactatcacaaggacaaaaaaccaaacactgcatgttctcactcacaggtgggaattgaacaatgagaacacatggacacaggaaagggaacatcatacaccagagcctgttatggggtgcggggagcggggagggatagcattaggagatatacctaatgttaaatgacgagttaatggttgcagcacaccaacatggcacatgtatatatatgtaacaaacctgtacattgtgcacatgtaccctaaaacttaaagtacaataaaaaatttaaaaaaaatccatcttagtatcttgacccccacccttcacccactcacagagaagcccacatgaggaaacaggttatgtcttggacatctctgtccccctcagtgtctggtatagtgactgacacacagcatgttctcaagaaatgtttgaatcacagtacattgaatcagtaacagtctgactgacccccaggcagaaaatgcagaggcattttttctctctattccagatttcagctgtagcctcttgtaattctcatattgtttttcaatcaccagaattgatttccctcatccctctccccagggtcatctccagtgaactgtattaaattgcaattaatgttgacatttgttttcctcttgctctctcccttctttaaagggggcacacgggtggtagaaaattgaagagccaatagtaatcacatcataggggaggtgtgagcattggcaagggcatttgcaattaaattaggtgacacttttgccagtggagaaatgcactttctgagaaaggaacaccaagtgggtgttactggcttaaggcaagctggcttctcttcagatgagctgccaggagatgctactgcatggcacaggaagaacgtgtgaccactaggattatttccagcataattggctttgcatggctgaagttttagcaatgaatttctataagcccttttaaaattggaattcataaacaagtctctgtgctctcaccctgtggcacttttttctgctctttttgttgtttcattgttcttctcactgctacctagctagcatcctggtgtcatggaagtggaccagatattttcacacccattatattctagatgctgtgttaagatgcaggacaacaaggtagatgtcatccttgctctttagacatctgcagtctaagacccaggcaatttggatatggtgtggggaaaaaaaaaaaaaaagctctcgccaagataagcatagaagagaggcatattctgctattgaaccatcagaaccatgcaaaaaatctcccattagattctagtacccccagccctcccacctgccaacccagacccttcccaaagaataagctttattaagagtttcaatcagctcactcttattttttttctttcttgcaatcagtgattcatcagcctgcaattcattaggattaccattattgttgataatagcacagctgggcactctgtctcagctaggagctctctgctgacaggaggggctgatggcaaatgcagaggtggggagtccatcctgcctgaagctggaatgcctcagaggtggaggactaaaagaggccaaaggaaccaacagtctagatccaaagtcccaagtcccattgctcttctgttctccctgggctgactctagaccttcctatagttccttactaggactcttttttttttttttcttaagggcatattgtttttaaaagggatgagctcttctctaggaattattttactccctgccctcttctccagtttgctcctgcagaaaaatgagcaaagcaatacgtatttcatggaattcttgggatgatgcagcaggataatgaacataaaagcctatgacacaatgatggaagtaactggcatttttgagcgtcagttctatgttatgcattgtgtataccatatcttataaaatctctacagaaacactgtgaagtaattttcatttacatttatttattcttaaaaatatatttattgagcatctattacatgttcaatatgatgcaacatgctaaggctccagccatgagcaaaacagtttttctcctgacaaggaacttacatactagaagctgctgttataccatttaatagactaggataccagggttcagacacattaagtcacatagccacctgtctggctctgaagccagtccctgctctgctgccctctacctccctgtgttcctggtctaagcacagtactaggtatgaagggagctttgtaaatgtctgaagctttctcaacccttgcttggttgtgcttaaacttggatatatgtcatcagggaaagaacagtgtctgggaattagatgagaaatgtagatgatgtgtccaaactcagaaaagttgtttaactttcaacagccttagttcctgtggccgtgaaatggggataaatatactattaatacttaaggttatgatggatttccagatacctagggtatgggaatgcactttagaaactgatgtcctgagcctgaatgagtttttccttggcaacttgatagacccttggtgtcttgggagcctgctcaaataggagcctgggcttcccctggcactgagcactggagtcacttccagatcatgagaggcaaaacagcatggtagctatgaaccatgttaaaattccggtgtctcacacttgctagttatgttactaacctcactgtgcctcagttttgtcacctattaaatggaaagaaaaatagtacctacctcattgggttaccagaatgaaatgatctttgggggataacagtaaccaccatgagttagtgcttttgagcaccatagtttcattcttaagtttcattcaaaaccctgcaattctaagacatcactgatgattacattttttttggtgtgaaagtcaagtctaattgtttctggagaacattgtgtcccactgtttggttttggatttatcccttgcagactgagaggtttttgttttgtctgtttatcttcttaatgtagtgtttagaaatttaatggagcaatttagtttccatttactgaagtagattatcaaaggaaacaggaacactaaagactaggttagcatcccagagtattgcctcacatatgatgtgatttttcatgttttcctgacaaaaaaaaaaaaagaatgagagtttctatttccttaagctggttcatggcaaagcctcttgcctcttgcctcatgcccagtcaactctctgggtaaccagatggttggaagtggggctaagagggtcacacagggacaaatccccacccagcgtgtcaggacagctttgttcttcttgccagatgtggtggcctagatcgctgaaagcccacatttttggcttagaggcctcaagcagtattgttcaactgggaaaccaaaattcatgaagagaaatcatggtggtccgctccattcgagtgaatgaaacacttcaggacattaaaatggaaatcagcaaggtatgctgactgatttgtccacaccgtgaaaataagccaccatttattcagatctccacacatgtgacaatccttgcctaggtgccttgtagtttttacaaaaaacccatctaacagatgaggaaacttaacctcatagaggtgaagtgacttgcccagggtcacacagctatgaagttattgagtggggtcttctttgttccaaagctcttgtcattttgttaaatcaccggaaagaaattggggatgaggaaagagtagaaaagcctcagggaaagttgacggtgatgatggtggtagaggtggtggtggtgcgattcatcagtgggaaattgctgttcatcctgatagtggtggtatcattaactatccattttcagaaaaggatctgacaaccacttaataggtacatattcaactctgtttaaagaaatgaaaaaaaggagtgaagtttgcatgcctaaatttccaaagtcagaggcagaactaagcctagttcccccacttctaattgtcttcccgtctccccttcatccatcacaagctccacattttaggattattttgcttcaagtccaaataggagctagtgatcctaatatgtctcggccacagaaaaacactagcagctgatacttattaagcactctttgtgaccagaattgctctaagcacttacctgtgttaactcattaaagcttcacaataatcctctgagatagattccattatcataaccatttaatagatagggaaactgaggtgcagagatgctaagccagttgctgaggtcactctgctggagagtggcgtgctgggatgcatgcccaggcaggccagcccccaagtctgcccttccccacttcacctgtgggctcctgctgttattcagcagaacccactcccggccttgttcttctggttgtagcagtggttttgcacagacttgcccaatactcactcactggagcttctcacaacttttagaagtcctggtctagggttagggattcagtcaacagccatggaacacctatgcagcaaatgtgtattaaatccctcctggcccaaggcactgagctggacactgtaaatccaaggcctcatacaggtactcgtgaaattccaagtttcctgagggctggaatgcattttctattttttttctaatctccctcctcagagctacaaccccctctaactcctacaaagatcctcttacaccctctctagctctcccacttaatttttcttcacagcactgggaacatttcctctcccagacatgtattttatctgcctttcttccccactcctactcagtcagagcagggctttgttctcaacacagatcctgcgtggctcatagtaggtgctcaataaatgcatattagtggtcgaagctcagacctcatactatcttttcagttggagccaaacgggattgatttacaattgcacaaaaagagaaatattttaaataacaagccctttgaggcaatagaaaaaggtgtatccattgatggctacactcaatacaccccctttcccagatctttaccccaaagagaaatgccgtcatgagttttttgctgcatttgtcttacctgagtctaagggtattgtgtcttaccctcctcctaacccaattccacagtcacacctcacatctcacttgctgatctcctgtcttacatggaaaatcaatgtatttcaagtaggaaacaactaatacagagaggtttcacctgaggtggaaattatgcaggcagtttaatgcaaattggagggaaaagccaaaaataaagtggtgttagctaatacaagcatgctcataatctcatgctactgctttcctcactggctttgtagcaaggtgggctgtgtgcagagcccagttaaaactcacattatgttgagtttaggcgttttgggaaaggatgtaaatggaaagatgaactgctcacatttatcctgattttcagcagaggcattaatttttttgtagctttcattttatcacgcttctccctctattaatactccccatccccaacctatatagggcactctgggaacaggaggatgataatggtggcttagtccattttgtgttgctataaaggagtatctgaggttaggtaatttataaagaaaagaggtttatttgctcacagttctgcaggctgtacaagaagcgtggtgccagcatctgcttctggtgtggacctcaggctacttacactcatggtgaaggccaagggaagactcatgttgtgggcagagatcacatggtgagggagaaagcaagagagtcagggagatgccaggttctgtttaacaaccagctttttgagaattaatagagtgagactcgcccacgagggaggacattaatctatttatgaaagatctgaccccatgacccaaacacctccccctaggcccctcctccaaccccagggatcagatttcaacatgaggtttggaggggtcaaatatctaaaccatggcaaatggaaaccagtttctagttgcagtgacttctgctcctcacacgtgggttctgatatctgaggctcagtgacattcaatatacgttggcccttaattttgtcctggtgctagatttaagatggttgttttccaaagttcataaatgggagttggtggggctgtcaatgaggtcacatagtaccactgagtatgctcaagcatgtgagcatttgctaactatattattcctcctccaggaagcagcaggattgccatccattcctgaacaagaagctgtgagattcaaatgcaaagccatgtatgtctgccttacagagcttgcacttaccattagtagcactctcctggcacactgcagttgctttgccataatatcctgcttcccatgtgttgcatatcaattttgtgtggcgtgggcagatactttttattctcatggtaatatattctcaggagtatgaagaaaaaatataattagctgatacccaataaatacaactatgatttattgggtattgttgcttagaaatacgttagaatttacaaagtgatttgatttttttaaattattaagcaaagagtaatacacgtggtatttgtctagagcgcaactcataatggtgctgtataaatgatggaagttgaagaaatcatgctagaatgtgagaatttttagttaactttttaaaaaccactatgcatatggtctgtctaccactacccaacctacctcccctgcttctggaagaaaatgtcattgtgcatctggatcacctgggggtgtcctaaaaatgcagatccctcctactctccccaagagaatctgcttcagtggttttgaggtgaggcccagaaatctgcattttaataagctcccaagctgggtttctaggaggaggttctaagaccttacttctcaaagcactgtttcagaatgtgctcccaaactaagatggttctttggcatggaatgctcactttcatttttcccctggtgatctttgttctctgggaatcaaatctcataaaacctaatttaattgttgggcaatgcttcctctttaaaaccacttgtacgtgcagatctgggggctgcttggccaatccagatctctcagcctcaacattactgacatttggggccggttagttctttgtcatgatagattatccttgcattgtacaatgtttagaagtgtccctggcctctacctcctagatactagtagcactcatatcccaacccccatcttgtgacaatcaaaaatatctccagacattgccaaatatcccttgtaagggggaaaaaaaatcacccaacattgagaaccactaggctaagctggattaactttgaaaactcaagtctccagatgtgaaaaatatgctccagtagaaattattcatagcactgtagcccttgaatttgtattctgcctttttttcagaagccccagtcctatgctacgtgaaaaaaaaaaagaatgttttatgaagttagtaaaacagaataagtagcctgcagcctagcataaacctactttagatgagcttgcacatttgtcttcatggaatcggaaagtaactggaacagatcaggtggctaatgggtcctcctcctaggggaccattcaactgaaccaacatgtattacagccttactctgtgctaggtactgcagaagctgttgaggatacaaaaatgagtaagattgagtcttctccctcaagaggctgagatctattagaaaaagtcaggcaagtgccccaaaagagacagcatgacataatggtttttagtgacattgcctgggttcaaatcctgggttcaaaaacagctgtgtgactttgagcaagttgcatgacctctctgtgcctgtttcctcagctgtacattggggatggaaatagtacctacctcaaggagttgcttggagagttgtacaaatttatatacataaggacctgaggacaatgactggcacatagaaagggctatcttacaaagtccagtgctgaaaatcagaccttgagtcaggagacttgggttcaaatcccagctctgcctcttctgagcttgggtaagcaatgtaatctctttgagcttcaagtccttcatccatgagatgggatgatcatagtatttaccccataggatgataaaatgagatgatctaggaaatgcctagcccagtctgatacatagtactgaataatgtttaattattgttattgctattgtaaatagctttatgccaaccaaccaaactcataccagaggcctgtctatttgaaatgaaaaacaagtctgccatgagcccaaacagttgcatctttgggtcagttccctaactgtacagagatggtaatgggaagctggattcccaaggcctcctgggtgagcacagaatccactcgggagctggtgagactcatgtgcacagggcctcaaactgggcatccattaccagagtggggctctttccatctctaggacccatgggcctttccccaagtcaggacactcctcctagctgggtgactgcttctcctagtcctcttctaaacttattccttttttagatatatttataactttgattagattctccaaattctgcctactctcctgcttctttcttactggtgtttaagataactttgcccatagctaatcttatcttcttggcactggatttctgtttaattctcagagttctgccaagagattcacactgacaggcaggggcctttagttattctttccaaaagagtatttatcaggtgctcatgtatgctgtgagacaaagaagtatcaagcatgacccagtcctttaatgaatttaaaataaatctaactgaccttcagtaattaccagtaaaaggaccaaatcctgaactgggtgtccatttcagctggaaggtattattggagaacgtgggcattgagaaatgggtcttgtgtgcagggatggagtgagcggggagcagacatgtcaggcagaaaataagcatctgcctacaaatgaaagggacctctgggtgaaaagaacacagaggctagaactctgaagtgtccattgctaggctaacaagtttgggctttggtctacagacagtgtagattcataaaagactttgaaaggggagtggcatgttgttctggtatctcctgatgttggctttcctccaagactagaaagatgaaactggtgttgacacggggcaggtagatagatgtatacagggatagagagaaaatgggaatggttagaaatggggcttcagtaggactggaaagagaggggaatgaatattgctaatattgatgaaccaccacttccaagaaaatggagtaaacacattttctctatttctcccactgagtacaactaaaaaccttgggcattatttataaaacaagcataagaccctgaaaagtggaaggaagaaggcagactaactagggacctcatagccccaggaatgacgtggtggtgagttctctgggtttttgtttcttttctttgtttggcttggttcgttttgccttatatatcctagacttagagctgaagaggccatcaaccacaaatgctaaggggcccagaaccctcccaacaaaagcccccccaaaaaagtctgctgtctctagccaaagaatcaggaaaggggcagcctggcaaagccaaaaacttttagacagtaactgctctgctgtagccaaaggtcacagaaaaaactgtggtccagcccctgctccaccagcaaaagccaaatgcagagcctagaattccaccctcaccacgttatagcaagcctccccagtctcccccttctttacagcagggtggtgtcagagaaggccaagtggggagtagactttcatgaccccacgaaatggtaacctggccttatccactcccttagtgtcagttaagatcgtgtgggagccgtagcaagacactcctgactcctcccagtcagagagaggtatcaatggaggccttgtcaggagctggaactcccatcactgcacagtaatgagaaggctccccctcaagtgtcaaggccaaatggagaacctggacccctacttagtaataatgaggtggcataaaccccctacccatgttggagcagtgtcagagaaagctagctaaaacagaaagtttagataagatccaaaatcttataaccaggtttcagttttcaaaatcactcataccaagaacaaggaagatctcaaaatgaacgattaaagacaatagatgataaaactgagatgctacagaagttaaaattttacagattataaagcagccatcataaaaatgtttcaataagcaaatataaacatgcttcaaacaataaaaaatagaaattctcagcaaataaacgacataaccatatggaaattttagaattgaaaaatacagtaactgaaattaaaaactcactggatgacctcaacatcagagccagtgggccagaggaaagaatcagtgaacttcaagatagaatattagaaataacccagtctgaacaacagagagaaaatagactggaaaaacaagaaccactcgaagaaataatggcttaaaactttccaaatttgccataaacctacagattcaagaagctgggtgaaccccatacaggatgaatccaaataaatttacaataagacacatcatactcaaatgtttgaaaaccaaagacagcctttaaaatcactgagacagaaacagccactaatgagaaatgcagtatgcacagcaccagatttctaatcagaaaccatgaaggccagaaggaaatggcacaacattttttttaaaaactgtcaacccagaatcctatatccatcaaaaactatatttcaggaatgaaggggtagtcaagacattatcagatgaagcaaagctaagaggatttttagccaacagctctgctataaaacaatggctaagaaaattctctaaacagaaaggaaatgatagaaggattcttagaacatcaggaaggaaagaagaatatgaggctgtttcctattctgttgccaaaacaaaagcagaggatgagaattttgaaaaaggaaaacagtctgagtctcaagaagcctatgagaaggaagagaggaatgacttggtcatgcccatgacagaaaagtggcttagggatgtaatgagagaatacaatatgtagatgatacactagaattcttgtcctttgaattagtattgggttggcgcaaacatgattgtatttttgccattgaaagtaaggcaaaaactgcgattgcttttgcactaacctaatagaataaaatcatttgagctagaacagaaatgctaggccacccagcttcctcccttttttatatcaagctacatttgcacagcttctcttagatagttttatttactttatgccatgtagtttcctgcaagaacagagcctcaattagggaatgagttagaaaatgtggaaaagtaatatcaatcagttcaaaagtacctatctaaacccaatttcaatattggattaagcaattattataaaccccaaactatggaaaataatttgttttcataatggtcaaagattgagacatacttaactctaatagctatttttttgaaatgaatatttgctatagaaattgaattgaggctgtcaattaaacaaaactataaaataaggctaaaagtaatagctgatgtttatgagagtttacatctcaaggatctattacatttaaaatgacatttggtacgaatctatgagaaatcggagataacctgtgagtccatcagtaggggaatggcttatgctacattgagacaatgaaatctgttcaagaggataagcaactctgtatgtgttgatggggaatcgtagctgcgacacatggttgagtgaataaagcaagtcatgaataatgcatctagtgccatccctttgtgaaaaataaactgcatatgtaggtgtgtttatgcatgggaaaagcttatacattaaactgttaaaagcagttacttctggggattggaaatagagaagcagagatgggagatacttttactttaaacacttctgtatcacataatttccttttttttttttttttttttttgagacagagtcttgctctgtcacccaggctggagtacagtagggctatctcagctcactgcaacttcctcctccagggtttaagtgattctactgcctcagcctcctgagtagctgggattacaggcgcacaccaccacgcccggctaatttttgtatttttagtagagacagggtttcaccatgttggccaggctggtcttgaactcctcacctcaagtgatctgcccacctcagcctcccaaagtgctgggattacaggcatgagccgccatactcggctataattttcataaaagtcatatgcagcttgtgaaattaaaaaatttaagtggtttcgacttaaaggtgacagagcagaaaggcctattcgatcgcagtggtcaatcatcaagttgcataaacccacctgagccttagtttcctcatgtgaacctagaaaatctgagttctgttaatttagaaagttaattttgccaaggttgaggcaaaactttcctcaaccttttgacagcctcaggaagtcctgatgacatgtgcctaaggtggttggggcacagcttgattttatacattttagggagacatgagacatcaatcagcatatgtaagaagtacattggttcggtctagaaaggcgggacatcttgaagcaagggcaggaagactccaagcgggagggagcatccaggccacagataggtgagacacaaatggttacatccttttgagtctctgattagcctttccaaaggaggcaatcagatatgcatctatctcagtgagcggaggggtgactttgaatagaatgggaggcaggtttgccctaagcagtttccagcttgagttttccttagtgatttggggggcccaaaatattttcccttcacattcaaaatgagaaacctcccagaggtattggacaaatgaaactggtaaagctgcttccaaagtgcccaatcagcatgaagtcagtgctgccctagcctctgtttgaatgtccagagctcctgagttaggtcagaggatgttttcccatctataaaatggctaatgacactgcctcatcagagcattgtgaggattaaatgagatcaaagatgcaccaagtacctggatctctcagaagtggtagtgatattagtgtctttaggccactcccagcccagcaccaggttcatgttaggcactacagtaggggtttttttgttaatctgaactgaactgattccaatgcctattgctgcattttccaaatatgtgatctccagacagtttagaggtttgccttggataacataatataatgagagggtaaccagcaaaagacagaagacctgcgtacatccttgccctgtgcctctaagtcagttcacagggctgtgtgttctccgtggatgaaattggaatgacaatcctcgccccgcccaacccaaaatctcacaaggctgttgtgagcacaaatggaagggtgagagttggagcattgtgtcaactgtaaagtccttggtttgtttgtttgtttgttttgaaatggagtttcgttcttgttgcccaaactggagtgcaatgtgtgatctcagctcactgcaacctccgcctcccgagttcaagagattctcctgcctcagccttacaagtagctgggattacaggcgtgtgccaccatgcctggccaatttgttttttattttttatttttagtagagacggggtttcaccatgttggccaggctggtctggaactcctgacctcagatgttccacccacctcggcctcccaaaatgctgggattacaggcatgagccactgtgcctggcctaaagtccttgttttacatggaccacggtggtggttgatcatcaagttgcttaacctcatccgagcctatagtggtccttgtttccatagcatagaaaacccttgttatcactgtctcccctttagtttgacctgaaactgtaacaaatatctttctcatgcccactcagcatccaggcatcagagacaggctccacaattaatttttcagcgtactgaaaaaacacttgccagtgaacgactgtggctagggtaagaatgatgaagtgagaaggcaaagggaagacttgcttgcaccttccaaaaaagaaggtggttctttttcaaaagtagatgttggcttcggctctgagcacacttcccaggctacctgagctccatgggcagctggaaacttgccctgccccaggggctggtggatacattaccttttcaagtttcccttgtgatttcctcccttccatcaccaccagttagttctaacttgttctataatttagaacttctaccaggttccagaaatctgtggtgaggcactgagacaatggaggttagaactcaaacacatggtggcttaaataaagatcatctgatttgggtgtagtagctaagaagagttagctttggttttaaaaagtgggccaggcgcgttggctcatgcctgtaatcccagcagtttgggagatcgaggtgggtggatcacttgaggtcaggagttcaagaccagcttggcccacagggtgaaacccccgtctctactaaaaatacaaaaaattagccaggcatggtggtgcatgcctgtagtcccagctactaaggaggctgaggcaggagaatggcttgaacccaggaggtggaggttgcagtgaataaagatcgtgccactgcactccagcctgggtgacagagcaagaatctgtctcaaaaagaaaaaaaaaaaaaagtggggcaggcgttaggggacaactttgtgaatactcgttgctctttaatttttagagtttgcatccctggaggttcctaaaaatagacaaaacacccaacactcttattcactcgccttggggctggacagataatcccctcctcctcctctcccccccacaacctgttcctcctgattctctctcactcaagcagaaacctgggaggtgccagggcgtggtattcacactggcttccacattcactccagcctccggagtgatcctgatcttctgcactccatccccactgctgctgtcctgtgggctgcatctcacacctggcctcttccggaagtcttgggcttcactccctcccatccatcttgcagcctgcagccagggcaatcctggaaggcaggggtctccccatgcttcttgcccgcctaaaaccctgccttcattggctgccccaggagcccaggttgcccagttgcccctcccaccagcttacctctcactggaagggcagcctctcagaaaagatttgctctcacttcccttaaacacaccatgcccctgagcctctgctgttctgtctactcagacatcctccttccctctcttgtccacccagtaaacctctgcttgcttctcagagcccagctcaggaatctcttcctccgagaaatcaaagtagggaaaaaaaaaaatcagagctggacaaaagactagagggacctagtaataatcataatgactttcttagattcagggcactgccccgggcacatcgcattaccttattcagtccccactatgactctaaaagtaggtctcggcattatcttggttttgcagatgaggacacaggacttgagagttcagtgacatgccccaaaacacagccaattcattgtagaattgtgatggaagcttaagttcacctgatggaggtttgcatttttgtcagctgcaacatcctgctggctaatgcagtgtttctcaaactgccagtcatgatgtatccgtgagttgtgaaatcggtttagcaggcagggctggctgcatgatgtgtggggctcagtgcaaaatgaagatgcaggacccctgttcaaaaggcaggcaaaaggcttcttcctttctttggcagtctctcagcttgttgtggcattttttatgcgtactttaatgtcatactccctcaggcacggggttactggtggggcagtacggaccaaccctcaccctggaggcttgcccaatcgagacccttccccagccagtgtgcaggcccctgctggggggtggggggtggggggtgaggaatacagccactgacactaaccaggggcaagggaatgggatcagtggcccagaacccaggaagtggggccatgcatcccgtcaagacctcacttacgaagcacaaattcaaacaaaaaacgattaagaatttcaagatggtgaccacaaagcattaaaccccaggcatggggccccttccagaacatcactcctgcccactgtatcggctacatgttcctgttataagtcatgacaagaagtggtttcaaactggaatagaaaacaataggaggtgttgtaatacaccctgcatagtgaaagcaagtatgactttgtccacttgggggtttgtacatcggtctacacacacgcaggatggcctcataaaacatacttctcactgtgggtctcagaaacctctgaaaaccagcagggcagccccgtagtcctgttgggccactggtaggatctctgccactttatagctgttcgtcttccctggtggttcccgggggtggaagggggctttgccaagatgagggtgggggtgggagtgaaagtgaagtgggtggagttgcgtggggccagcaggcagcctcctgtcttctcagcccctccctgtcctgcagaggccttcacaccctcttcccccatcatcaagtgtgcctgccccctgcttccccttctctcctcccctctactttccacctggggccggggcaggaggggagactgctctacaaagagaggcacagagaccctggtttcatgggaagggaagagctgccaccagccagagtggaagcataaagggaagagacaaagaaatattagtgggactattttcctaaacaaatgtttattgagggtctcctctgtgccaagctatgtgctgagccctggggacacagcagtgtacaagaaggaccgaggtttcatcctcatagcactcacaggatagtgggggagacaggcctaagcaaataatcataaatagaccatggcaggaaaaacacacagagctacgagcctatgtggtgggacttaccctcatctggaatgatcagagcaggcttccatgaagatggtacatttcagctgactcctgagagatgagaggggttgcaggtaagctttggggtgggctggagggtgggagtgagccaccttttagaggcggggaatggctcccctaaggctctgaggcctggaggggacacacgcgcttgagcagctgccccctggaatccctggctaaggctctgggggcccagataagaaaaggagaaagagacaggcactcagggttctaagtttctggtggcctgaaagactttccccacatttttgcaaactgggttcatgaagatggtggcggggcttccagtggtcataaccttgacccttaccccactggatgttttgccaatgtcatgcttttccagtgtgttgctgctaacacatagcacggactcagagagagagtcaaccctgaagggcagtggcagaaacggcctgggagagccttttcaatgcctctccagacaaaaagaaaataccatctgtcatgtccaccagccacaggctggcctgggcactgggtgctctgggcagcacgagcatggcctttcaaagcagctcctcacagccccaccaatggcatcatgtaggctgctctatgtgacgccttggccattccctccaagatggacatgtaataggaggtgggaggtgggaggtgggtgactaaggaacagaacccctagtagcacagatcctccttcagaagcctcgtctatggcactgagccacacatccagaaaactgccctttagacagcacttatattctgagaccctgccgagcaccttaaatgcctggtctcctaatcagcagccctttgcagaaggcattttaatctccattttacagatgctaaaactgaggcttaaagaacctaagtggctttctcaaggccacatactgatttgttagcaaatacttaagcacctactatgtcccaggtactcagaatacactgaggggcaaagcaaagggttctttgctgtggtaaccctaggagcaaccaagaagaggtaggaatttagatttaagaaaaagaaaaacagctttattggggcataattcacataccatataattcatccattgaaggtttaccgttcagtggtttttaatatattcagagtcatgcgaccatcaccataattttagaacattcttatcaccccaaaaagaaaccctatacccattggcagttactagtttgttccctccaaactgccctgcctccagtcagctctaggcgaccactcatctatttctgcctctatagacttcatatgaagggaatcatagaataagtggtctttcatgactggcttatttcacttagcgtagtggttttaaggtttatacatgttgtaagcatgtatcatcaatacttcattcttttttgatgccaaagaagattccattgtatgggtaagaccacatttagtttagccatgcatctgttaatgaacatttccacttttcgactatcataaatagtgctgctatgaacacttatgtacaggttttcgcatggtaggaacccagatttcaactcaattttaccctactccaaagcctaaccactctactcctcagcagcttccatgcccctaaaaataatttcttccaaggagcctgccaaccttgaacctagccatgtttggaaggaaagaagccatgatcacatgccatggccttagtcgagcctggtaaacttattggcaggtgggactctccctctgaggcctgtggaatggggcagtagggaagttctccagcatttgtgttgctcctcatgacagggacaggcaaagaacaaaggctgaggccttctgtcttgagcaaccctaaactcaggggattcaggggctcatttagaagtttgggcaccatcagcaatggagtttaaatatgacaccctccttgaccacagagcacatgtttcacgttacttatggctctttcctgagccagtgacccccttacttggtcctctcttatgacaaaggaagggttatgacaccatcaattgttgatagagagggggatgtgtacccatagcccaagccaccaagtcatgggtgaatccatcctataacaatggccttcatgagagcagctagctcctggggcaagccttttctgatctccacccccatagactctatatgctctcttctctagtaattttccactccctttgttcacagaacttaagccattgtctcatctctgtctgagtttttatctacctccctcctcctggaaccccaagagaaaagatcgcctgtcgtcatattccaagtacctagcacagtccttggcactggggaggtgctcagagaagtctgtagaaggaagcaggcaagccagcaagctatgctagggagcagctgctctcatcctgctgcctgatcctggcagcccatgctctgccaggcagcctgagtggagatggccatgtgtactaagccagaagggacagagaagcactgaaggcacttgagtcccataagcccaggtcaccgtaaccacaaatggtgaagtggggggagaaaggggcacagtgggcaggagccagagcagatggcatttgccttcgactgacaaagcacaagggccctttcggttatttctcagccacgcctccaggccccatttcagccctggcctagtttcaatctcattacccggtgctgccagaacaaaatgctcgccctgtccctggttcccaagacctgccccttcaggcccatcacttggcattttaccacttcccagattcgccacttatcaaaacccaaactaattaaaactcgcaaccaattttctttctttattcaacagtggacttctatttgctaataaatctcatgcgctcattcagacacttccatcagttcctggaaacgtgcttttctctttattactttgttatctgagctttttcatctccttcttggacttttctgatgttcagggtctgtatctgtaattgagtcgttcctagaggtttaaactgcttggggtggcatgtctcactctttaagattgttcctgctgcattcaatattttaatgttattcccaaatgggagcatcttgccttccttctttgccatcaccaaacctcagtctaggctgcatctgttacgtctagttcctacagccattacaaggcatgctgtggccctccacccctcctggtgactttcagcagcaatggtgcactctcctttcttgggatagctgttatcatcttggagttctagggggctggagctgagggacctgagagatcatcccatccaatccctgagctttacaggtaatgcagtgaagacccagagcaggaaggggccatacagctgtgagtgacaacactagaaggagtatctgaggctcctgatgccccttcaaaggcctttaccatgtggatgccttcccagagttagaatggatagaagggcctgagatcttatgaacatggccctgtcatgctatgagagtggatgtccctttatcccatcctgcagctgctccctcccacttaactctgctgcctgtggactctcccaccatcttggtgtctcacaaccccaatggacagtgtgttccctttaaactgggagatctctctgagtacctcttctagatcatttatgggaaatagtaaataaatagtaagaaatttgttagaggtcctgtcctgatcctttggggatttcatgtggaaaatcgttcatctctttctgcttttgattccttggcttcacgctgcaagaaaacatttcctccttcagttatgggtgattaataggaccacatccaggctttgggttctagcagcattgtgaaatttctcaggagagcaagaaaaagcagaaaaggctccatgttgcgtgtctcatttgcaacagacttgttctttgctcatttctggtggagtcttattttgtgatggcaatgggaaaggatttgtttgtggtgctgggaactcttccccaccgcacagtggtctgaagaccaaagaaagtgataaataatgttttgcaggcaaggaaagagggtgatggtgctttagctctccagctcttcctaaaggcgcattccaggcccagggctttggtggctgtcttcctcccccttcctgcagcccaaggaacacagagccagcagactctagttcccgggccatctctcacccaagtccaggcacctgggggaagggcagatgggcctcttgcctcagtgggtttcaacggcctgccttgaagtgcaaatggcaggtgttggctcctccgtgcctttcagagcatccgcctggctcttttatgagattacagacgctttcatctcagctttggcccggatttcctccttcccagcaaggctccaaagactggcaacgaggcgagaacaagaagaggaggctcattcctggctgcatccctgctgggcagggtgacccggcctgcacatcttccagccgcatccttttgagccatcgaggctgagaagggagcacagaggaccaggttaagaggggcccttccccttggcgcctggaggaagttgcattgcatcctgggaacgctctgatcatcccctttgctttgtgcctttcacttcaatccagtggagaggggcttcggtgcctttctttttctttttctttttctttttttctacctagaggtacttttttgaggctcgagactgagaacgtaacacatctcttgcacttttgctttatgtgtatgtgtacacacacaccctcagttctttgctgtacttgctcaccgtcttgctcttcaggtttccttttctttaaaagcccaagtagtttccttcccatattgttctcagtgaaagaaaaaggagcgtctcttctctcctaaatcctaattccttccttccatccatcctatcgtttaaccttttcttccagagccaggactttgtgtctgctcctaacatccacatcccttccagatctgtctccacactccccaccccttctggcttcgtctcctgccactgtctcctgacctccatccaccccaaatccacacccttccctgacccagccttccttttcatgcctctgttcttttgctcatgcatttctcctgattttcaagacccacattcacaactgtgcctggctcaactcttatctctgtgaaaccctccagcacctctgtccccagtcccccccaccaggcagccagtgacgtcctccctgtcatccagcgcattcatcccacgcagtgttataattatgacctgcgtttctcagggctcccagccttgggctccaagttgggtcactgtgcaggaggttttgtctccacctactgtggcgtggcctccaagcggatcacagtcagccccctaactatttctgggagtcctcagggagcattgcaggtgttcttcactctaaaaaggcaccgagaaaccatttcctgcccctgccagagttgggagtcctggccctgtccccatgagaccacacagcatctacattatgatctgccagaacccctgacccaccacaatgtcctccatccccaccacacccaagcccacagtggattctgcaaccatgagaatccctctccccaaaccctcatctctccccaccccatgttactttctaccatggagccctagcagtgctgcctcacacagtgatttttattgagacaaccctgtccaattatacttgtcccatcctcttgaaatcagacatagatctttgaaacctaggccaaaggatgacctgatgaagatcaggcataaggccgcagtcagaactgcatttctgtctgatgactaacatggtcttcttaagtcagggtatgtgccttcctaaggatgagttacttcccccaaaaccccttgggccttggaatttaaaaaatcactatcaagcctgtgttgccaaaattccaaatgtgccgtgacatgtctggatcctaaaacaaacagaatataggctacagaggcacacacaccaccactgtgcattcctcacccacagcagacatcaccagtcaatcacagcataggttctcctagtaaggccatcaggattcttctcaacacactgcagacctcacctctactctgaaggctttctggatcctcttgatagaaatgattccactcttttcttacctttcatagccctcaagactctgctactcttgtctgggctcatctagattgtagtaataagactaatggctaatctttactgagctctcactttgacccaggcaccattctaagtgcctcttattaaacttatttaatcctcacagtcatgtgaactaagtaccaatcccatgtgacagatgaaaaaactgagacacaggaattacactgttccaagtcagagactgtgtcccgaccgcctttgtcattccaatcgttcaacatttttattaggcacccatgtgtgccaggcactgcaataggccttgaggacgaaatccagatccccagaacctctgcctccccagcaaattgggcaaagctgttttgcttcccagaaaacaagaactttaatcctggcttccaagtcccagggtgtctgcctccttgccacagccaccaccctcagtgccttacccatctcgcctttgccttgcccctcatcccacttctgttgcacttctcacctcgtctttggaggagaccatggttgattcagacttcttggccaagacatattttaggctgtgcaggccaggtctttgtggcaactacttaattctgctgttgaagcatgaaagcattcatgggcatggctgtgtctcaataaaactttctttacgtccgggcgcggtggctcacacctgtaatcccagcactttgggaggccgaggcatgtggatcacaaggtcaggagatcaagaccatcctggccaaaatggtgaaaccccatctctactaaaaatacaaaaatgagctgggcatggtggcagcatgcacctgtagtcccagctactcaggaggctgaggcaggagaattgcttgaacctgggagatggaggttgcagtgagccgagatcacgccactacactccagactggtgaccgagcaagactccacctcaaaaaaaaaaaaaaaaactttatttacaaaaacaggagacaggccatagtttgccaacccctgtcccaaactgttctcccacctggaatatgcttcctccactctcattttgtaacatctgttgcttcctggcctttgaggctcagcggtagtctcacttagccaggcaagccttcctccccaaccccaccatcagcacagcacttgctaatctctcgcttcatccagttcttctttcactttcattttgcatctcttactcatctcttcctccttcaatggttagctccttgaggtgtgcagcttaagttttttcttatgtacattagctgtagccatgtgctggattcataatcggtgcacagtagatgacagacagttttgaagatttgtttgattgcaacgtctggggaagggagtggttctcagtctattttttctgctccaacacatggtggggagcgtgaccgtcattcattcctcatgtatttattgcgtactcactacatactaagtactccttttgtttgcttgttttttaatcaatcatgtgctagcttcaagctgttaccagcacaaatgtgtgatggtaccactcttgcaaaccaatggattaagatataaaggaaattttcaaagatgacagggctgtggtaattactagtcaagctgtatctgcaaatgtataaagtacttctgcatctattgtctcattgaatcatgacaaccgtcagaggtgaatggtagcatcccgttttgcagatgaagatacagggcccaaaagtatgtggcctgcccgaggtcacacagcttctgagaaatggagcttcacttcaaaactgtgccaccatgcttgctctctgaaaacaaaataaaaccacttttctgattctaaagagaataatccaggttaccgtagaaattgttgaaaatatatcacgcagaaaataaaaatcatgggtaattcctacacccatagatagctgacattaacagtatctgcatattcttacaatttgcatgtttttacagaaatttgaattgaggctgggcgcagtggctcacacctgtaatcccagcactttgggaggctgaggcaggcgggtcatctgaggtcaggagttcaagaccagcatggtcaacatggcaaaactccgtctctactaaaactacaaaaattagccaggtgtggtagtacatgcctataattccagctacttgagagactgaggcaggagaatcgcttgaacctgggaggcggaggttgcagtgagccgagatcgtgccgttgcactccagcctgagcaacaagagtgaaactctgtctcaaaaacaaacaaaaaaaaaattcaaattgaatcctgttgtatatacttgtgtgtagctgcatttttctgcttttttttttcttttgatacctttggtaccaactgcctttttaaattaagatataatttacatacaatgaaattacacttttagtgtacaattctatgagttttgacacacccatgctgttgaataaccactaccaacatcaagatatagaactgttctatcaccccaaaaactcaacgcccaccttcagaccctggaaagcaatggatttgtctgtatgatttgccttctctggatgacacataaatggactcatgcggtgtggtgtagcttcagttttcacttagcattggaggcatgtgtccacatgaggttatatactcttcagaagcattgttttttaatgactacctgccacccggcaggccacgtgccctccagttcacagccgcagcctctcagagaatagaaatgagaggtagagagctgcattgggaagcacaagggcaggatcgatgtgatgagcacaagtcacccacgagaggaggtgctggctcttctgctttcaggccgaaggggctgagctccatatgggcgggctggacagtaccacaccacaatgcacagcacctacgtttgcgtcctgctttgtgcttttagatcccttgctcgtatgtggcaccttctggattctcggtttcagattgagtttcctcaagcaagtggagataagaatgttcatcttatagggccattgtgaggatggaaggacatgtttttttttggttttgtttttgtttttgtttttttgagatggaggagtctcactctgtcgcccaggctggagtgcgttggcgtgatctctgctcactctgcaacctctgcctcccaggttcaagtgattctcctgcctcagcctcctgagtagatgagattacaggcacccacaaccacacctggctaatttttttgtatttttagtagagatggggtttcaccatgttggccaggctgttcttgaactcctgacctcaggtgacccacccacctcggcctcccaaagtgctaggattacaggcatgacctaccgtgcccggcttgaaggagatgatttgtgcccaagtgctgaccacagggatgagcactccggctgttttctcttctttcccatccccaccaccgctgctgcccctcccctgggggtttggatccgcagatcttaagtgctctcgccacaaaaaagaagcgtgggcgtggtgattcacgcctgtaatcccaacactttgggaggccaaggtgggaggattgctggagcccaggattttgagaccaggctgagcaacacagggagaccccatcaagaaagagagagagagagagagaaagtgaggaagggagggagggagggaggaaggaaggagaaaatggcaactatgtgaggtgatagatatatcaactcaattgtggtgagtgcttcacaatgtatacctatatcaaaacaagttgtacacctaaaatatatacaatttttcttgtgaagtatacctcagtaaagctcaggggcaaaaaaaagagatgagtcgatgttaacccaaactgttaaaaacagatgtcacctagttgaagctgcttccctatgtcatcaaaaggattaaaagagaattgaagaaaaagagcacttcaggaagaacaaatgataggctggaaacaaatacacaggggcctctagaagctgtgcctcttgatgaagaaggaatccctcgaggacaggagaggagctgggatgacacttgtagctctttgtgctaaaatgactcaggcagctcctgcattcattttgggtgctgaagttttagaactgttttccccacccccaccaacaccttcttatccctcctcctgggtctttcttagacttctcccagcaaagcagagtccgtatcctagtgtgttgctatggaaagaatggcaacatcacttgtgagttcatgaaaaaaaaaaaaagaaaaggaaaaaaagaaaaaaataggacaagcgggattttttttaagtgttatgaaactggaagaaaaactgttccaccactaaatatatccacttacaaaatcagcagatgttagggaagggctcggacagagtcagtccctctgccctgcagaaaactcatagcagagcattttcatagccattgctcctgtgagactctgagaaactgttaggtctcagggctggtggctggaaccttcaatgtttgccaaatggatcatgtggcagccatgacctgggggacctttgaataactaggctccactttgttttaggaccttcctcctgttccttctcctccatttcctgtgtcagatcaccccaactttgacctttttgggtcccttcaagaagcacagctttagagcctgggtttgaatcccagctttgccttgcattggctatggtacttgggtgtattgctcaacatctctgagcttccagtttccatatgcatgaaacacttactgtcaaggggttgtaaagtttaacagtaacacatgaaccacctagcagagtggccagcatagagctgttagtaatattgtgtaatagagattcttttcccttctagtcacattttccatctgcccggtgggctgctggggactgcaaagggggcagttcagcctctgtcttccagctgacagagccaaccaggtggccctatcaggtgtggactccacctcaacctgagaccttcctcagcatccttcatgtcttcctaaaattacttgtcagtgtcaaagtctagatagagggaatcttctcacattcctggttgatatcttgggtcggcctctgttctggtgaactattgctgcacagcaaaccacagcaaaaccaggagttgcagacagaagtttacgattattatatctcacagttctgtgagtgagaagtttagacagactgtagcagttatggcttgtctgtactccaggaggcctgggggcctcaagtgagatgggcctagagcagctggagactggctgagcgtctgtctccctgcttgggtaggctgagcttcctcacagcatggtggcctcaaagtagtcaaacttctgactcctccaagaggaaagaagtggaaactgcatgtcctcttaaactgtcgtaggttcttaaatatgtccagaactgtcatagattcacttccaccatattatactggtcaaagcagtcacaggtcagcacagattcaagggaggtagggatgggaacatggaccccatctctcaatgaaaaaagtgtcacacaatttgcaaccacctttaatctgccacagtgtctgccacaaagtcaccacacccacctgcctgctggtcctggaaggaaaatctgagaagccgatggtggagactgagagcagaactaagaggcaggaccaacatcactcatcacaggcaaaggcagagctcagatagtgtacatttcagggtagctggctttttaaagagttgtatgcaaaccagaattctggaatggctcccaattataaatgctccatgggtatgctctctgacagattcctgtcgataaccaccacccctcagcttctcaagtgtaaattccaagcatttatacatcaaatttgctaaaatataaggcatttccatcccaagtcattgtgctctgtcctgatgaaagatgggtccacattgtcaaaattggcagaatcagttaggtgggccttccccagcaggttgtccaggccgtgattacctggaaagaaagattcctgctttgcgtggtgtatcagtttcctaggactgctgtaacaaagcaccacaaactgggtagcttgggagagattcattgtcttctagttctggaggctagaactccaacgctgaggtcaacagggccgtgctccctctgaagcctctaggggaagatctgttccagacccatctcctagctgctgggcacctcaggcttccttggcttgcatacggccatcttctctcagtggctcttcacatcatcttccctcagtgcctgtctgcctctgcacccgagtttccccttttcataaagacactagtcatattgtatttgggctcatgccagtgacctcatgttaacttgattacctctgtaaagaccctatttccaaatagactcaaaatctaaggtactaggggttaagactttgacatatctttttagggggacaaaattcaatccattaaaggtggtgagcagagatggactggggccaaagcctggcctcgcacaatctcacttccagtctctcttgatctccacaggtcataacccaggcctgggtcagagcaaggggtcttctagaatagaagatccagagggcaatagtctcagtgcccagaacaatgctagtgtatattaggccctcagtacatactttactgaatgaatgattgaatgaaccgattggcccatcggtgaatatctggtgaccagacagagaaaaaatggtccaccataccccatgtattgtagcttctgatctttaagtggccaggtatttgagggtatctgagtcgcggtctcagttgtgttgaggtttgcagttattgctgtagttacttctgctgctaataatatgggagaattcacaggtctctcctcctcctttgaagttgagtcagtgacatcttgctattaagaaaaatacaggagcgactacataccttactctgctgtcagctgttagaagaactcctagagaggaaaagggggaccccactgaaaagcttactagttggctatacaaaagcagtcccagcatcagcctgacttctcagcatttgagatttgtatcttcaccccaagataactttggagtaagttaaactgatttggatggaacttgttacacagttgtggcatgaattactagttgattgttccccttgaaatcaaacaattgccaagtgaggttcttagtagtgtcttgtgcaaattgcactagacgtcaagagataggcagcgtagaggaggacgtgatggtgtgtgattgatcttccgtaactgctaactgagcacctgctgagcaggccccagttcttagtgctatggaaaacacagtgatgaacagcaccaggttcttgcccaaaatgagctcttgacccactaggggcgagaaatacccacacaggtaactctaatagatgttacagagtaacaagttcaaaccgtgttctctttgagtagaggagggagtaaacaatctgacagagggaatccagacacactcttgtaggaggagggatataagcaaggctttgaagatacgcaagaggttggcctttgataggaagattttggagagagggctggttcaggcagagagaacagctcgagcaaagcctagaggtggaggagggcagagcaggttccgaaatagctgacacacactgggtgaatcagaagcccaggctctctaagcagggctttgaagacgacatggaggaacttggacaatatttcaggaatgctagggagccagggaacggttaagagaagggagtggtgtgtttcagcagatcacagggacagagtggaagggtgattgggaggccattgtgactgcaggtggagaagaggacatgggacagagtgggggggcacacacagaaatggactttctggtgacggcttaagtgagatgacagcccagatttacaaacccacctaacagaggaactgaatgggaataacctctcctattagtgtccttcacagaagccacacgcatgcgccccagctcagatctcctgggaagtggccagcctgaaaccagtgctgcttaagctgggctgctccctggaactgtccaatagctttaaaaatatatataaatgcctgggccctacctacagagaaactgtcttaattggtatggggtgaggcctgagcactggggtatttaaaagctcctctgttgatgccggtgcggaacaagggttgagggccctgcctggagaaatgtcttcccgtgtaaaggcaggctgtctggctgctgtcagtttgccattaatttgtgtggttccttaattaaaggctatgtcctgcactaggtagtaaactctctgagtatagggattgtaatactttcctgtgactgctgtaactgagcctttaaaaggccatttcaccgttctgtcaagccagccgcttcaggacgatggggaacgtgggaagaccagatagttccacggcccatcgctgtgctgtagttgcagttgttcgctgtcaggtggcgagtgcagatatgaaccatctggaagccaggacccagtgtgttttcttcctcgttcggctggtcctagggaactccttacgaggcataggcatcagcaggggccacactcacttggaagctctgggtgaacatctgtttccttgcctttccagcatctagggctacattccctgcattccttggctcacagcaccttcctctatcttcagtgctagtgtgtagcatcttctctctgactccgcttccccctgctgctgtcacgtggccttctgctcttctgtctggaatctccctctgcctctctcttagaatgacactgaggatggcgtttagggcccacccagatcatccagaatgatctccccacctcaagatccttaacttcatcacatctgcagtataagataacatctttttttggcatataagatagcattcacaggttccaggggttaggacctgggtatcttttggaggaccacaatgctgcccatcacagggattatgtgttttctttgtagcctcacaagctagtacagcacctgggactgggtaagccagtgacatagcgaatgaatcaataaatagtgttgtattagtctgttctcatgctgctaataaagatataccccaggccaggcacagtgactcatgcctgtaatcccagccctttgggaggttgatgcaggcagatcacttgaggtcaggcattcgagaccagcctggccaacatggtgaaacgccgtctctactaaaaatacaaaaattagccaggcatggtggcatatgcctataatcccagatacttgggaggccgaggcaggagaatcacttgaacccgggaggcagaggttgcagtgagctaagatcgtgccactgcactccagcctgggcaacagagtgagattccatcttaaaaaaaaaatacccaaaactgggtaatttataaaggaaagaggtttagttgactcacagttccacatggctggggagacctcacaatcatggcgaaagagcaagggacatcttacatggcggcaggcaagaaagcttgtgcaggggaactcccctttataaaaccatcagatctcatgagactcattcactatcacaagaatagaacaggaaagacccacccctgtgattcagttacctcccgctgggtccctcccatgacacaatgtgggaattatgggagctacaattcaagatgagatttgggtggggacagagccaaaccatattggcagatcaagatcccattgcgttagaaatcaaactcacaggaatccagaaagagtactggaggcaagcttgggaacaccaggcacagggggatttaacttggtggcttctgaaatacacatcaagttgcaccactctccattgccctcaggataaacactactgaggtcctgcttcccctctcctctccccgctttcgtaaagtcccatactacccctaaaattggccctaggacgcttgcactatcagtacttctgttttctttttctccactagacttaagctccaagaggacagccctaagccaggctccatctcctccatctcatttatctcccccactcccaccaggacagaaggtggcacttagtggctgctcaaatatctgttaaatgaatagaggaactactaatgagtggataagaacccgacaaccttgcttttgagaatattggcttatcggggaaactggattgttttgttcactactgtgtccccagtgcctacaccaggggtctggctggcaaatcatcagaaaatatttggcaaggagaagtaggggacattcaaagatcctgtggcttagggggcagaatgttcagggagaagagtgtgtgaggtttggggggtaccttggaattatgtcttgggagatgagttgggatagaattcaatgaaaatggggaaccagcatggattattactgaaagaagagatgggtaagatcagagatttaggggagatttgcctggcggcaggcacagggcaaattgggataaagagacttgggaaggaaggaaagtcattcgattcccgtaatataggcaagctgtcaggatggctgggactagtgtggagccatctggaatgttacgaacaaatgacaacagagcatggattcagattataggagagaaaccaactcatgagctaaggcctcacaccctgggccaacgggggtatccaagatgactcttgtgtttgccaacctgagtgacagagcttggtgccccctcaggtgtgggaaaggaaatgaggaagccaggtgatcatcttgacttgggacaaggtgagttttccataaagataggacatcctattatttttactgtggttgttacaattactatcattattatcttattggttaacattattgaatatttcctatataccaagttgtgttgtgcacttttcttcaatcaatattatttgattccacagcaatcttgtgttagtttctattatttccatgatacagatgagaaaactgagattttcttttacttctgaaatgcactttccctcaaacaagctagttgttataacgtttttctaacaccacccgtgtaacaccaggcgcacttactttttcatttctttccctgtttgcctgctttgatcagccggagctccttgatcagacttgctcattccatcagccaagaagtaaccccacttctcatttgtgtgtagggttttgcttcttcatatctttatattttggccaagcttccttacccagggtcattacatcttggaacattaggactgacagttggatcccagcactttgggaggccaaggcgggcagatcacttgaggtcaggagttcgagacctggctgaccaacatggtaaaaccctgtgtctactaaacatacaaaaattagccaagcatggtggtgcacacctgtaatgccagctactcgagaggctgaggcatgagaaaagcttgactccaggaagcagaggttgcagtgagccaagattgtgcaactgtgctccagcctgggtgacagcgagaccatgtcttaaaaaaaaaaaaaaaagacagttgttgggaattcccctggaaaaggctaaagcaaatctcaaagacatggttttcgtgtctgaaaaactccactgagcattattttgtttcttgttcttatatacccgtagctcacactcagtctcaaaatctatggagtacacaggttaccagtataaatccaactctatggcgctatgggaagctatggctgctacatagcttttgaaattgactaatgtgttcttgcacctaatggggagccacaggggccaaagaaggatctagttttggtccccatcttaattcagcaggccggctccatgctgtagctcttgtttgtacaacaggaaggtaacagtcttcccgttacctgcttctaaaacccagaaggtaacagcacagagcgggtgtaatgaaggctctgagacagatcactgaagaaacctctcttcagcctcagcagcctcaggggaaaatagaggtcctagcatttcctgctctgcctcctcagggctaagaagctcctgcaagaggatgcatgtagaaatgttttgtgggctgcaatgcacactcaagacccaagggatacttattaccatcagcagcatcaccgcggtcattactggtgcagaggtgatggaaaggactattggcaaaaaggaacaagcagcctggtgactttctacaaaaaagcaacactttacagaattgcttagaaatgtgaaagagggattgcggaagaatggacagcccccacaggttctttctgaagtgtaaattaaaaatcatgcctttttagaacccttccacatgggacagacttggtaagaattttgcctccgtggtgaaggtgatcctacaaaggaccttctcttcccaccttttggtgcatcccacacgtgtcctgagagaatttttttttttttttttgagacggagtcttgctctgtcacccaaatagatggggttacaggcaccagccaccacgcctggctaatttttgtttttttttattttttatttttttcagtagagatggggtttcaccatgttggccaggttggcctcgaactcctgacctcaggtgatctgactgcctcggtctcccaaagtgctgggaatacaggtgtgagccactgtgttcagcctgagagaccatctaaaagatggaggacgggggtgctgggaatattgtcagacccatgggaagtagggggaccggctggcacactggcacccagcagttgttggtccatccaccaagacgtcacaccaggaaggtcaaccagaaccatccctttttcggcccaaagctggtcctggtgttatcatgggaggcctccctggcctgagggctgttccaggtccagatagggcacgtcttccactaggctgtcaaaggtcacctgccaataaccccccagcctatgtacctttgcatgggccttgatacctctctgatccttataaaatgagtggagctgaacaccatcaggtccagacttgcagccataatttccctggccttcaccctgcctgactgaagctgttttgttgtgttaggacacagtcgtgcatgaggctccacgcctggcgcctccaggagccacgagtattatgcagggctcgtacactgctgcctgcgtgagaagggccagagtttgtgcggtaggcctcatgtttctccctattagccttgggcctgcagaagaacctgccacaagacattcatctcttataagactgaagacaggacggaaagaagagagagagagaggagagagcaggtagataatgttgcacgccttatgtcatctgatcctcaatacagccctaggaaataaaaagaaaaatatttattagttcagcttaaagacagatttagctccagcagcttcaaagtaagatctttcacctcccaaagcagaggttctatacaggggtgtgtagccgaggatgtaagtcacatatgtacccagtcattacgcgctgcagcatcagagtcttcaggaggttctcaccccagctgcccatcaagatcacctagggaacttcaaaacctaccaatacctggccctaccccaagattctgatgtaactggtctaggatgtggcctgagcaccaggatatttaagcagacatgatttctgattttaaaatatctttctggagcattaatgaatgggagaaggaaatgagtgggggcccaagagaaaccaggcaggaggcctagatgagagatgatggtgccttggatcggggtggtcatagtggaaaatgagagcgctagatgaaccgtagacctgatttggaggtggcacagacagtacgagctggtgcgtgactctctaaagactagcattttcaaatgtggagcagaggcagtcatcatcctaactgtggcaattttgtggaaactgaagacaacagcagatcttggccttgtgaatcttatgggtcagggctgagagttctagctcactgcccattcccaagaaagagcagctcagcttctccggggctgctggaggagcttcctaagaggtggagtggagtgagatgaatggcacaggctgcaaaccaagctcagcttgcccactgtattagtttccaatggctgctgttagaaattaccacaaacttagtggcctaaagcaccacaagtttattctctttaatttctggaggtcagatgtcaaaaatcagatgcactgagctaaagtcaaggtattggcgggccggctccttctggaggcttcagggagaatctgtttccttgccttctccggcctctggtgtccacctgtgttccttctccatcttcaaagcacatcacaccaatgtctgcttccataatcacattgccttctccttcgtagtcaaaactcctgcctccagaatcgcttgaacccaggaggcgaaggttgcagtgagctgagatcgcgccattgtactccagcctgtgtgacaagagtgaaactccatctcaaaaagaaacctcctgtctccctctcataaggatacttgtggttacatttaggtcccacttggggaatccaggataatctctccatctcaagatccttaatcacactgtcaaattcccttttcacgtcatccaaatccctttgccgtacaaagtaagattcccagattccaggaattaggacctggatatctttgaggaccatttttcagcctaccacaccctgggtcctgtgtaaagagatgccgaaacacagcctctcggtgtggtttgaatctgagtggtttttgtctgggatttaactggcttcagtgaatggctttgtggaggacattctatcagagaataagagtaaaccttcaccatttatccaaggctttgagataaagggaagtctcttcgaggtagagatgaaaggcgttcaagggaaagctgcaaagggtggcctggaggcggggatggagggtagaatggagaaagatctgacagacagaatctaagaactgctgaaaagccctgtctcgccctgatctgtgcctggggagcagagaaatctcattcctctcccagctccaggaagatggagtgtgcacgaatcacccacaaggaaggaaatgaaaaggttacaccaagaattgtcgatattataaatccctgtagtctcgcagcctctctaaatgttttgatagcagaatttgatggattgtaaatcagagcaggcttatcttaaacatttgatagtgccttatttatttatgtatgtgacacataaaaccagaattgattgtttcttctttctgtcttagcaagatttttttttctgctttcagaaacacatcactcttctctaagccctggttttccgtgtttgtgggcgtgtaggtgtgtgtgcttgtacatggtggcagctgttacgattctttccacacggagaaagaatactttgcctgggagaagattataacatcaggaattaacagaaaaaataagaaagccgctatgcttcaaaatatgtcttaatcttattgctttaaaaaaaaataaaacaagattattgctcagagaaagagggagattaaaggtgttacaatgtgatcggtttatgatttgaaacttaggtagatacacatacaaagacaatttcctgactttcctggctcagggtgtagagtcatgagttacctcaatctcctcaaatggatcaaattagcctcattatcatactctttcttacacactaatttcagctttacaatacatctaggtctgggcacaatggcccacgtctgtaatcccagcactttgggaagccaaggtgggaggatcacttgagctcaggagttcaagacgagcctgagcaacatagtgagactttgtctacattaattaattaatcatctattggggctgccctcaagtcatcataaacattgctaccatttattgcacgtttgcaggtacctggcattatgatggagtcttcacaagcattgtaccatttaatcctcacacccctatgaggtggtcattagctccagataaatttatttattataaataaaccaaatctagaagccatgtatcttgccaacctcctacaactggaagtgtcggatacagctgcaattcaaaccgttctgtactgattctaaagctaatggacttacccactcaactgacttctcaagaatcagttcagttcaaaatatcctgaccttgacattgagaacagacagccaccacctctggaagacacttcactcacctgcccaggcaggccacaaacgccttgtaacagtggtgaagctcctctcaccataattatattctgttcctccccaaatcttgtggttgaccttgactaatgaatagcgcaggttacctctaaaagtcttcccactccagtgccctatggaccttcttgattctggcttttctccattagcttctcccttcatggcatttgggtgcaaagttccttccttccttccttccttctttccttccttccttccttccttccttccttcttaccttccttccttcctgccttccttccctccttcgtttctttctttctttctgatgaagtttcgcttttgttgcccaggctgggtgcaatggcacaatcttagctcactgcaacctctgcctcccgtgttcaagcaattctcctgtctcagcctcccaagtacctgggattacaggcatgcaccaccatgcctggctaattttgtatttttagtagagatgaggtttcagcacattggccaggctagtcttgaactcctgacctcaggtaatccaccctccttggcctcccaaagttctgggattacaggcgtgagccaccggcccagcctcaaagttctttttataagctgtcaagacagtgcatcattttgactacttcaaaaagccgtgtgctatatagttttttttatccactttataaaaactattatttgggattaaaatttcttctaatatttgatctggactcacagatgactttttttcctctctctgtgtcttttttttttatctatttgaagctcttatctcatatttatctattcctgaattgtcttaagtaagagaaagaaaaacttatttccattataaaaccactgaggagctttgttttcatgctgaaaagggaaaagtacatttcagtggagctttttaagacctttcaaaaaagtatctttggggagaatatgaatttttaataataactgaataatttgaaaattatttgcaatgaacataaaattgtcacgggtcgtcagtgagcctccccgttttcactgacactcatgagtgtgtcaaggctgttcctcacatgtagatctcagctgagataccctctcctcagacaggctttccctgattataccattgagagtaacttttttttttttttttttgagacggagtctcactctgtcacccaggctggagtgcagtggtgcaatctcggctcactgcaagctccgcctcccaagttcatgccattctcctgcctcagcctcccaagtagctgggactccaggcacccaccaccatgcccagctaattatttgtatttttagtagagacggggtttcaccatgttagccaggattgtctcgatctcctgacctcgtgatccgcccacctcagcctcccaaagtgctgggattacaggtgtgagccaccacgcccggccgagagtcactctttagtcaccatcacatcattttgaaaacctctctgcatagcacttaccactctaagttctttgttttctggttactttctgtctcccctcctagatggtagactccttgaaggcaagaatcttataccttattccctgagtatctaaggcagtgtctggcacatagcaggcattcaagaatgaatgaatgaatggacaaatgaacgagtgaatgcctgagctatgtttatatttctatgtccgaaaagaaaaaaacaacgatagatctgctgtagatcccttttaaaacaccaggaatgtttgaagaagggaacagagtggtaagatgcagattgctggcgatgagtgcctctcacagttcactcccagtttgtgcagggaggtgttgaagacagggatgacgtgatcagattcgtgtttagaaacatgatgttcagccatggcatcagttgcgaggtatggggcagcaagcaatctgcggctaaaaataaagccttgaagtttgtgagtggcttacttttcttgattggcaaggttattcctgttaaaatgcaatcccactcatgtcctgagattcttaaggaagagggaatggtgtggggttagaaccaacccaagaatgacaggtaaccctgagagaatgttacaaataggcatcccagcaaccatgctgtcgtggcaggaaaaggctgagaactgctgttttagaaaggaatggtggcagcgaggaggctggcctgaaactctgtctgtcgggatgttttcagttacaagtgacagaaaaccccatcaaactggtttaaacaaattgacactgtggaaaaatctgtgagtctgttggactgggacacagtggaattcagtgggacatcatcaggactggttctctgcatctctcaactcagccttcagctcagcgcccaggcatgctctcctccgtcgtggcgagatagccactggtgcctcttggcttctatccagtgccctcagcaactccaccagaaaggagcacattcgttctcccaagggttccaataaaagcccagaatggaatcccactaattctgactgctgtacttggatcaggctgttccttaatcactcactgttcctggagacagtgatgttctcactgggcaggaccaagtcacatgtgcagtgccagaggttccacctgggccaggcatgggtaggggtctttctctagaaaaactggatggccattgccagaagaggaggaaaagggcactaggtaggcaatgcctgcatccaaccggggaggcccagggctcaggccaggtgcagcactcactgcagttgtggaggaaagccccgaggaggacctggggcagagcaatgaagaattaggagacctcatggaagcagagtcaggaaggcctggggcatagcagactccaggatggggaagaagtggaagaaccagtgctatcccggtttccagcctgaatgactgagtcgatgctggtgcatttgtttggaataaggaacattacagaaagatcaggtttggcaagcaggtgaacttgattctagatatgttaaatctgaggtctatgtgagaacccccactccttcccccagtggtgatcatagatgcacacggcatgcacttggaagagactccaaaaatcatccagctcagctgctgccaagttctcctggtggggataagtgagtagaccttgctctccaagtgaaattggatcgtctattatctttttttttttttagactcagtctcactctgtcacccaggctggagtgctgtggcgctgtctcggcttactgcaacctctgcctcccgggctcaagcaattctccctcctcagcctcctgagtagctgggattacggtgcccactaccacacctggctaatttttgtatttttagtagagacagcttttcaccatgttggctaggccagtctcgagctcctcctgaactcaagcaatccacccgcctcagcctcccaaagtgctgggattacaggcatgagccaccgcgcccagccggatcatctattttttttattcatgtattatgtttcctggttttctttttggtttttttttttttttttttttttttgagacggagtctggctctgtcaccaggctggagtgcagtggcgagatcccggctcactgcaacctccgcctctcgggttcaagagattcttctgcctcagcctcccaagtagctgggactacaggtgtgtgccaccatgtccagctaatttttcatttttagtagagacagggtttcatcatgttggcctggctggtctcgatctcctgacctcgtgatccgcccacctcggcctcccaaagtgccgggattacaggcatgagccaccatgcccagtttatgtttcctggttttcatgaattattctgactttgttaagctttcagtggagagtggccactccagcctttgtccagttatgaatccatctagtccctcctgtcttcttgccagccgcctgcagctgggaaggaaagtctggggctctggagtggaagggccagggctaggaatgttggtttggtagatatctgcaaggacgagctcagatctttgggatggatgagttcaccaagaaggatggagaggagacggatgagaagagccaagggcatggcgaggcacctactgagaacagaaaaacagaagaggaagctgaggggccgggcacagtggctcacacctgtaatcccagcactttgggaggctgaggcaggcagattgcctgagtttgagaatttaacaccagcctgggcaacatggtgaaacactgtctctactaaaatacaaaaaaagtagctaggcatggggggatgtacctgttgtccaagctactcgggaggctgaggcatgaaaattgcttgagccgaggaggccaaggctacagtgagctgaaatcacaccactgcactccagcctgggcaacagagcaagactctgtcaaaaaaaaagaaaaagaaggagaagaagaagaatcgagatcaagaagcagcagccagtagaggtgttttgaggatggcactgcagagtcagtgatgggggatatatttggcagtttaagataaaattgtcaacagagctgggagggcagaatccacagaggtgaggggtgaagcatgcagtaagagaagcggtgagcaggtgtaatcataaacttcctttgagaattttgatggtaaaatcattttaacaacaggtaccctctgttgtgagctccaagctcatcaaggatcaggcacagaaccaaatatactcaaattagctcactggatactctcagctgccctttgatgtggctaccattttcatccccatgttacaaatggaaaggctgaggcttcaaaggattggtggaacatgtccagggtctctcacccgtggcgtggaaccagacctcgaaggcacgtctcccactcaggagcctgactgagctcttcacctctgccataggatgaaggatctgatataatgatgtgtagatggtggtggaatcgagccgtcatgagagatttagccttgcttttcatgtttgctttgctttgctttgtttgcctttttatggaaacagcaacctgaggtgtttgtaacccaaagggaaggggacccagtggagggagacaggagttgacagaacccatgagtgctgagctggaggcctggtggagggattagccttttaacagggagaccaactacctcctcctaaccaactggaaagcaaagagatgcttggagatggaaaaggtgagctgcatctcagcaagatacagggcaaaatctactaaaacagagaggcgaagttgggaaattcatattggaacagttacacaggaaatttaagaggtaggaacaaaagatgagtaagaaaaaaatctcagagcggcatgaccaggtgagatgagctagcagaagtacgcagcacctgatacagtgcctgcccactgaaaggcgctgtagaggaaaacggggtctgatggggaggaggggtggagcagtccttctgaacatcagtttgccaatcccctcaccactcacactagcttactaatcaaagttatcctgtgattagtcccagaacacatcagtgtcaaaggtcctcattcgggccagttctgcaggtgaaggttcaccctattttacagctgcaggaactgaggttggccatggtgaattaacatgcagcatttggtattctctggcttgcatgtgggtttgggggttgtgagatgggcactaaggctgtggccagagaaaagtggactcctagtaagtaatgaagccaggattcaaactgggggtgctggcttcagcctgtgccccacttctactgacctggtgagcactaatgctgagcactgatggagaacaaggcccctggaggccaaggctttacctattgaagggtaggaagggtctgagctttggaattcattggtttggagtaaatgagtaaattcggggctcccggttcacatgggtccagacccggtctaccttctcaggcatcagtggcttcctctgcccctgagttctgactgccctgtctgaagccaccaccccatcccacctctggcaggacacccagcctcctctcagggccccgtgtcacccaaatgtgtggtgatgctcacacagcaggcggcgtgaagcagccacagacctcacttcaaacttccatgggccactcatgaagcttttttggttagaaaggatcatgtcagctttcttcctaacaagagcttctcagagcagcatgttgaaaaagacatcacaattcaattaaaatcttcctcctttgaacactcccagaggggcaaggccacttggaatttgtgagaaatctaatttatagacacaatatcaggaaatagaattgttaacaatgaacaactgtgtgtcatagggatcaagcagcaggcatggagccaggattatctaggttctaccctcttcagcaagccatcgaacctctctgagcctcagtttcctcatctgtaaaatggagatcacagccatcagttggtgttctgggaataatagagattgtgcatgtaaaccaggtatggtggctcccacctttaatcccagcaccttgggaggctgaggcagggggatcacttgagctcaggagttcaaaaccaggctgggtaatataatgagacccctatctctattaaaaaaaaaaaaaaaaaagattgttttaagaagctgggcatggtggcatgtgcctgtagtcccagctactcaggaggctgaggtgggaggatcacttgaacccaggagttgaggttgcagtgagctatgatcatgccactccactccaacctgagtgacagagtgagaacctgtctctaaatagaatacaattgtaaaagattgtgcatgtaaacaacattttagtactatcaggtttccttggtcaacaaaccccttcttttctttttaaaaatgtgtccgtttgagcaactaagcaatacaaaaggttaaatcacaaacacagataacaggaaattgcttcttatgtctcaactttcccaaatcaccaactctgtttctgtggatcgtgtttataaagatgttttatgctatgttatcaagcagccagcattctgttttcctttcttttccaggattataattttgtacagttcttcccccgtttctacctcgtcctccaaattgtctgtcattccctttgggagtattaatacagttattctactcttcggcatggcagggagctttggctgtttgtagttttagttgcagcaaaaaaaaaaaaaaaatgtagctgtgaacatctctgtgtcttcatgggacagtgtgtttcagcccaaccagttctgaattagaagaagccaagtgatgtcttgattccaaaggtagcaaacaaggctgtgccgcagttgcgtgacttctgattaaaaatatacattcccaggctctgcacctggaggcttgggtgtagtaactctggactgaggttcatgaattggtatttttacaaagcactccaggtgacgtgtgatggtttgggagccacattataagcccaactccaaaattcaaatttggattaagataaaatggagaaaaatcagaaaactcaggaattaactctcagtcaccagtgacctttcaaaggcaattctgtttaacagaagagaaaaatggaggcaaggatggaaacagatgagaagagagctgggttgctggagctcagagtaaagcccaggccttctgctttgcagcatctaattcctcctgccctgcccccacccgtcaccattgccacaacatatctacccaggagaatgccttctcggggggtgtcatgttgtgattttaaaacacaaaggagcaattcctgctcccaccccctcaaaaaagatctacccttgatgaactgaggcagaatctgttaacagccctgtcagaagaccccacaaagctaaaagcatcctttttggttttgatgtcttgtcaagatgcttcctttgaaagctcccagacagccctgttatttctcctgacagccctagtgaaaagctctgcgatgagacgtggcatccctgtcaaagcccagaggtgtgattccctgagagcgagcagctcttgagcattccctgggctcagagcactgctgccctctgggtagacccctgggatcccggctctgcagctccctctggcctctgaacccccgagggcttgagatcctccactgcaggaggcctctgcagtctgactcctcacctcccccagatgcatccctagagaggtcaagagcggagccatgtaccatcctgacagccagactgtgagccagccaccttgagaagtttccaggggctgctctggcagtttgatccattttttccttctcccaggggctgcaggccacttgtagggaaaggtcaggaaatgccaccacctgtctctggaactgacggtggtaaggaaaaagaacaaaggatgcagaggagagtgcttcttggggagccttacagagccctgtaccttaaagcttgctgcacctgcgtagtagcatcctcacctgggagcctgttaggaatgcacagtcatggccaggcacggtggctcatgcctgtaatcccagcattttgggaggctgaggtgggtggatcacctgaggtcaggagttcgagaccagcctggccaacatggcgaaaccccatctttactaaaagtacaaaaattagccaggcgtggtggcacatgcttataatcccagctactcaggaggctgaggcaggagaatcgtttgagcccggagtgtggaggttgcggtgagccaagatcgcaccactgcactccagcctgggcaaaagagggaaactccatctcaaaaaaaaaataaaaataaaaaataaaatgcacagtcataggccctacgccagacacactgaatcagcatctgtattttaacacaatccctaggtctacacgtaaagttcgtatcccagttttactgctccaggctgtgtgaccttgaccaagctccttaacctctctgagccttagtgtccacgtagggtttctgagaagtgaaacttagcacttggcatacactaaggctttggtgaatgttggctgtcattattgttggggaattgattaagggagaatcagctgtcacattcaaaccccaattgttcagccattccatggtagggaagagaggccaaacccaacgggcgaaagttccagatgaaaagtgaagagctcccagcatctacttaaaggagaaacttggaggtgggtgggaaggatatctctcagcagcctgggccttgactgtttaatttggggttagctgagattattgtttagctgtctggtttgagggtttgttcttcattgatgtgcctcttttcccgccagccccaccccacaccttgaatccaagacccctctgtttccaggaccctgcccaaaaggctttgaccctcccttgcctgcagaccaaaatcccaactccctggcgtggcattccaggctcttcgccatctagccccaacctaagttgttcagcctcctctctacctctgccctcacacccctgccccttacccccagtccttgtcattcctcaaatgttttcttgccttctgacttgctcatgctgtctgctctgcctgggaagactaggttcctttgataggagtcactctcactttcctctacctcccagaattctactccccctttgaagccctgcttatccaggagagactgtgtggtggtgtgccaagaacacagggtttggacagactggtcaaatcccagctctgccatgaactagctgtgtgaccttaggtgagacatttaccctctctggtcttggttctttcatctgcagattgagggtagtcacagctgctttgcagagttgttgtgaagactcaccaagaaagcatggagaatttgcattaatagtagctattaccattttatttctaagaagaggaaagttgcctcccctggaaagcctttatctaccctcccccaaccctgccctacaaaattaagtatagcctcctctctgtttcgtaaactctttctccttcttgtatttgcaacatccacacgttccactgtcaccttctcaaaaaggaagtcgctgaccacactgcttaaaacctcaagtggccccgctctacacttttaatgtgttccctgccttactctcctccatggtgagctctccacgagccgcaatttctgtccatccaccgctgtatcttcggcaactagaacagcatctggcaccactaggtgctctgtcagtgtttgtcgactgcaggaaccaatcactttgtgtgccattgaagggtgtctagatggcagtgccctgcccaacagttgtaggatgcattatgctcccctaaaatccatatgttgaggtcctaaccccctatgcctccgaatgtgactgtatttggagataggtaattaaggtaattaattaccctaactccaaggttacatgaggtcatgagggtgggccctaatccaatataactgatgtcattataacaagaggagtttaggaaacagactcccacagagggaagacctcagaaagacacaggaggaagacggtcatctccaagctaaggagagaggcacctgaagaacccaaccctgctggcaccttgatctcagacttccagcccgcaaaactgtgagagaataaattcctgttgtctaaagccacccagtctgtggcattttgtcatggcagccctagcgaactaatgtaccagctacgaactccttgaggacagagctgtggtgtcttcatctgtgcacccccagctgtccacagggttctggctcatactcatactcagtaagcaagggtctaattgagttgcattccacttgcaacagggagggtaatgatggaagaagcaccttgtggcgaagggaagagccttgcacagacaccagaaatggcctttttgtcattgtctatgtagactgatcatttctcttttatataaaccctgtctctgcaaaaaaaaaaaaaaaaaaaaaaaaaaaaggcatgtattccgaggcaatttattccaaggcattgttatggtctcattatggttagggtttctttgaggggcatagcaaatgctgcagtggataaaaggaaaactgagtcgagatcaaaaacatgtaaaggcagcaagggtgtatttggagctccaggatcgtttccatgtaacatgcacttgtcacactcttagttatcccacgaggagcaggacttcagacagagaggggcaacacagagaatagctgtcttacctcccctcccttctcttgggaaccagaatcttaaacaagtttgcttagttctgacttgttcaggcaacctcctgagggcagggatgtttcttgctccagataagggatggtctgtctacagccataccaccctgaatgcgcccggtctcgtcagacaggggatggtgtgatgactggctggagtctccccactgctgggccctggatggtgcagcccaagggagaactccctgctccctttaagtgttttcaggttggcacaggatgtgactgtgcccagttcagacccgctgagacactggcccagggcaagaaccacgacttgcaacaggtctgctgggacacgcaccactcgctatggaagggactgtgttagagtttattcttaacatgtattttgtgtattcattcattcacttattttttatttttgccaactttgacccaggcatatcagacccgaagactttgctcaaaactgcaagtaccagacttcatggtgctggtcctcaccttgctggtggttcacgggctttcaaaatgacagataccaacatgctactatcctttagacacccaatccctggtgccaggatcatccttctaaaggccatatttcttgcagatccaccaagagaaccctaatagattctcaaaaggctctgtgttttctgagctctcctccttctttcttttcttccttcctcttttcttctttttcatctgctttggtttggattcctggttgctgaatgagttttagaagatgcttttattttgaaccacaatttttggaacactgagaagcttccaggccattttaccactattcacctcatttcgggggctcacttgttaacagatttaaataatgcgggatatgggaagtttcggtaaaaaaaggtatttcctcccctgggtctactcctgcctgatgtcttttttctgcaggaggaaagtgtctttcctcctctcttttgaaaaatttaactcaaatgtcccaagccctttggccaatgggtgcaaatttagaatttagccacattctgctgtgttaatagtactccccacagaattgtagagtctcccttcccttacagagttcttccactcatgtaaccccaacacacatgttcacacgtgtgcacacgcatgcacacacacacactactgagcattcacaggagattttagcatacctcatcactgagctgcagttcccaagagatagcctccctacagttaatttgtgatgctgggtgtggtggctcacacctgtaatcccagcactttgggagacagaggcaagtggatggcttgagcccaggagttcgagaccagcctgggcaacagggtgaaatcctgtctttgcaaaaaaaaaaaaaaaaaaaaaaaattagtcaggcatggtggcttatgcgtgtggtcccaacttcttgggaggctaaggcaggaaaattgcttgaactgggaggcagaggttgcagtgagctgagatcgtgccattgcactccagcctgggcaacagagcaagaccccatctctaaaaaaaaaaaaaacctttctgccttgatggagtttctgttcttgaatggtgctgtccaataggacttcctatgatagaaatgtccttcattgtattagacaatagccaccagccacaattgcttcttgagcactgggaatgtggctagtatgactgtggtactgaatttttaatcctatttaattttaactaaactcaaaaggccacatgtggccagtggctaccatattgggcagaatggttctgcacagagatacaaatgataaacaagtggatagacacttgctcctcttttaaccacaaaacatcgaagtatgatgtcagctgttgaagagtgctgtgcagaaagccacgcagggtgaggaaatagagagtgctaaggaggcattgttttgcagaggggcagctgtcagcaaaagcctctctgtgggaggctgacttttcaatggagacctaaaaaccaggcggttctcggggtgggatgttctggcagaggtgctgtgaggggagtgaggtcctgacagagccactggagtgtgaagggcggcgggagaggggagccggggccggagcctgccaggtcttggtggtgccattgctggagatgaactctggaggcgtgaaaagtatttgagaggtgagatcaagactctgaagatcatggcaggcggaggctggaggtggcggtttgggcatggtcaataaaaagaaacggctgccctcttctctggtttgcccctgtcctctccaccccactgctgatgaatttgaccagcctacacatgccagtgctttcatcttcgaggggccaggttctgggttcactagccggggaatggccctttccccagccctggccaagtgtgtcaccgagcccctaagcaggtgggcgtgggcctagactctcagagttgtttgtgaaaataagttcttcgctttggcctttatgccctctcttcagtgggactcaaacccaggcccatgggagaggccagagatgatatgccatctcctgccttcccttccctttccttccttttcctggaagtcggggatctttgcttcaaaacatgtctcccacctcctttagcccatcagctctctattctcggttctgggttctgttaacctaataagcaaattgttcctgtacttccaaatcatcatttgtttaatgcagttccaatcaaaattctaatagaattttatttcacaggtgatattgattcatgagactagattatcaaaataaccaagaactgttttgcgaaaagaaagagtaatgaggagaactctactagatataaaaatgtactctaaacatacaaaagttcttttagaagcaaggcataagtgcagtactcaacagctagatcgatacacagattagataacccagaaccaaccctagtagatataaagtttgtgtatgataaaggaggtttctcaaaaattagttagaaaataataatgcatgctgctgagatggttggtaactctgaagaaaaatggttagaattgtgtcttacagcttaacccaagataaattcaataccagatgagttaaatgcaaaaaataaggttaaaatattcttaagaaaatgtagattaatatatttcagctatcaagacagggaatcactttctaaatataaaatcacaatgaaagaggctacaagagaaaaaaattggtaaatctattagctaaaaattaaaatttctacatgttaaacgttaaaaaatatataatatgcacaactaaaaggtaagtgatagggccagacgcagtggctcaaacctgtaatcccagcactttgggaggccaaggcaggcagatcacctgaggttaggagtttgagcccagcctgaccaacatggagaaaccccatctctactaaaaatacaaaattagcctggcgtggtggcgcatgcctgtaatccaactatgcaggaggctgaggcaggagaatcgtttgaacctgggaggcagagattgcggtaagccaagaccgcgccgttatactccagcctgggccacaagagcaaaactctatctgaaaagaaaaaaaggaaaatgatagactgggaaaagttttgcaacaaacttagtaaagcattagtattatttatgtaaagagaattcttgcaaattcataataaaaaccactgaatgtctaaataaaaatgacataagcagacaattcataaaagaatataaatagtgggcaaatctttgaaaacaatccaaccttattgtcaatcaagaaaagcatacaagcatattaaaacagttttcttggccaggcatggctcacacccatgatcccagcactttgggagacagcagcacgtggataacttgagcccagatgttggagaccagcctggacaacatggcaaaacccctggacaacatggcaaaaccctgtctctactaaaaataaaaattaaatgattagctgggcatggtggtgtgtgcctgtagttccagctgctcaggaggctgaggcaggaggattacttgagcccaggagatggaggattgcttaagcccaggagatagaggctgcagtgagctagaattgtgccactgcactgcaacctgggtgacagagccagaccctgtctcagaaacaaacaaaaatccaaaaaactgtttttccctatctaatcagcaaggctttttaacagtagtattttactactgttaaataggctggattgtgagtagtatttactactgtaaataggctggatccagctgtataggctggattgtaagtcaagccctctcatacactaccaaagaaaaggccagttgaggccaaaactctgccatacatatgggtcaagagaaccacttctaggcatccatccaaaggtagttatcaaaaataaggattaagggtattcactgcagttttgttgataagagccaaaaacgaaataaatttccaacaaaagtccaattgctgtaaaaaaaagaatgagtttatgtcctttgcagggacatggatgaagctggaagccatcattctcagcaaactaacacaggaacagaaaaccaaacaccacatgttctcactcataagtgggagttgaacaatgaaaacacatggacacagggaggggaacgtcacacaccggggcctgttgggggatgggggacaaggagagggagagcattcggacaaatacctaatgaatgcagggcttaaaacctagatgacgggttgatgggtgcagcaaaccaccatggcacatgcatacctatgtaacaaacctgcacattctgcacatgtatcccagaacttaaaataaaattttaaaaaagtccaatggctgaacgtatcatgtgtggtctatccctacaatgtactaacatgcattatagggatataccacacgtgatgatttcatcacgtgatgaaataatgatttttaaaatcattattttgctcactatttatggaaatgggaaactgtttaagtgagatgaactataaaactgcaatattgggggggtgattgctttttttttcttttatacttttctgcattttctggattttctatcatgattttgcttttatgataagcaaaatgttcatatctgttttctagcgcctgagtaaatttcacttgccaacccctggggacacatctcgcttccgaggtaccatatctaaaagtggcttgcaagcacaccatctgcgactccctctcaccgcttcagaggattttaggacctgtctacctttcctgtattcctttgtctccaaacatgaaatggtgaccctcatccatgtttgtttggtttgggcctgttttcacctccttccaaaaaaaggaagagaagaagaatgtgatttttcgtgtttctaagcactttcacgccgtctgtgcatccatagatgttcgatttgggtgcctgttgggctgggtcatgggaaaactcataaagaagtgccagtttcttttgcgttgtgaagagacactgaccctgtctttgttcttgtccacagatatgatgcttcctggtgtgtttagtggttggtgccattccaattttctgtgctgaaatcattctgaaaactcaaacagtagacttcagcacacaaggaaagccaaagccatttgagggggaataaagccaaaagcctttcaccttattcgttccaagaatctcaccgccccctccttatccccctccaaaaataagccattgcacacagacaggcagcatggctagcaaacgaaaatctacaactccatgcatggttcggacatcacaagtagtagaacaagatgtgcccgaggaagtagacagggccaaagagaaaggaatcggcacaccacagcctgacgtggccaaggacagttgggcagcagaacttgaaaactcttccaaagaaaacgaagtgatagaggtgaaatctatgggggaaagccagtccaaaaaactccaaggtggttatgagtgcaaatactgcccctactccacgcaaaacctgaacgagttcacggagcatgtcgacatgcagcatcccaacgtgattctcaaccccctctacgtgtgtgcagaatgtaacttcacaaccaaaaagtacgactccctatccgaccacaactccaagttccatcccggggaggccaacttcaagctgaagttaattaaacgcaataatcaaactgtcttggaacagtccatcgaaaccaccaaccatgtcgtgtccatcaccaccagtggccctggaactggtgacagtgattctgggatctcggtgagtaaaacccccatcatgaagcctggaaaaccaaaagcggatgccaagaaggtgcccaagaagcccgaggagatcacccccgagaaccacgtggaagggaccgcccgcctggtgacagacacagctgagatcctctcgagactcggcggggtggagctcctccaagacacattaggacacgtcatgccttctgtacagctgccaccaaatatcaaccttgtgcccaaggtccctgtcccactaaatactaccaaatacaactctgccctggatacaaatgccacgatgatcaactctttcaacaagtttccttacccgacccaggctgagttgtcctggctgacagctgcctccaaacacccagaggagcacatcagaatctggtttgccacccagcgcttaaagcatggcatcagctggtccccagaagaggtggaggaggcccggaagaagatgttcaacggcaccatccagtcagtacccccgaccatcactgtgctgcccgcccagttggcccccacaaaggtgacgcagcccatcctccagacggctctaccgtgccagatcctcggccagactagcctggtgctgactcaggtgaccagcgggtcaacaaccgtctcttgctcccccatcacacttgccgtggcaggagtcaccaaccatggccagaagagacccttggtgactccccaagctgcccccgaacccaagcgtccacacatcgctcaggtgccagagcccccacccaaggtggccaaccccccgctcacaccagccagtgaccgcaagaagacaaaggagcagatagcacatctcaaggccagctttctccagagccagttccctgacgatgccgaggtttaccggctcatcgaggtgactggccttgccaggagcgagatcaagaagtggttcagtgaccaccgatatcggtgtcaaaggggcatcgtccacatcaccagcgaatcccttgccaaagaccagttggccatcgcggcctcccgacacggtcgcacgtatcatgcgtacccagactttgccccccagaagttcaaagagaaaacacagggtcaggttaaaatcttggaagacagctttttgaaaagttcttttcctacccaagcagaactggatcggctaagggtggagaccaagctgagcaggagagagatcgactcctggttctcggagaggcggaagcttcgagacagcatggaacaagctgtcttggattccatggggtctggcaaaaaaggccaagatgtgggagcccccaatggtgctctgtctcgactcgaccagctctccggtgcccagttaacaagttctctgcccagcccttcgccagcaattgcaaaaagtcaagaacaggttcatctcctgaggagcacgtttgcaagaacccagtggcctactccccaggagtacgaccagttagcggccaagactggcctggtccgaactgagattgtgcgttggttcaaggagaacagatgcttgctgaaaacgggaaccgtgaagtggatggagcagtaccagcaccagcccatggcagatgatcacggctacgatgccgtagcaaggaaagcaacaaaacccatggccgagagcccaaagaacgggggtgatgtggttccacaatattacaaggaccccaaaaagctctgcgaagaggacttggagaagttggtgaccagggtaaaagtaggcagcgagccagcaaaagactgtttgccagcaaagccctcagaggccacctcagaccggtcagagggcagcagccgggacggccagggtagcgacgagaacgaggagtcgagcgttgtggattacgtggaggtgacggtcggggaggaggatgccatctcagatagatcagatagctggagtcaggctgcggcagaaggtgtgtcggaactggctgaatcagactccgactgcgtccctgcagaggctggccaggcctagacaggtaattccacctgctcacccaggcagcaggggagaacgcagcttgctttcttttcgttgccagggttaatatagattgtagggtacagagatgttgacacagatggtggcgtctttttcttgtaattaacaaataagaatgatgtatattgatcacatacaatatgatgttttgaaatatgtttacctagtgggatggctcagttaagctgattcccgtatgcattacctcacatacttattcttgtagtggaagggtctggttttggttttggtgttttgttttgttttgtttttagtgacagagtcttgctctgccacccaggctgcagtgcagtggctcgatcataggtcattgcagcctcaaactcctgggcccaagcgatcctcccccctcagcttatcaagtagctgggacttcaggcatctgccaccacacccaactaatattttaatattttggtagagacggggtctcactttgttgcccaggctggtctcaaactcctggactcaaggaattcctttgcatctgcctcccaaagtgctgggattacaggcatgagccactgagcccggctgatgagttatttgtaaaggttctttgaaaaaagaagaaaaatgggggctgatggaacctacgtcctcatttgtaaggctgtgcccagggggcagcaccgctggctgtggcctgtttgggctccagccttcaggcctgtccattctgaaggttagttttgactgttagaaaacacatcctccctctgtgtgttttgtgtttgttgctgtaaaaacaccaaacatgaagaggttgtttctttttttttttccccccttttctttttggattttttaagaatacatatccaagtttactgaatcaaagacctgagcttatttcttctaatctgaaaaggctttgaaagtgcttgatatttgccttgtcagggcaaaaggaaggtgccactgtgcttgggtccccataaccccttcaaatctggaagagccgggtgtaaattaggcctgtagagtcacataagccgggggggggggggtggcagggcggtttccatggttactaatggccatgtcatccccataatgggacatgccactgaagcccttggtattctgcttcctaagaggtcagtgcaaatcgaggcctgaagcacagcagcttggtggtgagttgagaaatgggggcagtggcagggggagggctggtgggagggaaagcaaatattacaaggaggaagatgcacgatttgcccaggtaggcttctccagaggtcacttaaaataccacggaatgggcctcccaagttatctttacaaaatataaaataaaggtaagaacctccagaatgattgataaggtcccaaaggcagccctggaaattaccacacctctgtcttaatgaacttggacaactttggctgaccacgtcgctcattaactcattgattcactaataaaatgaggcagctgacaaataaatgaaattctctagaaaccttgttttagccagttccatccgctattaaaagagcactttaacgagcagccaatcccagaatgccatcatgttccattctcctttctcctcccacttgcaggaggaaatgcctgtgtgtcaagggtgtgggcacaacccaaaggggagggcgtgagtgaaaggaaggggatagaagtgtactgaggtcacaatgacagcaacttcccacctctacctggccacctctggccattctcccaccttagaagaacctaccagtctagcccatacctccctcattaaaatgagggagtgatttttttttttttttttttttttgagacagagtctcactctgttgcccaggctggaatgcaatggcacgatctcaactcactgcaacctccacctcttgggttcaagcagttctcctgcatcagcctcccgagtagctgggattacaggcatgcgccaccccacccggctaattttcatatttttagtagagacggggttttgccgtgttggccaggctgatctcaaactcctgacctcagatgatccacccaccttggcctcccaaagtgctgggattacaggcgtgagccaccacgcccgacctcccatcttctatccttgatcttttcccatccatgacacgtgtctacatggttgctttttcctcccaccccagagaggacaatagggttcagttccattcaacagtaccttctgagcacctactgtatgcctgctgctactccaggagctagaaacagtgccatgagagagacagacaacacagtacccattcactgtggagctcgggcaggccaaggagagaggaaatcgcattttcctttactcatcagtgtgatatgtgttacgatggggaagggcacggctctgggtcagggctcagaggaggaacacctaggtagggggttagggagcttcttggaggaagggacatctgactcaggggatgagaaggagttagccaagtgcacagacaagggaaagaggggtccacatggaagaagcagcacaggccaaagtccagagacaagaaaaggaatgccactggtgagaaaccaaaagaggttgggcatagccaaaaggtagagtttgggttcggtaaaggataagaggaggcaaactgaaagcaaactcaatggttttccataacagacaagctattctgaacgagttatgtttgctgaatttgaatagaaagatgcttagtgtctctgtatcccaaggtaagctcagatggcacttccagtccccatggctgagtgggaggttgtctaggggcggcggttctccagaggccccggtccccatctcttctctcccaagctaataccaccaccaccagttgaaaatgcacatgggggtgggatgttatcctgcctgatgccccagtggcccaaagaagccagtaatgagggagggaatgttaaaaccatacagaaaacctttggggaggaaggatggaatgatgaacgaaggtcgcctgaatagcagaggtcgaggtaggttctctgactatacatggtcttacttaattctcctagggaggtagcttctctataaacccagaaacagactcagaaaccaaagaacttacccacattcacccagccaacacatgagtttgtctccagagtcctcactcttcctcctgccatctttacctcattatttctgacagaaattctccatttctagtatacccccgttctcaggacagggactagctgtgttcacaaaaaaaaaaaaaaaaaaacatgcaggaaccccactttatgtttaattatggtaaatgccccacctgtgagctagaaaacatccctaaacaggatgctaagatctgttccacgtgtggcaacatcagatatctctgatggctccctgatattttggaggtccattgttttgttttgttttgttttgttttgagatggagtcttcctctgtggcccaggctggagtacagtggtgccatctcaactcaccccaacctccgcctcccaggttcaagcgattctcctgcctcagccttccaagtagctggaactacaggcacgtgccaccatacccagctaatttttctattttttttagtagaggtggggtttcaccatgttggccatgctggtctcaaactcctgacctcaggtgatccatctgcctcagcctcccaaagtgctgggatgacaggcaggagccaccgcgccccaccattggagttccatggtattgagaaaggggctgccttctgcactaggggtggcattgaaagttctcccacatcctggacagaggcactccttaaaggaatctttcaatttaaagggaaaaaaaatctctccaaattgcttcacagttttcatgaaccaaacacatgagtctcttgaattcataaatattcagtgatgtccctatttaaatacttatttatttaggaacctgcagttcagttcagttatgacacataataatcctgaaataattcatggttttgactttataaaaagtgttatgtgatgcacaagagggtgaagggggaggaacttgagcaagcagctgagagctggctctaggactagatttcctctgtaggcgttaagcatctcctgcaaccaaatctctctaacctctgcaaagcttaggacagcatttgactcagtccaggctcacctcggccctgaggttagacacaaagataaggaatacttcccagcctttgaattgtgttgtcttgattcagtccctgtgtctgaacaatgtttgagccattccattgagggacctgtcctaggaaaaggctgaaaattagacttattttttcagaaaaatgagtcaacgtacttgagcaagacattgtcagacatcagccttgatgtttggtcaaatggaatattccgttactattgctagtgagggttcccattaattgacacccactgtgtgctcagctgccttctaagcacgtctactaagtcacttcaacttcatgcccaccctgtgaggtaggtacagccttgtccccattttatagagggcaaaactgagggccagagaaaatgagtaacttgccttatgttcctcagccaacagctggaagaccttggaggccacctctcaactgtcaggccagtgcctgaccccagccactatggccctgccctctccaacagtggcaccaccagcatagcccagaacaaacagagtgtggtcatttcttgattttgtgtgggagtggaaactaatccacaatgtattcattcagcaagaactttagagagccctctttgtgctaggccctgtgctagtctgtgtagatttgccagaatgtccaagacacagcccctacctaatctcagttaataaaggtgagaaatggacatagaaacacctgtttcatgagagtagtgcacacagaaaccagaggagctaggagggggagaggtggcttttccaacatgttgtctgattcagaaccttcccaccaacctacatgtgcaagccaccttcccatttattttaaacaaagaattctgaggctcaggaacctgccagagttcactcagccagtgtctaaaattgactccaaagctccagccaccaccttcgctgcctcctgatttctgtcaacagtttccaactcctgatgattagggatgactttggagaagaggaaaaaattgtgaaatgtcagaaaggtattttccatggttcggcttggttaaaatttttaaggctgctaagcattgcattctggttacaatttaagatccagaagaggtatgccctcacactctgttcagattagctgtccaaatgcagatatttgaatgaatgaatgaacgaacgaattaattaactaattaattaatgagtgaatgaatgaaaatattgttgtcgactgtttccctctctcctgtaccagacccttaccggcagggaccatatatcattaatctctgaatccctagtttagattcagagcagatgctgaataacggtttattgaacgaaccagagaattttaaaagatagttgggatctggtatttcaatccttttgcttgtcctcatttttttcccatcactcattagctccaatggttgacagcagcgagaggagagggattggatacagtttgcttcctgtgtatgaaaagctcaagagaaaggcctgttggagaatctgtcaccagatatttactggtgatgcttctcagggactgcccgttagtctgacttccctcatgcctaacagggagttaactgataccacttccacttacttaattctggagcttctcaccctaggaattctcactgtgctttgggtgacttgtggaggcttagccaccatgaaatccagccccctcattttcagaggaaggatgtaggtcccagggagatgaagtcactagcccagagacattcctaataagtgatttggttcattcatccatcaagtatttgtggaatgtctgcagtgtgccgggctctggaaggcagtgtgcccagcatgtccctgccctcatggagcccttggtctaatgggaaatgaagttttaaccaatctttaatcaaacaaaaatgaaagttgctacactgacatgttctttggtgccgttagagtatagaatatgggaatttgagggtttaaatagcagatttaaggtttaggggacactccctaaagaggtaatggggccaggcacagtggctcatacctgtaatcccagcactttgggaggctgagtcacacagatcacctgaggtcaggacttcgcacaaacctggccaacatggtgaaaccctgtctctactacaaatacaaaaattagcttggtatagtggtgcatgcctgtagtccctgccacttgtggggctgaggcaggagaatcgcttgaacccaggaggtggaggttacagtgagccgagatcgcacaacagcactccaacttggggcacagagcaagactccatctcaaaaataataataaataagtaaataagaagaagaagtaatggatggattgaaaaccaaagggttagaccaacatgcaggagcatgctgggcagagaggaggggaagaatattccagacagaagaaacaacatactcaaggggaactgaaaggtggccatggtgggcatgacttgcctgggttcacacttcacagaagtgcagaggttaaaagccagagcgttaggtggactcacatataatcaaaatttcccttgaaattcctctgtctcaccagtaaaggagatgacatggttcattgtccataaccctagagaaagtttgatgccctctgagctactcaaggaaggagcaaaaggaaaaccaacttgcaaatgtcctgggcattcagacccatctgccctagtggaaaatggaggctggatggtggaaaattctagagcacccacatgcctatacattttactttattctttctataaccttaatacttactgtattagtcagctaaggctgccagaacagaatgtcacaggctgggtcacttaaacaacagaaatttattttctcacagttctggagactagatgttcaagctcaggacaccagcagggttagtttctggtgaggcctctcttcgtagcttgccaacacccaccttctcactgtgtcctcacatagtctttgctctgtgtgttcacatggctggtgtctcttctttttcttgtaaggacaccagtcctatgagattaggacttaattaccccacccttagttacctccttaaaggcactatctccaaatacagtcaccttagagattacggcttcaacatatgaatttaggggggatataattctgttcataatgcttacaaacagttgtctgtatttgtcaggattaagtgagataatataaatgaaagccccttgtattaggctgttttcatactgctataaagaactgcccaagactaggtaatttataaaggaaagaggtttaattgactcacagttcagcatggctggggaggcctcaggaaacttacgatcatggcggaaggcgaaggggaagcaaggcaccttcttcacaaggtggcaggaagaagtgctgaggaaagagggaagagccccttataaaaccatcagatctcatgagaactcactcactatcaggagaacagcttgggggaaaccacccccatgattcaattacctccacctggtctctcccttgacacatggggattatggggattacaattcaagatgagatttgggtggggacacaaagcctaacaatatcacccctagagcagggttctagcattagtaccaatagatactgcatctcaacttgcttactgctctctatatggagaagaacttggccccctgcttcttgcctttccaagttgaccttttctgttggggccccacatgttcatgccagtgggtgttaattgcatctcaggaggggttgggctgggggtgtctggggctgtgacacagggtagcactgctgagcactcactgttccaggcctgctcaggcactgtgcatgtgctgactcatctcattctcacagtcacactccaaactattttaatagttttgggggaacatgtggtgttgggttacatggataagttctttaggtgtgatttctgagctttcggtgcacctatcacccgagcagtgtacactgcacccaatgtgtgctcttttatccctgacccccctctcatccttcccctgaagtccccagagtctattatgtcattcttatgcctttgcttcctcatagcttagctcccacttgtgagtgagaacatatgatgtttggttttccattcctgagttacttcacttagaataatggtctccaactccatccaggttgctgtgaatgccattatttcattcctttttatggctgagtagtattccatggtatatacataccacattttctttatccacttgttggttgatgggcatctaggctcgttacatatttttgcaattgtgaattttgctgctataaacatgcgtgtgcaagtgtcttcttcatataatgacttctttgtctctgggtaggtacccagtagtgggattgctggatcaaatggtagttctacttttagttctttaaggactctccatactgtttttcatagtggttgtactagtttacatttccaccagcattgtaaaagtgttccctttttatcacatccatgccaacatctattattttttggttatttaattatggccattcttgcaggagttaggtagtattgcattatgattttgatttgcatttccctgataatgagtgatgttgagcatttttttcatgttttttttggccattcatatatcttcttttgagaattgtctattcatgtctttagcccactttatgtgggattgttttttcttggtgatttgtttgagttccttgtagattctggatattagtcctttgtcagatgcgtagtttgtgaatattttctcccactctgtgggttgtctgtttactctgctgattatttctttttctgtgcagaagctttttagtttaattaagtcccatctatttatctttgtttttgctgcatttgcttttgggttcttggtcatgaactctttgcctaggccaatgtctagaagagtttttctgatgttatcttggagaatttttatgacttcacgtcttagatttaagtcttttattcatcttgagttgatttttgtataaggtgagagatgtggacccagtttcattcttctacatgaggctagccaattatcccagcaccatttattgaatagggtgtcctttccccactttatgtttttgtttgctttgtcaaagatcaattggctgtaagtatctggctttatatatattttctctatcctgttccattggtctatgtgcctgtttttataccagtactatgctgttttggtaactatagccttgtaatatagtttgaagtaaggtaatgtgatgcccccagatttgttctttttgcttagtcttgcttttggctatacgggctcttttttggtttcatatgacttttaagattgttttttctagttctatgaagaatgatgatggtattttggtgggaattgcattgaatttatagattgcttttggtagtatggtcattttcacaatattaattctacccatccatgagcatgggatgtgtttccatttgtttgtgtcatctatggtttatttcagctgtgttttataattttccttgtagagatctttcacttcttttgttaggtatattcctaagttgggttttttttgttgttgtttctttgtttgtttgtttttttgcacctgttataaaaatagttgagttcttgatttgactctcagcttggttgctattggtgtatggtagtgccactgatttgtgtacattgattttgtattctgaaacactgaattcatttatcagatctaggagctttttggatgagtctttagggttttctaggtatataatcaacatagtcagcaaacagcaacagtctgacttccttaacttgtatgccctttatttctttctcttgtctgattgctctggctaggacttctggtattgtgttgaataaaagtggggaaagtggacatctttgtcttgttccggttttcaggggaactactttcaacttttccccatttaatgtaatgttggctgtgggtttgtcatagatggcttttattacctcaaggtgtgtcccttctatgccaattttgctgagggttttaatcatatagggatgctggattttgtcaaatgctttttctgcatctattgagatgatcatatgatttttgttttcacttttttttaatgtggtgtatcacatttgacttgtgtatgttaaaccagccctgcatccctggtataaaacccgcttgatcatggtggattatctctttggtatgcttttgaattcagttagctagtattttgttaaggatttttgcatctatatccatcagggatattggtctgtagttttatttttcttttgttacatcctttcctgattttggtattaggtgatactggcttcgtagaaggatttagggaggattccttttttatcttttgcaatagtttcagtaggattggtatcaattctttttttgaatgtctgatagaattcagctgtgaatccacctggtcctggacttttttttgttggcaatttttttattactctttcagtcttgctacttgttatttgtctgttaagagtttctgtttcttctgggtttaatctaggaaggttgtatatttccaggattatttatctcctctaggttttctagtttatgctcataaaggtgttcatagaagccttgaatatcttttgtatttctatggtattggttgtaatatctcctattttgtttctaattgagtttatttggatcttctctcttcttttttttttttttttggttaatctcacaagtggtctatcaattttgtttatcttttcaaagaaccagctttttgtttcatttatcttttgagttgtttttttcttttaatttcatttggttctgctctaatctttgttatttcttttcttctgctgggtttgggtttggtttgttcttgtttctctagtttcttgaggtgtgagtttaggctgtttatttgtgctcttagactttttgattgtagacacttaatgctatgaactttcctcttggcactgcttttgctgtatcccagaggttttgatcagttgcatcactattattgttcagttcaaataattttttaatttccatcttgatttcattgttgacccaaggatcattcaagagcgtatcatttaacttccacgtatttgtataattttgactgttcctttcggagttaatttccaatgttattccactgtagtctgagagagtacttgatataatttcaattttcttaaatttattaagacttgttttgtggcctatcatatggtctgtcttggagaatgttccatgtgctgatgaaaataatgtatattctgcagttgttgagtagaacattcggaaaatatctgttaagcccatttgttctacggtgtagtttgcgtctgttgtttctttgttggctttccatcttgatgacctgtctagtgctgtcagtgtagtgttgaagtccccactattattgagttgctgtctatctcatttcttaggtctagtagtaattgttttataaatttgggagctctagtactatgtgcacatacatttaggattgtaatatttttgtattgaactacttcttttatcattatataatgtccctctttgtcttttttaactgttgttgctttaaagtctgttttgtctgctataagaatagctagtcctgcccacttttggtttccatttgcatggaatatctttttccactcctttaccttaagtttatgtgaatccttatgtgttaggtgagtctcttgaagacagcagatacttggttggtagatttttatccattctgcaattcagtatattttaaacggagcctttaggccatttacattcagtgttagcattgagatgtgaggtactgttctattcacattctagttgttgcatgaataccttggtttttttttcactgtgttactgtttcataggtccaatgagatttatgctttaagaaggttctattttagtgtattttggggttttgttttaaggtttaggactccttttagcatttcttgtagcactgctttggtagtggtgaattctctcagtatttgtttgtctgaaaaagactttatatctccttcatttatcaaacttagtttcactggatacaaaattcttgactggtaattattttgtttaaggaggctaaagatgggatcccagtcacttctggcttgcagggtttctactgagaaatctgctgtgaatctgataggttttcctttataggttacctgatgcttttgcctcacaggtcttaagattctttccttcatcttgactttagataacctgatgaccatgtgcctaggtgatgatctttttgtgatcaatttcctgggtgttctttgagctttttgtatttggatatctagatctctagcaagaccagggaagttttccttgattattccctcaaataaattttctagactttaagatttctcttcttcctcagaagcaccattattctcatgtttggtcatttcacgtaatcccaaatttcttggaggctttgttcattttttttaattagtttttgtctctgtcaagttgggttaattcaaaagccttgtcttcaagctctaaagctatttcttctacttgtttgatcctgttgttaaaactttccagtgtattttgcatttctctaaatgtgtctttcatttccagaagttgtgactgtcttttctttatgatatctgtttctctagagacttcatccatatcctgtattgttgtttcaatgtctttaaattggttttcaccttttcctggtgcctccttgagtagctgaataatgaaccttctgaattctttttctggcaattcagatttcatcttggtttgagtccgttgctagagagccagtgtgatcttatgggagtgttttagaaccttgttttatcatattaccagaattacttttctgtttccttctcatttaggtagactgtttcagtggaaacatctggaactcaagggctgctgttcaggttcttttgtcccatggggtgatcccttgatgtgttgctctccccctttctctagggatggggcttcctgagagccagactgcagtggtaattattgcccttctgggtctagccacccagtggggctgctgggctccaggctggtgctggggaatgtctgtaaagagtcctgtgatatgatccatcttcaggtctcccagtcttggataccagcacctgctccagtggaggtggcatgggagtgaagtggactctgggagtccttggttgtagttttgtttagtgcagtggttttctcaaatgctggttacaccagcagtaaaattgccacatggacagactcaggacctctggttagccaggatgttgcaggcagtggcattagctgttgtttgctcctttgaagcaaggttgttctgttatgagttgctgtaatggcttgagttggttggcctccagccgggaggtggtgctttcaggaaagcgccagctgcagtagtagaaggggatataattctgccctacattggccaggatgagtactcgggtttcttaggcaatggacaggaccacagaacttccaaaagattatgtcttttttcttcagctaccagggcaggtagagacaaaccatcaggtgggggcagggttaggcgagtctgagctcagactctccttgggcagggcttcatgttagtttctttatttagggctgatgagaaggcggtgcagaaaggtagctcgtgcaagtctttgaggtaaaaagtggtggagctggaattcaaatccacccctacacccacacatgtaagcactttggggaatctgcccagtgagtttaaaatacaattccatttgctctggttctattaaattcccctggccaatatgcactgataggccaggagcaggaaaggcattcctactgtctctgagcctccctgcaagcagcttgaggaatatatacctggcctgtgggtctcagcaagttccccaaccctagaggcccttcaaaccacgcagggaaggagagctttggcgggatgtggccaaaactgactcaagcctggtgtacagacaatttgggatggcacggagtttttgtcatccactgggaagttgcttaatcttcctccaggccaacacatttcccctttttaaattctagttaaaaatcagactgtgccccctaccctcaataaaagaaatgaaagtttgaactcaaatattatgaggcaggccaggcacggtggctcatgcctgtaatcgcagcactttgggaggccaaggcgggtgggttacctgaggtcacaagttcaagaccagcctggccaacatggtgaaacctcatctctactaaaaatacaaaaattagccaggcatggtagtgagcgcctataatcccagctacttgggaggctgaggcaggagaatcacttgaacctgggaggcagaggttgcagtgagctgagattgcaccagtgaactccagcctgggcagcaagagcaagactccatcttggaaaaaaaaaaaaagaaaaagaaatattatgaagcagaccagacacagtggctcacgcatgtaatctcagcattttgggaggcaaagccaggtggatcacttgaggccaagagttcgagaccagcctggcgaacatagtgaaatcccacctgtactaaaaatacaaaaattagagccgggtgtggtggcacacacctgtagttccagccattcgggaggctgaggcatgagaattgcttgagcccaggaggtggggattgcagtgagccaagatcatgccactgcactccagcctgggtgacagagcaagactctgtctcaaaaaaaaaagagagagagagaaatattatggagcagtacagaaatagacagtggagtgatgttgaccaggggatggggcagggggatgtggggaattttcatacaatgggtgtaaagttgcagttatacagatgagtaacttctggaggtatgttgtacaacatagtgcctgtagttaataggaagatatttacttcaaaatgtgttcagagggcagatctcatgttatatccttacctccccactgccccccccaaaaatagacacaagcaaactttatgtttgttactggattgtagtgacagtaacatgagtgtatgcatatgcccaaactcactaaattacatccattatgtgcggctttctgcaaacgagttatacgtcaataaagctagggcaaagagggaaaaaatgcaaccagaaagaaaagacgttgcctacagagaaactacagttaaactgacaggtttgtccgtatcaaaaatagaagccagatgacaatggaacaaaatgtttagcagataacaggcactcggcaaatgagcaataaaccttgctacacctctcaaaaaaaatgttatggagagataatcaatcactctctcagtgtttgttttcctttctcctggagtgcagtgttactcactcccaagtccctagggccctagagaaagttctcctgggaaaattaaagagaaacagaaacagaaagctgtcacatgggaaaacaattctaatgtttttgtttctccaatgaggaaagtaacagagaagcagattttgctaaagaattagtacttcttaacattccaggttttccccaagacagaaagggagggtgggaggcagtgggttcctgtcctgggacgtgttcaccgagagcctggacatcacgtggtagaaatgtcccagaggccataaggaaatgcctgtccgatggccttgcagcatcctccagggctctgagaggtactctaggatgaggcactggccctttgctgggtgactgtctctgaccaggtaataggactctgagagaagcccaggggagttagcaagagccacacagcccaaagcactgcaatgctctatagaacagcaatcctgaaatgtggactttgtcaccacccttgggtcacagccactcctctgacagcactatgctcactttccattttccattcattgacaaatgcctgttgagtatgctgcatgggccagactccacagggagcggatgggggggtcagcctgcttgctttgcaccctgtctgtaaccctgccagcagcccgtgggctctgtgcaatggaagtgagactctgggaggttaagtaaccaacctcagcacgtagccaggaagtggcagatcctggatcccagctttctccaactccacagctctttccaccccatcctgcagtcctgtgctgacccaacgttctttagccgggttgggagaaagaacatcggtagctgtcttcccgccttgggccttgtctcctaggatctggaagtgttcagggggacatccaatcagtggcagcctccctcccaaaggtggtggaagtccccatttgctggggaaaaccctgtttcttggaaagcaccggcagaggctggccgtgggctactgtgccaacccagggagtgcatgtggctctgcctgggatcagcaataaggctcgtggtcctcactgggtgccccagccccctacctttgaagccaccatgctctcttcaattgctacctagctctgtgcatggagaggctgtgcatgacctggacccaaaataggtacagggaggagcaattaagaatcaggaggctctgaagttggactggccaaggtggagtcgggcttcaccactcactggttacctaatgttaagcacaacatttaatctctctaagcctccatttcttcgctatgaagtgggtctgccaatcacctgccagtcactgtaaggagtagatgagatgagccgtattaccacttagcatggggcctggtgtgagaaactagctactctcactgttggagggagagtcatgatcattcttgtttttgaccatgccactgagcaggtcctggcctaagagaaagcacttttcctcctgagcttccttttttttttttttttcctggtgaaatgagtgatcttgacaacatcacctataaggatccctgcagtgtttacaacttggtgactctggctggatgacttttaggtagtccagattctaaggtcacccctggaatctggttttatctgcagacttttcttttataaattggtttcttaactccaatattcaatcttactcccaggagcatctagggaatgtgggtgcgtttaacatccagatgttaggcatgaatggcattatcgatgatcagctgatgcctctggctgagaagtccactctccttgctgttggcccctgtacaaaaaaaaaaaaaaaaaaaaattccttctcagggctttctcagccaaacagccttaccaggagggaggcaaagaaaaggccagtggctccgagaacctacagatctgaaaaacttctagcctgtcatggaatactggctgtgtcctctagagacctgagccttgcttggatccctttcccaggatctctagatcttgggaggagacaaaagtaatgatggagacctgcccccatttcctctacctaccacaaagtattgcaaactggatggctcaaaacaatagaagtttattgtttcacagttctgcaggccagaagacaaaaatcagggagtctgtgatggttgcttccttctgaaggctgtgcaggagtctgttctgtgcccatctcccagcttctggtgtctgccgacagtcttttgcattccttagcttgtggatgcatcagcccaatatctgcctcaatcatcgcatggtctcttccctgtgtgtgagtcttcacatcttccctctatgcacatctgtctctgtgtccaaatttcccccttctgtaaggacactagtcatgttggattagagtccaccctgatggcctcattctcacttgatttaactgtgttacctctctaaaggcatttctaatagggtaacattctgaagtactgagaatcaggacttcaatatatacttttggggggacaccattccacctataataaggtccttggactattttcattacttccaagggtataagaattaaacatttcttcctactgattcttaataattctgtttattaagtgcacggactctagagattacctgggtttgaatcttggctctgccacttactagctgtgtgatcttgggaaacttattaggcccctatatgttcagtttcctcaactgtaaaataagaataataataatatttacacctcttagaattcatataaacattaaataaaaacacatttacaatgcctcatcttatcactcttctatatcctaccacgtttggaaaaggctccatctaataaaaacagcagaagtatctacaatacttaccatgtgccaggcactagtccaaatactgttgtgtacatcaacgcatggcatcatcgcagcaactttctaaggtgggtgctagtgtcatccctgttatacagaagcaaaaactaagccctagagtgatcaagtcctataggtacagccctgcagccactaaggggagaagttaggacccaaatccagatttgtctgactccagggccttttaggagccactgggactggttgactttctaggaataataaaagggtcttgtaaggatgaaaagaatcacaggccaccaccttcacttgcccagaaagtcactctgttttcaaaggcctgattctggaggcttttcctattatggcggactgtgctcagaaaacacactcgtttctttacaacaggccccgtacatgaagggcatgtgtctctcttccaagccccaggatgactttggaaggcccccaccccaacccaggagagccaggaagaagcaaaccatgatgccttccccccagggaacaatggtcatttgcctgacatcttgactctgtggttttgtgtcttctagggaagtctgttagaactgctgtgctgatcaacgggacgctccgtctttgaagaaagaagagatggtctctccccagccatgggccacccttgccagtgactccaagtggaactacttagctcgcgtgtgcctggagggtgcgggaagtccagcgactctcagacgcacctcccagaggaccggtgggaattgttcatagtgccaaagtcctactactgcgttttcaatgggtccttgtacatagtttgctcctctgccctagccctcacctcttgctatactggaaccgatttgtacaatgtgggaattttgttacctttttaatcaagggcaacttccttttccagcactaccattgtaaggtttttttcaggagggagggctaaccaccttgcttttctcttttctctttttcttttttttatttttgttttattaatttggggaaaggggtgttagcattagtgccatgatatctactggattttaagtagggagactttatttttaaaggtaggttgaaatttgggagatttctcggcaggaagggctgaaatccaggcccctgtctcaacttggagagaggtgacagacggcagatcttccaaatcaaattcctttccagttcttcccctggctgcctttttgggggtccctgccttagccccacacaaggctttctgaactgccaagaggggatctggcttctcaactgctcggcctcttgggccaggctgtgcccagccagccctgggagaactgggtagcaggtggctgacttctttaagcacctttctaaataccagcagaagaggctcccgcctctgttagcatgatcagtactattgtgacattaaaacaacaacaataagatcttcctatctggagggtacagaggtgaatggctttggttttcatttctcttcttcactgccttttctcggtgtggtatttgacaagattttagctcaaagcctcaccatgaattgattttttttgtttgtgtgtgtgtttgttttgggacaattttagatacctgagtgcactttttcagttagtcctaacttttaaaagaaggaaaaccaagagacatatctggtgtacgtgttgcagtatgaactctggttgcaatccctccccgtcccacactgccccccatttgagtacaccgcacaagtcaaacgctaggaagtttgaataaaaccaatttttctaacttgttgctcatttgttgtaactcaataaagcaaagactaaacatttttat

SEQ ID NO: 378 - DNA, 4076 bp, Homo sapiens
cccctgtaggtctggatgtaccgactgcttttggaataaaaagattcccaggatgtgagcaacacgggaccgatatgatgcttcctggtgtgtttagtggttggtgccattccaattttctgtgctgaaatcattctgaaaactcaaacagtagacttcagcacacaaggaaagccaaagccatttgagggggaataaagccaaaagcctttcaccttattcgttccaagaatctcaccgccccctccttatccccctccaaaaataagccattgcacacagacaggcagcatggctagcaaacgaaaatctacaactccatgcatggttcggacatcacaagtagtagaacaagatgtgcccgaggaagtagacagggccaaagagaaaggaatcggcacaccacagcctgacgtggccaaggacagttgggcagcagaacttgaaaactcttccaaagaaaacgaagtgatagaggtgaaatctatgggggaaagccagtccaaaaaactccaaggtggttatgagtgcaaatactgcccctactccacgcaaaacctgaacgagttcacggagcatgtcgacatgcagcatcccaacgtgattctcaaccccctctacgtgtgtgcagaatgtaacttcacaaccaaaaagtacgactccctatccgaccacaactccaagttccatcccggggaggccaacttcaagctgaagttaattaaacgcaataatcaaactgtcttggaacagtccatcgaaaccaccaaccatgtcgtgtccatcaccaccagtggccctggaactggtgacagtgattctgggatctcggtgagtaaaacccccatcatgaagcctggaaaaccaaaagcggatgccaagaaggtgcccaagaagcccgaggagatcacccccgagaaccacgtggaagggaccgcccgcctggtgacagacacagctgagatcctctcgagactcggcggggtggagctcctccaagacacattaggacacgtcatgccttctgtacagctgccaccaaatatcaaccttgtgcccaaggtccctgtcccactaaatactaccaaatacaactctgccctggatacaaatgccacgatgatcaactctttcaacaagtttccttacccgacccaggctgagttgtcctggctgacagctgcctccaaacacccagaggagcacatcagaatctggtttgccacccagcgcttaaagcatggcatcagctggtccccagaagaggtggaggaggcccggaagaagatgttcaacggcaccatccagtcagtacccccgaccatcactgtgctgcccgcccagttggcccccacaaaggtgacgcagcccatcctccagacggctctaccgtgccagatcctcggccagactagcctggtgctgactcaggtgaccagcgggtcaacaaccgtctcttgctcccccatcacacttgccgtggcaggagtcaccaaccatggccagaagagacccttggtgactccccaagctgcccccgaacccaagcgtccacacatcgctcaggtgccagagcccccacccaaggtggccaaccccccgctcacaccagccagtgaccgcaagaagacaaaggagcagatagcacatctcaaggccagctttctccagagccagttccctgacgatgccgaggtttaccggctcatcgaggtgactggccttgccaggagcgagatcaagaagtggttcagtgaccaccgatatcggtgtcaaaggggcatcgtccacatcaccagcgaatcccttgccaaagaccagttggccatcgcggcctcccgacacggtcgcacgtatcatgcgtacccagactttgccccccagaagttcaaagagaaaacacagggtcaggttaaaatcttggaagacagctttttgaaaagttcttttcctacccaagcagaactggatcggctaagggtggagaccaagctgagcaggagagagatcgactcctggttctcggagaggcggaagcttcgagacagcatggaacaagctgtcttggattccatggggtctggcaaaaaaggccaagatgtgggagcccccaatggtgctctgtctcgactcgaccagctctccggtgcccagttaacaagttctctgcccagcccttcgccagcaattgcaaaaagtcaagaacaggttcatctcctgaggagcacgtttgcaagaacccagtggcctactccccaggagtacgaccagttagcggccaagactggcctggtccgaactgagattgtgcgttggttcaaggagaacagatgcttgctgaaaacgggaaccgtgaagtggatggagcagtaccagcaccagcccatggcagatgatcacggctacgatgccgtagcaaggaaagcaacaaaacccatggccgagagcccaaagaacgggggtgatgtggttccacaatattacaaggaccccaaaaagctctgcgaagaggacttggagaagttggtgaccagggtaaaagtaggcagcgagccagcaaaagactgtttgccagcaaagccctcagaggccacctcagaccggtcagagggcagcagccgggacggccagggtagcgacgagaacgaggagtcgagcgttgtggattacgtggaggtgacggtcggggaggaggatgccatctcagatagatcagatagctggagtcaggctgcggcagaaggtgtgtcggaactggctgaatcagactccgactgcgtccctgcagaggctggccaggcctagacagggaagtctgttagaactgctgtgctgatcaacgggacgctccgtctttgaagaaagaagagatggtctctccccagccatgggccacccttgccagtgactccaagtggaactacttagctcgcgtgtgcctggagggtgcgggaagtccagcgactctcagacgcacctcccagaggaccggtgggaattgttcatagtgccaaagtcctactactgcgttttcaatgggtccttgtacatagtttgctcctctgccctagccctcacctcttgctatactggaaccgatttgtacaatgtgggaattttgttacctttttaatcaagggcaacttccttttccagcactaccattgtaaggtttttttcaggagggagggctaaccaccttgcttttctcttttctctttttcttttttttatttttgttttattaatttggggaaaggggtgttagcattagtgccatgatatctactggattttaagtagggagactttatttttaaaggtaggttgaaatttgggagatttctcggcaggaagggctgaaatccaggcccctgtctcaacttggagagaggtgacagacggcagatcttccaaatcaaattcctttccagttcttcccctggctgcctttttgggggtccctgccttagccccacacaaggctttctgaactgccaagaggggatctggcttctcaactgctcggcctcttgggccaggctgtgcccagccagccctgggagaactgggtagcaggtggctgacttctttaagcacctttctaaataccagcagaagaggctcccgcctctgttagcatgatcagtactattgtgacattaaaacaacaacaataagatcttcctatctggagggtacagaggtgaatggctttggttttcatttctcttcttcactgccttttctcggtgtggtatttgacaagattttagctcaaagcctcaccatgaattgattttttttgtttgtgtgtgtgtttgttttgggacaattttagatacctgagtgcactttttcagttagtcctaacttttaaaagaaggaaaaccaagagacatatctggtgtacgtgttgcagtatgaactctggttgcaatccctccccgtcccacactgccccccatttgagtacaccgcacaagtcaaacgctaggaagtttgaataaaaccaatttttctaacttgttgctcatttgttgtaactcaataaagcaaagactaaacatttttat

SEQ ID NO: 379 - protein, 833 aa, Homo sapiens
MASKRKSTTPCMVRTSQVVEQDVPEEVDRAKEKGIGTPQPDVAKDSWAAELENSSKENEVIEVKSMGESQSKKLQGGYECKYCPYSTQNLNEFTEHVDMQHPNVILNPLYVCAECNFTTKKYDSLSDHNSKFHPGEANFKLKLIKRNNQTVLEQSIETTNHVVSITTSGPGTGDSDSGISVSKTPIMKPGKPKADAKKVPKKPEEITPENHVEGTARLVTDTAEILSRLGGVELLQDTLGHVMPSVQLPPNINLVPKVPVPLNTTKYNSALDTNATMINSFNKFPYPTQAELSWLTAASKHPEEHIRIWFATQRLKHGISWSPEEVEEARKKMFNGTIQSVPPTITVLPAQLAPTKVTQPILQTALPCQILGQTSLVLTQVTSGSTTVSCSPITLAVAGVTNHGQKRPLVTPQAAPEPKRPHIAQVPEPPPKVANPPLTPASDRKKTKEQIAHLKASFLQSQFPDDAEVYRLIEVTGLARSEIKKWFSDHRYRCQRGIVHITSESLAKDQLAIAASRHGRTYHAYPDFAPQKFKEKTQGQVKIDSFLKSSFPTQAELDRLRVETKLSRREIDSWFSRKLRDSMEQAVLDSMGSGKKGQDVGAPNGALSRLDQLSGAQLTSSLPSPSPAIAKSQEQVHLLRSTFARTQWPTPQEYDQLAAKTGLVRTEIVRWFKENRCLLKTGTVKWMEQYQHQPMADDHGYDAVARKATKPMAESPKNGGDVVPQYYKDPKKLCEEDLEKLVTRVKVGSEPAKDCLPAKPSEATSDRSEGSSRDGQGSDENEESSVVDYVEVTVGEEDAISDRSDSWSQAAAEGVSELAESDSDCVPAEAGQA

SEQ ID NO: 380 - DNA, 176147 bp, Mus musculus
  misc_feature (1)...(176147): n = A,T,C or G
ccgccatgttggatgccgcagattcgccataacctctccggctctttccctaaaaaaatcaaaataaagagcgaagtttcctcagggtgtccgactttctcgctcagcccgggagggagccgggaagagcccgaggctttttttttcctccgccgtgggggcgttgccatggagacgcggacggcaggtgagcggggatggnnnnnnnnnnnnnnnnnnnnggcgcggcgccgcgcgggaaaccgctcgtggtgtgcagtggggaggccgcgcgcagactcgggccggcggagggatccacgggcgggcggagcgccgacgtcgcagcgttctgcggcccacgtttggaagctggcttgatcctgccgcaggaaagaaaaaaaagggaggcggtggagagcaagcgaggggagcgccctgcgcgcctggggagcagtttccagggctgtgggcggtgccagggcgcccgccagcggccatccgcgggcgtctggctgcataggtgttcgagtcccgttgcctgccgctgtttgtgtgagctttgagttggcttcttgcttagtcaacagtttcgtaaagtagatgacttccccttcccagtgatcaaccccgtgttcttagccaggacgtgcttcaagtccagccttctctagtgaccttcagagggagcggccaatgagagagatgggctttatcacgggtgaccctgtcccatgcaagtagtcatttgccttctgtctttggcccagtgctgtagggcattgtcctcgtgcgcttgaacgaagtggctccaggccacttcctccaggcagccctcagactgtctagccagaagctgctttagctggtctcattggaagggtagacttttcacttaacccctggtgactccccttaaccttaagcttgtgacctctagcctgtgattgacaccaatttagactcttggaccctgacttccgagggtcgctgccagtgtctcctggttgttcttagttggtcattcactgaagaagagaaaagttgagagcccagattcctgacagtggagctttaaagagatcggacttctggcttggaaaacaatgtgaaccatatgtttgcttggcctttgtcactgtcccctggaattcagacaggctcttagtaggggtgaccttctattgaatgactgagtgaaggagctgctgatcatttgtacacgtcactgtggtttcctgctggagcctgggtccatccatacaggggacagaaaactcacgttcctggggcttacctccactactctccacctttagctttggaacctatcacttgatctgtgaaattagtgttggtgctacagagtggctataggtcaaagggacacacaacaagccccaaacaggttatctttctgttttccagccatgacaagtgaagaaggctcatagtttgaacaaaatgtatttctgtcagctcgtttctgggaaatttcccgttttggtgttggaaaggcggctttgggtggtaaacaggctgggtggtcattgccccagttccagctctgttctgtgtgtgttccagctctgttctgtgttggtctctttttcatggtatcttttgctttgggtgcaaaggtttctgcttctttcttttcccaccttgtagtgtacacaacagcttctcagctatcgctgtcttgaaggagaatctagtggctgctcagagcaggcctagtcagagttgggtgattacactgtttctcctcctctcattttcttttatagatgtctcatgcatgctgcccctgaaaacctctctatcaagatgggtcagtttaatagagggggatttagcctaatggtttgtcccttgtcacctgttggggttgttaagctttcagcgtgtcaaactttccaggggcaggtactcccttcagaggcagtctctcactgttcacagctttgctggagagagccgctcctgagagactctgagagctcctgagagctcctgaggcaggggctgtgacccttgtgcttgaggcccatgtgttgtgcctctaccttgctcacactggtggcactccagatggttttcataacaacacactgtcaccatgcatttgctttgggaagtgtgtgtggatggaaaggtggggtgaagtttggttataattttttttttttccgagacagaattttccaagaagcatcccacatgattatgatttttttttttttttttgttctgaaggggaaaaaagtaactttggagtggggaatagtgaacattttaaaacatatattgtagattcaaagttggcttaaaaaacataaaatatacatggtggcttacaaccatctataatgggatccagtgccctcttctggtgtgtctgaagacagctacagtgtactcatgtaaataaataaacaattaaaaaaacataaaatataaaaacaaatgaatttgcttctgaaaagacaatgcttggcacaccgatgtcaaacagggccttgaagttgagtagcagaattgtctttgttctttttaaagttttgaaaatcgtaagttgatagttatacctgtgcttgtggcactcacagccctgcaatttatgagcacaatggggaataattaggttaatccagtctggcacctttttttgtcatcatttcttgaggtgagaacatttgaaatgtactcttttagtgggtttttgaagtgaaaaatacattatttattctgttcactatgccatgcagaatatcatacagaacgtgaaaacatagttttgctaatagaggcttgcctcgtgccctgcctccctttctctcagaccccattctgttctctccatctgtgaggtctgttgcttcagctccacctgcctatctacaaaggcagagccattctctgtgctcacattgcacgctctcttcatccgctcatggacacttagggtgcttcttcacctgggctcttattacttttttgatgaacatggaagttcagatgcccctctgccaactggtttagaatattctccttcctttaactctaggtcaactggcattgcaacgtattgacctctggaatctggtgcctttgtgttccagcctgtctggatagaaaccagatgagtaggtggggaccttgcctcagaggatagtggacaaagctgcaggccctctggataggaaggtgacattgtctcaccataaggagaggaacctggagccaaagagcatagggagtgtggggcattgggcgatgcacagacaggctggtctccagttgagctgaggtctgaaccccagaaatggtgataattcacctacaaaacactgtaggtgttcctttatgctcctggaactctggcccctgcctaagttactcccccccccccatcccccacaagagaagcatggttagaagtcacataggcaatgacccaagcttctgaccttcaggctaaactcctccccagttacctagcaacagtgaagaccataaaaagggctgttcagcccctgcttgctctcttactttttactctcttatttgtctctcttacctctcttaaccctcactctcaccccctctttcctctctctttgtcttctcctctcttctctctccctcttactctctttctctctagccttctctcccccccccccaccccctttctaccttctccctttccccctgcctttctataatacagctctaaaaccatagaatgtctctggtcatcaaggcccattgcgcttagaggatgggacaggctttctcctaatgagaaatctaatctcctgttagaaggccttcctgtgctccagtcaagatccactgcactcactctcgctgcactcactctcacaggtgttgggaacctcttccctcatccctctctcccataaccctggtggctttagcaaagtagctccgggaatcccccaggtagggctgccccttggctaccccctgaagagtgggtcagaggcttgaatgcccacctagggatgagtggaaggtagctagcagccctcccacccctgaaagaccagagaataggtaaaactctggtggggtatgggcttcccctccccttcttctccgggccctctttttagttcccaacaagggagcttggggtatgtggcaccaaaatgaggtgagggacctggagccaaggagcatagagagcttgtggtatctggcactgctctgtcaccagtctctagctagccagatttttggtgtccatattgctccattgttgccaatgggccttcatgaactgccgtttctcatacctttaggtctgttcttagtctttagtggcaggtccctatctttcagatactggccaaactatgaaactgtctcttccttcttgagggtgtcacatagatctagaagagcaaaaacaaaaacaaaacaaaaacaaaaaaccaattcctgtaggaaaagggcatcaggaaccttcatgtgagttctgaatattgaagatatcaatgggctccaggtagggattctgggaagacttcttgaagcatgaggtagtggaattggatcttgcagagtgaatagatacccaacaaaaatggaagggtgggtgctaagacatatgtcgcacgaaaaccccagctcacatctttaagggaataaggcattgttgattctggaatcattttgagtgaccttggcccagaagcagagatttaggtcactccaaattccatgttccattgtagaagcagtttcacaaagttcctatagttttacggaattgggaaagtcataaatcaaggcaaggttaaagtacgttggtgggtacatcaaggggggaggtgcatcaggatggggacggcttcctgtcgctcagattctgattgcatgccaagcttttggactggtaaaagctacttacctgctaagtcaatagattctaaaaggtttttatctgttgccaacagatgttagttccgccacacgtgtgtgtgtgtgtgtgtgtgtgtatgtgtgtctgtctgtctgtctgtctgtctgtctgtctgtctgtgtgtgtctgtgtgtgtgtatgcatatgtgtgtagggaacccaggaatggttattctggagaggatggccagaacttatcccatgagaagggaattagtttctggaccttcagcattccaatctcttcacagtgctgaaattctaagcggccgattggtcatagccagctgcggcttcttttcaggagttttccttctcatgtacctgcaggtgtgtactgagcattgagaccagggggccttcgacagggagtctgagggctgggaagctgttgggaatttagcttgaaagccaggagaacagtgcctgctgacttgcctttaggagagagctctctggtgcctgccaggaggcagttttgtagttgtgatttaatacacagaagcacttggatcttttttatagacagtactcaggtaagccacatccctaatgatacataggctttttttttttttaaattttaaattacccaagaaaatcttctcctgcccctccacacccaatccttatcccttaggccaaacaacctccagtcttgctgccctcatttatgtttgccttttgaggacttcacataattattttgtgtctagccttgtcttactcacggtttctattcctaacaaacatcatgaccaagaagcaagttggggaggaaagggtttattcagcttacacttccacattgctgtttatcaccaaaggaagtcaggactggaactcaggcaggccagaaagcaggagctgatgcagaggccatggagggatgttctttactggcttgcttcccctggcttgctcagcctgctctcttatagaacctaagactaccagcccagagatggtcccactcacaaggggcctttcccccttgatcactaattgagaaaatgccttagagttggatctcatggaggcatttccccaacttaagctcctttctctgtgataaccccaggctgtgtcaggttgacacataaaaccagacaatacaagccctcttttttttttttttattaattttttttctcaacatgacgtttcagaaatccacttttttttttttttttttttaattgcttaatgctattctactgcctggaaatttccaccgtttgcctgagtgtttctttcttagtaagcaccagggctgttctcatgtttccagttttgggttcttttgtttgcttgtttttgtttttaaactttgaactgattccttgtgagtttcatgtcctacaccccagtcccattcatctccctgtctccttgtatctgccctctgcccctgcaaccttcccccaaaaataaaaaacaaacaaacaaataaaacaaacccaagtatctaatacatcttgtagtggaagctttagtgtgtcacagtgtctcccacagaataccccttcatccatacatcttctctttcgaatgttcttgcagtgagccattggtctggtttgagatctctggcttctgtgataccatcaatattggctcctcaccaggacttctcctagttgccctgtcgttgccccatgtcatggggatcctgaagctttggatcagtaggactgtccctttcatatgctccaacagttcatagatgatgtagagtttggggtgggccaatttaaagcctgggatctgcctgggggaagccctcttgcttgcccttatcctctccagcactgctctggctaggcaacccagtgataccatgggcagtggctctcttgctctcatgccctcagggcaggctcacttgcaccggttcctccagaaccagctctactgtgctacccagtcaaggagtggaggcctcctcttccaagtgttgcagcctgttagctgccgtgccagctctttcattgttaagccatctctaccgtgttcctcaggagacactcaggaactgttcaactgctattgggggacagggccagctctcctggctactgcatgcggctaggagtgaggtagggaggacatcacccccatgcccactctacttctaccagacgagggatggagccagttctcctgctcctcctctaccagagctagctctattgtgttgcccactcaaggtgcaggacctgctctcccatgtgctgtagctggtgggggcagggccatatctctctgtccagtctctagaggtaatatgagacacagacccttgccactggatagccatacacatagacatccactacacatttgtacattgtagtgtctcccgctccagtgacctctttggtccatgctacaaggtgtggtggcaagcaggcttctaggtgtctacagccagtctgtgtggcatggaggctggggttctgtgggcatcttccccgtccagcaccatgtgtgtggcaacaggaggtgctctgaatgtctatgacccgcccatgctgctgtgcaggggagggcaggtctgtgggtgactttcatatgccatggtggtcagcaggtctttagttttaaccgccactgcccttgcatttgttttctaagaagggtctcataaggcaggtctagcaggcctggaacttgctatgtagaccaggctagcattgaactcataggcatctctctgcttctgccctctaagtgctgggattaaagcatatagccaggtgcttgtttctatttattttttattactgtgaacaaaactgtactaagtattcttacaagccttttgtggggatatatttccatttctcctgggtaaataattgcctggtgataatcgagttgctagtttgttgactacaggcatgtttagtttttacagacacttaacagatttcttgcctgtggtcctgccagttatattaccatatcaaaggggtgtctcaggctgctttgggagcctgaggtagccagtcacactgctcccatgatcaggatgcatagttagagcaaacagatgtgtggctcactttctctccagtgagaccccagcccatgggaaggagccaccatatttagggcaggccttccacctcaacttaatttagaaattctcttgaagtcatgcaaagaagtttgtctcctagccaatggttggtcctgttgaggtgacaatatctacaacaataaaagacaggctccccaagtcactaggacaaacaaaagactgggagagacttctgcctcgagatagtacatagagacacatgttcagcattgctgctgatgagtgaggtttgggttagatggggcagcactgcaaacgctcttggtttaagatgacaatgtagaatgtgtttggggacatggagtgaataagactcttacaccagaacctgtgtccagttttgattactgtgaataaaactgcattgagtattacactatgggccagaatgtcatgttcaatgattgagcctgtggctccttgcataagaacatgcagggactcagtcctgacctggagtgagccttgtgaaccaggctcaggtaacgcagggagcaagggaaaggtcaggggagaagagttggtggtgtcaatggggagtcttgctgagctctgggactgtggtttagtggctttggtggtgtcggttgctgcgactgagggacaagagcaactcagggaaggatttattttagttcttagtttctggcatggaggcttggcagctgggcttctgttcatgactgcactgagaacttgcagtgttacctgttatatatcagtggatcaggaagcagacacacattgcctgacctgagagcctccactgtaaaccataataaaccccagcctgtgggccttataactgtcagctggtcttctctgaacagtgccaccagctggggaccagctgttcaaacacatgagcttatgggacatttcatatgaaagccctgtcacaatcttacatgagaaaggtccccgaaaggcactgggccatgtggcataaagcctccttgggaaagactcagacactcagtctggtccctagtgcactttcttctctgctatcttcgggctttcactttccctcctcctctctccccaccttgtgaatttcgatagcatccttggaaatttgatgcataataaaagtggtttgaaattagaaatcacagtgcatgtgcagtgtggcctggcttaaatcatgcagttgtggcaaataaaatgggacctagtgatcccacagttctgtatacctgctcagccgggtgtttcacatcttttcacaaaagctcagcacagtgggttcattgtctctgctctgcacttgagtagaagctggggctggagccgatagcccatctctagggagggtttccaaacagggtgctgatcagggggagattcatgtcaagcccctgactcccttgagaggctcaacctggattttctcctgaaatcttgtcaagttccagaatctgctcctgggccagtgcggatcaggcttggcttcagttctcgtgccctggagagacctgagcagggaggcatggaatattcctttcctgaaggctgcccggtctattaaaggctatcagtggagcctgccaaattatctagtgcccaatgtaagtggatcaaggcctgggcttctgataatccatggctttacctccatagtactctttggggttaattctccctgaagctatgtgtgtgtgtagtgtgtggccaagtggcctgtgttcaaggagcttataacatagacaccagagaaaaacattttctaaatgggcagaaggttttgaaaacaaagttgtcccttggtagccatgaacaagattggttcccagaccccccagtgatggatgctcaagtcccagatataaaatagtgtagtatttgcatgtgttgtacaaacgttgttttacaagctttacattgtatgtagattacttataataagttatacattacttataataagttaatttaatgcaattaagtagcgtactggtttgtctttgtccacttgatagaaactagattcacttagagggaaccttaactgaggaattgcctctgggaattgcccagcttggcttctgggaatgtctgtggggccttttttttttttttttttgttaatgagtgatgtaggagaaccctgggcagggcatcctgggttgtataagaacaatagatgagtaagccatgggagaaagccagtgagcagcattcttccatgatctttgttttataggttccaggttccggcttggcttctcctgatgatggatagactgtaaccttaggccaaataaactctttcctaccaccaaattgctttgttcagtgctttattactgcaacactgaagcagactggataaactctttgatgtttcttaagggactaataatgagaaaaaggtccatgcatgtgtagtacagatacattttcgcccaaagacttctcattagtggatggctagtggtagttgttaggagtgggaggaaggcgcataaggaattgctgtctgatggaaacaggttctgtgtgggaagatgaaatgtttctggatgtgtctggatacaccagggtgaatgtttacagtgtcctgaactggacatttaaaagtgtttgaaaagttctgtctatcttaccatggtttgttctgctaagatttactcgctgaagatggcagaactggaaagatggagcctttggagcctagaagatcatgaatgacttcaagatgttagacagtggcaggagctggcagggagaggggactggttagggtaataaaagtgttcagtgtcttgacttgtccacgggtcgtggtaggggcacatagggtatggtggggggacacagaaggtggttactgcctcctggcttggagaagggctctggaaaacctctagggcagtggttctcacccttcccaatgctgtgacccattagtacagttcctcatgttgtgctgacccccaatcctaaaatcgttttcattgctacttcttaaaagtaattttgctactgttgtgagttgtaatgtaaatatctgtattttctggtggacttaggtgacacctgtgaaagggtcatttgacccccccccccaaaggggcacaacacataggttgagaacagctactcaacctgtgatgtttgagctgagaaaccataccagaaggacccagtaggggaagggcatgtggtagcctctgcaagcccagctgcttggccagtacttctctggtatgaaacagtgacagctcagagttgcagacttagcttgttgtctttgtaccacctctgagtcctggtagagaagtttgctctgcctctatctgccagcccttggcagaactactgggcacctttggcctgtcaagatggccttagttctggacatccacccatgttctatttgtagtctttgcccttaactgctcaggcagcctctggctgtctctctggtttgcttcttgctaggttgcatattgagggatcgaagacctcaggagccttacaggatgggacacctagctttgtgatccagtctctctgtgtgacgtttcttgggactcttttgagccccactttgcactgctgtaaatttggagctgagtgccgctttctctgagaactctgttctctgaggaatgcaatcaggtgaagtgcccactggtacctagtggctaatgctcatggaaagattctgcagtggccttgagagttcttgtgcttggcacttcagataacctgtggtgcttcatctgttgcagaatgtcactccctgagcatggatgtgtcctggaatgtcactcccaggacccactgctgtgtttgctctagtgcattcagccacgagggtccagcacagcccatagactgctcagctctcacagttgggaacagctttcccaggtcttgctcctgctggcctctacaaactttccagcatgaaccttccagcatgcatgttcttcaacaacaaagaggttattattattgctattattactatttcacatttaaaaattctgtgtgtgtgtctgagaaactcctgcagccaatgctttccccacataatcctaataataggatatggaccttgatttatagtctgaagggcagagactttaggtcacaggctggtaccagtaccagtgaataaagcaggagttgcatattatttgtctgaccccaaaccacatctttggatatatttagattacagagtaaagcctccgtgcttcagtagcagtaccagggaaataaagatggaggggcagtatctttcttgtgcgtggtgggaagggtggcacccaccacatttctcttctgttctccatagaagagtttggcgtatgggcttaggcctttctccccacaactcctctttacaagtgccttttaggaagtggtttccctgcatacttgttggttttccactttgtctccctggtgcttgctggtttcatagatgctgcccgggcatctgcattaaccttcctactgcaggagggcgttcttgccaactctagggacaaccctgtcatttgtcatcctgggagtctgcgggagcaggaactgcttaaagagtgtttccttcatttcttgggagcaatctaggagtcttggcagccacttagacaaaccagttgaggacgttcttggctgtcagagaccatgccagttgggacaggatgcagtaagaaccaggtatcctcagtgaccagcatgccagtgggaggcttcctacagacatactgggagcagataagtggtgcctcatccccctgtgacccaccttatggactgcaagcctcgagaatgcctcccttgcctgctagccttggggaacttctagaaagatgctttgggctatgtccagtctcctcaggcttcccacccaggttcctcctcctctcctgatacctgaggggttagttagtaacctctctgtctgtggtgtttccagtagggagctgttggtggcgcagtcttcctttttgcaggtgactttgttctgttttaaatactaaacagagtttcctgagaatgaattttcaaactatttgaaacctgaactatatcatatagaaacatttatacaaatttcaggacaggaataattatagtaatagactttttctttatcttgtttgatgtcatctgatgcttttgttctttaccaacttgatgtgagaattcaagtgcttgagcattacctagctgtgagagcctgtgaaagataatcccatggcttgagggaggctgggcagagtaatggaaagagagaggggaagagcctgggagaggccaggggacactgttctacactgagagaaaccaggggatggtgttctgcactgagagaggccaagggacggtgttctgcactgagagagaccaggggacagtgttctgcactgagagaggccaggggacagtgctctgcactgagagaggccaggggacagtgttctacactgagtgaggccaggggacagtgttggtgttctgcactgagagaggccaagggacggtgttctgcactgagagaggccaggggacagtgttctgcactgagagaggccaggggacagtgttctgtactgagagaggccaggggacagtgttctacactgagagaggtcaggggacagtgttctgcactgagagaggccaggggacagtgttctgcactgagagaggccaggggacagtgttttgcactgagagtggccaggggacagtgttctgcactgagagaggccaggggacagtgttctacactgagtgaggccaggggacagtgttttgcactgagagtggccatgggacagtgttctgcactgagagagaccaggggacagggttctatactgagagagaccaggggacagtgttctgcactgagagtggccaggggacggtgttctgcactgagagagaccaggggacagtgttctatactgagagagaccaggggacagtattctgcactgagagtggccaggggatggtgttctgcactgagagaggccaggggcagtgttctgcactgagagaggccaggggacagtgttctacactgagagaggccaggggcagtgttctgcactgagagaggccaggggacagtgttctgcactgagagaggccaggggacagtgttttgcactgagagtggccaggggacagtgttctgcactgagagagaccaggggacagtgttctgcactgagagagaccaggggacagtgttctgcactgagagagaccaggggacagtgttctgcactgagagaggccaggggcagtgttctgcactgagagaggccaggggacagtgttctgcactgagagagaccaggggacagtgttctacactgagtgaggccaggggacagtgttctgcactgagagaggccaggggcagtgttctacactgagagaggccaggggacagtgttctgcactgagagaggccaggggacagtgttttgcattgagagtggccaggggacagtgctctgcactgagagaggccagggggcagtgttctacactgagtgaggccaggggacagtgttctacactgagagaggccaggggcagtgttctgcactgagagaggccaggggacagtgttctgcactgagggaggccaggggacagtgttttgcactgagagtggccaggggacagtgttctgcactgagagaggccaggggacagtgttctacactgagtgaggccaggggacagtgttttgcactgagagtggccaggggacagtgttctgcactgagagagaccaggggacaatgttctatactgagagaggccaggggacagtgttctgcactgagagtggccaggggacggtgttctgcactgagagtggccaggggacggtgttctgcactgagagaggccaggggacagtgttctgcactgagagagaccaggggacagtgttctatactgagagagaccaggggacagtgttctgcactgagagtggccaggggacggtgttctgcactgagagaggccaggggatggtgttctacactgaccccaggagatgctcagagggaaacattgggcctaaagaatacattccatctcggccttttatttttgcataagtgttctctaggaaagcaattgtgagcatcacgacctcccatataccctctttaaaatgaacagttcacttgtgtctgaacaatttcactttagggtccctgtacttatttgttttatttatttgtattgaatgtatgaatttgggggcagtatatatatatttttttatttcaaaaagagggcaggattttctttttcttatttcctcatctatttgcagctgccctgcaaagtgaggtgtgtggggccaggcagggctgtctgaccctgcaagactctagcctgtagctgaggtgggcacttctctgtccccccagtggcaggagtcctcaaagccaggccccagacgacacagacgtttgtgtttctggagggaggcctggatccttctcatttctaattgtgcctggcagagaatgtgacacatattgggcactcattaaatactaaattatgaggccactgcatatacattaaccacagaggctagttattcagagaatagatctaagacttattgaatattttgtcttcaggaaaaggagctgagggtgggtgagcgatttggaaacttctttccttacctgctgctttctcctaaatttaaagttctcctctggagttgcaaaaggcattagccatgtttgaatattagagggcggttcctactcctggaattgattttgaagccctggacacttaataagtaaggccagtctcaggcttttataataaataaagcagacatgtacaatttggattagaattagcatgtttcccatatccgcctctagcttccgtccgggctgttagctcttttgactgtgacccttggagccccaagcacacagctggcattcaaacctgcaacagtaataaatggacatgtctctccgtcacctgccttcccctgaagactgtgaccgcactatggaaattccgtagcctgtatttccacccactctctggttccactttctagctgagttccaaaggttttggggtggtagaagctctgtcctagcttcctgggggtcagggaggtgagtagtgacaaccttcctggtgttctcggaacagcgcaagtgggttctgggtttgtatctacaccaaaccaggatgtgctgtgagtgggaaagacttttgagttggaatataggatggagtccttcatagaactttcagaaatgagaaatgggttacagggtgaatactgttgtgggtatattcagttaaataaagtgtgctgctaaacgtcatcttaggtgctgtgttttatcttaatatgggttctagacaactaaaatcccatctctggctacctcacatttcatttggtgtagtgtgtgtctgggctggagtggatggatgtagttcctcacgtatctgtggtgtttccctctgcctccatccagacaggaccaccttcagagacactgcccatgcaccagaggaaggaaggatctgtggagttcaccctgcctggcaggggcacttacaggtctgagtttactcagtggattgtcttaacttgcaagctgggcagcaagtcctacccagctttcccacaatgcatgctcagcccaggtctgtggattgtaaatgttaactatgtacaagtgggctgagtcaggccagaattttccagggtttggcttttcttgcttggacccctcttgccagaagcattctgcccacagatggcatacatggggagggcacaagagcagccacagaacctgtgtcccatgggagcaagcttctcccatcttaatgttaaggcaaatgaggaaacaacagctaacaggccaggtgaggctgtgtggcctggctgccttccttcagtatccttcctgcctttcttccatgccctgtcagcttttatgacactttgtccttgtctgctgggctgagggtgcagggggtagattatgtgaacagaacttgggcccatagggagaggctgggaatgccttccagagctgggtccgagtttcttcctccacttccatcctggttcctgataagccgttttagtatctgtcgtctcttcttgcttctgttcatctcctgactttttctctctctcctttccacttcttctcagctccttgaaagtcatagcctccatttctacctggtgatccctgatgctgttttgttctagtagtttctgaattgcatatgccttttgtttccccccagtgtgtgtgcatatgtatgtatgcatatgtgtctcatttgcccatatatctatgcatgcatttttgctgtgtgtgtgagtgtatggatatgtatttgcacaaacatttacgctttacatgtgtgtatctcaggggactgagcatgcaagtgaggaagcaggcagtagtgttagctagccagctagacttaagggtctaactgctgcctgctgtcttcagcatcaggactttgctaacctgcagtgtccccatctcctacttgattgctccctcagtaacctccctaacatccttgtagggtccgtggtggcaggtgtagttattacatccaaggtgagtctctgtgtattcagagaggggaatgtggctcagtacacctcagtgcctgtagcccagaaactaccctacagcagaacggacgtcactcagacaggaacgagagactcttaccatctcttcagtggcagataaaatgtaagtctctaaatctcttcaggtctaatttctcatctgaacgatgactagctcaagctgttggttggacatgcttggaagtagaagctggtctttggttagccatatccaaagcctgtgaaaaccatgccaaagcaaggcgagctttgacagacaagacaccagcctcccctgcccacagataacccccaaggtaccatgccagcccagtcctgttgatgcctcaacaaatgcacacctttaatgtgtgggattaccaggcatctcagaaaacgctgatgcacacaccaacctctacagctcacaaagttaacggctttattaaatgccagggagaaatcccagaggcgtttctctgctgaatttgaattaacaaaataaaatgaggaatgtacaatatcagctataattatggctgggccaacagtggcattataattttatgcatacacatttcttccatggtaaaatttgacatgaaaattttaaagttatttttaagcactctcaaagtgagagccctgtgcaatgaagtaaatttacacggaatagggtaatcactgaaaaaagaaaatgtggccctttccatgggaaacacgacaaacactaacagagacaggaatggtccctgaacccagcagacctgtgggaacatggcatcatgaggcttcgatgcagaaatcaatagtgcagtccatcagaaaatggtggagaccacgacccataactcacctgatgcccctgagcagcaagtttctgccacgattcccacgctgaaagtagaagcagcagaagtttcattgcctgtttgagagggcaagggtactgccccagatggcagcagagtgctcccaagtgcccaagtggctttctggctttgctcatcttccttctgaagtaatcactgttccattgctgggaagataccatgactaaggcaactcttatgaaagaaagcatttagctggttcttgcttacaattttgttacaataggtttagtctattatcattatggtggcatgtaggcaggccctggagcagtagatgagagctacatccagaaggaagagagagaacttggcctggcatgttcttttgaaaccccaaagcccagcccaagtgacaaactcccttcaacaaggccacacctcttaatccttctcaatctttcaaatagtgccatcctgctgcctaagcactcaaatatctgagcctgtgggcaccattcttattcaaacccccacactatccctcacatcagtgcacatgggcgccagtgctgaacttcctgcttagcattattgctgctctgcagaatggtgctttatagccttcaggccgattaagaataggccaggcagtgactggttatgaggaaagtctgttcagagttgactctggcctgactcacctgccagggttgaccaggtgcccctgcgctgccctgccaggacaagtccatctggctgtggatttgattgtgcctttggattgagttcctactgtgtgcccacctgctgagtgacccagtaataccttccatggcctagtcttctcattgtcaggtggacacaaatgcctctctttgatgaggtaaatgtgaaggctaataagtagggtcataggtcgaacagtatctggcaaagtcagtgtggtagctttgtttcaaattttgttgtattgccacagatgaccaccagagggtgatgttagcacatatatttgcgaaaagttatccacctggaatggtggttcactgttgcctggttttgagctgtccctaagctgtgtggtgggcggagattagtaagtatatatgattagggtaaatccgcatcaagttatttcctgttagcaagtagtactacacagggaacacagctcctgtctactgtctctcctaagttctaattattcctttgattataatgctggttaggttggggacagcaagactcacatttcctctcagcacccactatgagaagagcacgctgacaccacaggtcggctgatgtggcaggcaacttggaaggctttgttgaagctttggtggtgttattatttcgatgggagatccttggcagctggttaacacctctcagccccaggcttctcttctgtaagtggggatggtgatggtggcgatgattatggtgatagtggggatgatggtgatattgctgctgcagctgctagtattgattgtcatgagggtgataatgatggtgatgatggtggtggtggtgatagcaccaccaatttggctacttcccaggacatcagtgatgatgaagttagtcaccgatgtgaagcagtatgtggatattatttactgttggaggtagcatagatcttattctgcagccaggctggcagggaaggttgggatggcactcgggctgtggaatattgatgcattgttcttgtggaaggtacatggacagttgtaaaacactgaactctgggtaggtaggtcttctacctacccaagtcctctacttccccaggtcttctagtcatctggctgtctattcacctgagtcctctactcacttaggtcaacactgacctggcctacacattgcagcactggaatctgccgcctggaggctaggcagtctgcacttaccatgcccagagtgtctacttgtgatacacatacgttgtatgtctgaagtatattttctcatttaatccaaagctgagttgactttgcaactgggaaatcagtctcctcctttttccatttgggtcctcttatcagtcttgcctgtccctgtgagagaaagacaggaaaagacccttatggagctccacctagctctcttccaccagggcaacgtttacatcctttgatttgtcactgcgttcagaactgaacttggtctaaacgcctttgtcagtctggtgcccagcacttctaggaatgcagagctgttagggacgttgacgtccacctcaggaaacacactgttgttttgtttcattgtccatctcctcagacaccaactcaagtgtgtatgtatgtgtatgtatgcatgcgtttctgtatgtgtacatggatgtgtatatgtgtatagatgtgtgtttgcgtgtatatgtatttctttgtatgtatgtatatttctgtatgtgtgcttgcatgtgatttgcacatttgtgtatgtatggatatatgtatgtatgtatgtgtttgtatatgtgtgtatatttgtgttgtatatgtgtgtatgtgcacatgtgtgtctggatgtgcctgtatgtatgtacatatgtatgcgtatctgtgttcacatatgtttgtgcttgtacacttgcctgtgcaagtgcatagggaagttagaagttgccatcagtatgcagaggttcttttttttttctcagaattatttatatttgtatgtgagtacactgtagctgtctttagatacaccagtagagggcatcagatcccagaacaggtatttgtgagctgtcatatggttaatgggaattgaactcaggtcctctggaagaacaggcagtgctcttacctgctgagccatctctccagcccatccagaagttcttgactgctgctctaccttttattttgagacagggtctcttactgaatttggagcttgccatgtttggtaagctggctgactactgaacttccaatgtccatctgtctctatcgcccaggtgacaggtttgccatatcacctggcttttttttttttttccattttttattaggtatttaactcatttacatttccaatgctatccaaaagtcccccatatccacccacccccactcccctgcccacccactccccctttttggccctggtattcccctgtactggggcatataaagtttgcaagtccaatgggcctctctttccagtgatggccgactaggccatcttttgatatattcacctggctttttatatgggtgctagatatctaactcagaccatgcttgtggaacactgagctggcctcaaggaagactctaatatacaaaataccctcattcataccctgtctttccagggcctctccctggaactggttgttgggatctgggcagagtctgaattttcacttctttctctcactcttacggcaggctccatttcatgtgtctgtctcctcacgccgctttctctggctgccttcctataaggtagcagctatctctcagatgtcacctaggtgtgaaagcttttatgaaaaactactgactagcatccctgggactgtgttgacttctatggtctgccaaatagaattaggagctatctggaagattcctaacccagatcctgcatttgggcccctgctgcctgaacataggacacagatgatggcaggtttcctatacgtgcctgctacctccaggcctcctggacaaccccattcctagcccttcctggctgatcatggtagtctatgaggagctggttgcctgcagaggtaccagctttggtcagggtctcagttctgtctctttgctgctgctgccctccaatatcctgagagttgtgtttctatctcctggatcctggacaggccagttccttatctgtgggagctcacagcttctccagacacagttgctctatgtagatgtttgtatggagataacccactttctacatcctgatttttttttttttgcctacagttttaaacttttactattattaatcacgtttttaatgtacatatcataaaatgaatatgcagtttacaacagaacaaacacaagtagcctataattgtttgttttttttaatgtcattatctttaatcatcagggaaatagaaatgaaaactactttgagataccacaacaccccagacagaatggttgtcatcaaaagtctgacagcaactattgaagatacatcctgatttttaaattcatctttagagctgagcgcatcacttcagaactccacagggcattctcttaggctagttgcatttgctcacctgtaccatgggatcatgtctctgtggatggcttggttgccctgctcctctgtgtaggtggccagattgtacatggtgtgatggcatcatggttaaggaagatagctcacttcacatagtaggttcatctcattttgtatcatggaagtctcacacatgctagaaatgtgacctattacaataatctccatgcactgtgattttctgatgggttctagggtcttaaggaattgtagggggtaccctttaggctggcagcatggtggccaggtgtgtgataggagtctgacaatacctgctactgttttattcagattcttggataaaatctgggttcttgtcctcaaagagtagcttgcagccagtgtgtgggtgcagactgggaagagatgtcctacagggggaagaaggagcaggagtcggatttccctgagttcatagccagcctgtctagtacttagtgtgtgcctgacctgcgtagcctccattggatcatgaaaactttatgaaaggccattgattgaagcagctctggcaccaattggtgtgacctgaagcatgcatatcgtagtctactcacctttgtttttgccttttagtgtcatgtaaattgttagtacttcttagaatagatgttgtcctccagtggagaactatagaggcttgactgggattctaatataggtaatgtgagcctgtgtggtactggttgaaggtgagatcttgagactgtaagcctcctctttgcctgcttatcctttttaaattttattccagtaggnnnnnnnnnnnnnnnnnnnnctttaataagtgatggtgatgatggcggtgatggtaatgctgatggtggtggtagtgaaagtggtgaaggtggtattgatgaccgtgctaataacagcagaggtgatgctagtaaccatggtgatgatggtgctgctcctggcagtggtggttataatgccaatagcggtcatggtcatggtgatgatgtttgtgatgatagtgacattagtgatgatgacaatgatggtggtggtgatggtgataatggtgatgatggtgatggtgataacatggaatatatatacaggtagttaaagattcttcagagtaaatggaatggaggaaaacatactaacctgatttttcttcccttaaagataaaggaagggtggggactggagctacagttcagaggtttagagcacttgctgctctttcagaggacctgtgttccactcccaggacccacatactgcctcaaaaataatctgtaactccattttcgggggatctgatgcccttttctgaccttcagggacactagggcaggtagcgtataatatatatatattatatatatataacatatgtatatagcatatatatattatatatatattatatatatatatataaaacaaaggaaaagaaaacaaaggaaggaaggattttatgggactgatgtactgcctgctgcatcagggaggcatgtggaagggagtgtcatattgtacaaagctgcacaatatatcagactttagtcattatgttagatgtgacaacaatctggcttcatgttaaaatatttccagtcctattttggaagctgctagcatctatgaattgaataacttaaggtcaagcgaaaagcagaaaaacaaaaatataaggatgttcttgccatatcttctcacaagacagacagttcagtagggacttggctttagctgttgaactcttgcagttaattcacccaaataaaaattagttggagagcagagacggcgatttatgcaaatcgaggtgcagaagtaagagatttttaaagtacagtctttatatggagtaatttaatagcgtagcaaggtggcgttctgtctacttgtggttgctgataaatgcttatgcattttgcaaccattaattcatgtaactgatttggattcttaatggagctccataggcattattactgagaggaagagccagtgaggcaatggctcctgagtggagggtcatgaaaggtacaggaggtgtgggctatgcagttaggaatggagggccagagctgctccagctcatacgcttggactgcaccgtgcggtgcctctgtgagccgtgctcctccctcccaccacgtctcaggtcccagtagggcttgaaattcagtgcattgtggtgcttccttctggcctccgctgtctaggggagaaatctgctggctcctggattgttttcttttctcccttgctgttctcatatatttctctgtttttcagttctcaaaagtttgactatatttcttggaataggtttatttgattatgttctttgggatttgctcagcttcttaaatccattggtttatttttatttacttatttattttttaatttacaagttttcagttgtcatttcttaacacgtttccccagtttcagcatcctttcctcatccctggtctctgatgagttttagctcttctgccgtgactcctgggtccctacactctcttcattaccctttccaggccataggtgcctgctcttctgtgctcagcatcactgtctcccctgctcttgtcatgggggtttgagcctagcattggaggctttggtctggtactgttttggtggtagccactttaattctctgttctaaactttccagtaggtactcccttgccttgcctctctcttggatgaggatctccagttctcacggcatgtgttacttagatttgcttttgaagacatttttgtggtggttgctttagtccctaacagatcattaaggtttagagcacttgcccatttgttctgttcccaggactcacgtggtggctcaacaacatctgtaacatcctcctgtctgtgtcatcttgatgatgcctgttaatggccttctatccttccccatgctattctcctgtttcttgaagagtcacagggaatgaatggttatgagtaatggctgtttgggctgtgaaatcctggatcatatttagctcttctgcctaggctggcactcttgactctgttgtggcagagggtcggtgggcctgcattcatcttcgctgtttctgaacttcttttgacaccactggtttgaatgttggaatccaggcttcccactaggctgggtgatcaagtctaggctccagtgggctgggtggcagagtccagggttccaatgggcttagtgatggaggccagactctcaacaggcagggtggtggaggccagactctcactgggctagatgatggactcttggctctattctacccgtattgactctgggataaattggtgaaacccaggcccacaccgactctgccaacattgggttggacagtgaggtgtagtacctctgttgctctgttaaggttgcccagagccaggaggtctgatgggtctcagtgcttctcccgtgtggccttctgtagcactttagtcaagagctggcatgagcattatggctggacacttgtgagagtcctggttccctcttaacttttgaatgtaggatggagccagggccaatgtttactgaagtgtttggtcgtggtggggcgtagagtgcctcttttgcttggtagttcctgcttgtcttttggtttttgctggagtttccagatctgtggcctcttgggtttctgacaggaggcaggatgaaacccaaagcatccactgccgtgctgttttctaggtctcatggttgtaaactggcctgtctcaagtttgagtttccctgtgtttgtctgatctgtaagctcggagctttcagctggcgttagtgagaagaatggattcatgtactccgtttttctgggtccttttgccacagggtttggaatggcagctgtgcattggtctgcctttggctgagggtgtatgtctgtgcaggataccttggcctggctgctgcccatattctgacaccagcctctgtatctcctcactgggctatgggccactcacctgccatgtcttgtctggcctctagctagccttaagtctttttcatttcagtcaatttcatgtggatggaatcaatttcaggagagttagttcggagtctggagtgttgaaaagttcgccagcagtggtctccctctcgccatggtctgcgttctcagagtctggcctccttaggccgacaggctgtagatgacgggcatgtcagtcttgcaccatcctcaggagagggtaagatgtaggaattagtcgtgtgctgtgtgttgccccaggcacatgtgtctgtctgcctctttcctgagagtcctgacagccagagggagtcccggaatcctgacagccaggcctgaggagcttcacaagatagtgtagacaggcacatgtccctaaggatattcctgtaagaaagaatattataagagttcacccagggctcctgaccacaccactcatgtcggtgacaccccttgtctcttcttctcttccccatactgtgtctggatttggaaagagcatgggagcccctgaaaggatggaaaaggcccttaaggacacgagaaggatcctccttgcttctctgtcttcctctgacttgatgtgcagcaggtctgaagatgcgctgcagtgttcagtgattctgttgcctctgattccatttgtcactgtttcacaatgggcatgaactcactgttagttctgtagtcaatggcctcttcaagctaggcactggcggcgtaagggctgagatcacagaggccagaggcctgttttaatctagttatgccaaatggacttaccaggaacaacagcagagggtgttagtgtgtcaggtgccagaatattcttcatagggactaaattatcctttgaaaccccagactcacagtccagttcatggtcaccttctgggagggctggggcagagcccttgttcatcttagcattcctagggcagtttaggccagaggtccacggaggacctggctgctccttagctcagaatgtagaatgaggacttgcatataccagcatcggaagggtttcctctggaacagtgcagagataattcaggggaattgcatgctcatgcacagactgcttgcagtgggtctccttgtgctgagcatgtcatttttcctctgaggtcttttgttaaggaggagagcatagtaattggaccccaaaatgcatccaaattatcacatcctcatcagagctggctgacaacataattaggactatatttcaggatataagatacacttttcatatctggccactgtagaaatagaagtggttcttctgttgttactttagtgtattaataatccttaacatttgggggtgtacagcataatacaatgcctcttttcaatgctttggcattttgctgttcatgcatggctctaaaaacatcttcaagaagtgctctctcacctatgttggaggcctgtgctcaagagggtatgcccggcgctttgtcctgggtgtctagggcaggcagttattgaagacataatttcgttgttagtaacggagcagaggccctcacctgcctaccctctgctgcccacttccgatcacaagcaatgttctgcctggtgtgtttcttctctcagccctgcgtatcccactttcatgcccatctctgttcttggcagacccctttagtgacctcttatatcatgccagttctcccccaaccccattgttttctgattcctcatgcagctcaggttcttgctgttttctgctgcagtaggtaaacaaatccctccatttgcagaggactggtgcggggggtggggtggggggtnnnnnnnnnnnnnnnnnnnnnnnnnnnnnnnnnnnnnnnnnnnnnnnnnnnnnnnnnnnnnnnnnnnnnnnnnnnnnnnnnnnnnnnnnnnnnnnnnnnnnnnnnnnnnnnnnnnnnnnnnnnnnnnnnnnnnnnnnnnnnnnnnnnnnnnnnnnnnnnnnnnnnnnnnnnnnnnnnnnnnnnnnnnnnnnnnnnnnnnnnnnnnnnnnnnnnnnnnnnnnnnnnnnatccccccccacccccccagacctccccacaccctggggctccaagtctctgctcttttaacaccccaatttctgggagttaccatcccatgtgatgttttctaggacctgtctcttggtctcattccctgctgagaaatttctgtcccagtggccttttctggtccagggtttttcattgagccctgtttcatgcttgatcgaacccacgtttctgggcatggctctgggtctcagggcttgtgtttgtcctcactcggaactgcaggcatagtctaccgcccaacagctgaccacgcagtgggtataggggaagctcatgctaattcatagcagatggccgagttgggtgtcaccctggggtacccaggccctctctggagctgtcttccaaagagtcatcatatttgtttaatctccacatgatgtttactgtgcctttgaactgagagaggtcttataactctgtggtccccagacattcttcactgctaaatgtcacaaggttctcagacttctgagaacgtctgggaaatgatgttggaacattagactagtagaggctggctgggaagttacaccatggcaaactgtaagaaacagtggctctgtgttgtctgtgtcatggtggattgagggttcacctctctgcaggcctgggactagagtcatccttgtatccacagattgggtcagggcttgtcaatagcctgttagtcagtcattatatgtttaagtatgtgtcagacatggctggctttagtcctgtagatgtcctgagtattttagctgtaacttggtagagctcagctcgtggtttctagcctcacatatccatgtcaaaaccagttatcaaggtataatggttaatactgtccattgtaaaggacctagggtcacctatatcatatctctgaaggataatccagagtctgctaatctgagtgggaagacccattctaacaatgggagaccccgttccatgtgctagggtccagactgaagaaaaaggagaaagtgaactaaacagttgtctctgcttgctgactggcagtgtgaccagctgaggacaaataaagtcgttcttcactaaattgcttttgttgggtgttttaacacaccataggagtaaccaatacataaggcatcgggcttccggtcctactgctactctagcctgttttctctcttgtgggctggggattatagccagtttctgcctaaaccatgttgatatgtgcatgatcagcaagaatcacgttgagaaaacatagaaagcattctttctatgcagaaagaaaagcgttattaaaaggcaacaccttgcctggaaaacatttctcgttctctaagaattaaaccttgcttggaaaagatgaagtatcggctgatagtactcaggagaatgttttattgacaaagcagtgttctgctaggttagatttctgtttcacatatttggtaggaactgatctctgaggcacttaagtcccttggtagtttgtggtgagatctttcctgtgagtccaggggagggtctccttcctgtgacttcctgtacctggctggctttggtctttatgccagcagtgctgtgtggctgctcaccctggtgctcatattttctttcttgcttcaaagagaagtagaaaaatggagcaggagggtggggatcagagaggtttttattttcagataaaagagacagggacatgtttgcaggcccgcgggagagctccagtaggaaggaaggaatggatgagcttcagaacgaagcaacagtgactgagcagtggtgctcagtgggtgagaggggcgggcctgcgtgctctagccgttgcatgatgtggccagtggcctgctttcctggataaaggcaacaagggatgcactgtctctctaaaggtaaaatgacacagttcatggcatctgcactgtcccatgtcctagagcccacaatcctgcagctgcctgtgaggctaaccagagtgaggctaaccagagcgccagggttgtgctgattctgacatgaacatcagccagagtgccctggcataggtgagggaagaagcaggccgggcatgggtctgtggggaaggagctgctctggctggatctagtgaaatagcagaaaggtaaactgagagagacgtgtagttcctacttaacaggacagtgcaagggcctagaggtctggggtattggtgggtgtgagcccagctctgagagctgacatgtaagtcccatggggcactaggcagtgtgtggtttccagctatctggcaaggcagaaggcagctgaaacatagccttggagcatggtgggatctcctggtatttgctacccaggaaggtattgactgaccttctctgccctgacatcagctgccgagagagtacctgaacttctccaaggtgcttcatccatttagggatgggagtctggttgaaaagccatggtcttttgtatggtaccagttactccatttcagtagatatgtgaaaatgtcaaccaaaagccttgtaatggcttttgagtcctaaatataatgattttatttgtatctataattcttttatcagattgaaatgtgaattctttctcctctttatgtcttcttacctaatattgtgttaggaataattagttttgttatgaacagtgacaatgtttagataggaattaagtggcagagagcaacatattctacccgctgctggatgaggcctctcagaggacagttatgctaggctcctgtctgcaagcaaagcagagtatcattcatagtcaggggttaactctctctcatggagcgagtctcacgtttggctagcattggccggccattccctcagtctctgctctgtctttatccctggcaggtcaagttttgtgttgaaggttttgtggatggattggtgtccccctcccttcatgtatcaaaagatggcctagtcggccatcactggaaagagaggcccattggacacgcaaactttatatgccccagtacaggggaatgccagggctaaaaaatgggaatgggtgggtaaggatgtggggtgggggagggtatgggggacttttgggatagcattctaaatgtaattgaggaaaannnnnnnnnnnnnnnnnnnnctcccctatcccacaccaatttcccttttctctcacagcgccccccccctccgctttccccatacctaatcatcactccagttcccctccccctccccactctgagccagtttcctctgtctactcccaatgtctgtttggtttccccttctgagtaacagtcaagcatcctccctttcgtccttcttgttacttagcttgtttgggtcagtggagtatagcatgggtatcctgtactttatggctaatatccacttataagtgagtaaataccatgtgtgtctttctggatatgggttacctctctcaggataatattttctagttctatccatttgcctgcaaaatttcatgatgtctttgtttttaatagctgaatagtattccattgtgaaaatgtaccacattttatttattcattttttcagttgagggacatctaggttgtttccagtttctggctattatgaataaagctgaataaatccatgatagttttattatgaataaaactatgaacatcgttgagcaagtgtccttgtggggtagtgaagcgttttttgggtacatgcccaggagtgttacagctggatcttgaggtagaactattcccagttttctgagaaactaccaaattgatttccagggtgtatgtactagtttgtaatccccccagccatggaggagtgttctcctttcttcacatcctcaccagcatgtactgtcccttgagtttttgatcttagccattattactggtgtgaggtggaatctcagggttgttttgatttgtatttccttaatgactgagggaaacagatgcagagactcacatcaaacattaggctgagctcagggagttatggacaagattgggaaagatagagggagatggaggggtcaaagacaccacaagaggacctacagagccactaaccaaagaacatgcacggactggacacatatgtagcagatgtgcagcttggttttcatgtgggtcccctaccagttggagtaggggctgtccttgactcagatgcttgcctgcctttggatccctctcctcctgctgggctgccttgtctgacctcagtggaagaggatgcatttaatgtgccagggtagattggtacctagggagggagcaattggggaagaggggtgggaaggtgagactaggaggagaggaagaagagggctgtgatcaggatataaagttaataaaaaaataaataaatgaataaatgaataaatgaataaataaataaataaataaataaataaataaataaaagcagtgcattcctagcttttgtgccccattgggtgcaggagccagccattcagttcagttgttgtaagggtcttagttttcgggaagcattgccttggccgagcttccttgcacctggtctgagagagtttggctagaattccatgtgacccgcagtgtgcctctcccttcatctgagagcaggatttggcttgaggttaacttccatgttaaaccacagttatgtttccattgactgtgcttttctggagtttggcctgctgggtgggtctctgcagcagaaagttttgaaatacggaaaaaagaatattgtcattatgcccacctgaggtatctgcaaagggaacagtctgcaggaagtggacaataaaatagcccccgccccccatctctctctttctctgttctttgtagtaatcattgtttatgtgtcagagaagtaacaatactccctgtaatttttttcttacagaaaacacagccatcttcatgtgtaaatgctgtaatcttttctcaccaaatcagtcagaactcgtgacccacgtttctgagaagcatggggaagaaggggtcaatgtggatgacgtcatcattcccctccggcctctgaacactccagaaaaccccaacccaagcaagggtggagatggtaaggaccacaggcatgctgggcagggacttatgatataggaacactctaaattactgtgaggccagctacctggctcatggacacagcagaaacttagaaaatccacctcagagccaaatacttgtctgaatgtagatcttgtggaagttcagctctttgaatttcctacccagtagcttctgtaggtgttcctctaatacctggtcagtgatatgtgtgtgtgtatgtgtgtatgtttgtgtgtatatgtgtatgtatatataggcatgtgtatatgtatatttgtctatatgtatgtatgtgtatatatgtgtgtgtatttatatgtgtttatatatgtgtgtatgtttgtatatatgtgtttgtacatatgtatgtgtgtatgtatgtacgtatgtatgtttgaagcaggttccagtagcataaagcaggagtctgaccttagacaagtgtggagtggttcagctttagcatctatcagctgagttatttaaagcaaatgaaatttattttctaatcctcactttacttatctgagaaatgacgacaaatattcagattaagtcagagagtgtggcttccctacctctggtcctgcacagatgaggatgaaggtaggtcttgtacgctatcaataaattactctctgtaagttgggaaacagtgtctccaaacccatattttaaacctaaaggaaggttgagactgtgactctttcaggttcacagtcagtgggcaaagggagatacatctgtctgcagctgctgtacctctgttcctgaatgatatcagctacagcaggcaccatggattagagaagccatctaggcacagtaattaggtccccacagacgagaaggaaaacatgtagtgcaaaagggacagctgcaagagggacagctgcaaacaagacttagacaaatgcccccacaaacccctttatgcatgatgaggggcagcaccagtctgccgagcagaagcccaggctgggtggcaaatgtcccattgaggggttcattagccactctcaccatacagttgctctttcctgggaacgttcagagtggcattcaaaacagtctggcttattgatcatctgtcggacactgttaacaaggagagattccagacggaaaaatgtttggttaataagtccctctggccgaggcctggggtgctggagaaatatgtctgacagatgattaagttgttgaggagcaagaagtattgctgttcatgttgcatgatgagaaactaagaaacataagcccctgaaatgggcgtagggggaggagggattcccttgggtcagcatccacattgcccagtgcctatgctgcatctaccctcagaggcttgggacagatcgtcccctctcccacagaaaagcgactcagtggaaagttctccacagttacttctcaacctgtagggactggtactcagatttgaataaaaaggggaggaaagcttgcatagactggaagagaaactgcttctcccaagccctggaagtctcagttcccaccctttccctgcctgaccccatcgaggagctactaggatgcagaccattcacagaagtgctttcctgcttagagaggcatcccagcaggacaggttccagttaagaaacaccttgccggtttgggttgaataggcatcaactcagggaagagggttgtttgttcatcgaactcacccagcagataggagtcagtggattaccatggccagcatgcgagagaagcttttgcaaaggttttagttccttttcatcagtgttgcttaagatcttcttactacagtgaaacggagcatgaatcaaacagaaaacaattttatagtttcgtttcttttataagcaagaacgggaaaaattatgcacttacagggaggactgtgtgggtgtgcttgtgagatgtatattctgaattctgccatttcccttcttacctaacgatgccattatacacacaagaccaggtctccttcctcatagtatgatctgtctttggctgtggccctccacaactggtctctgattcccaactccccccttgctcacctgagatctagctgctacagaagcagcagttagcagaaggcagacgtcagccttctgcctgggatgctcactcctgaaagatagctttgtccagttcactcctgcacatttcttggccttcgtcagtttgggttgacccaggaggacttggcattagccatgtgtgggtttaaggccccttcctctgggctctaaaactccactctgagtctcagagcaatgtccccggccggccatgtgttaactatgcccgggctactctctttcccttctcccaaagatgcctttgggccattccccagcacagggtctggtacacagtgaatcctcttactcaagtgccattgaatgtgttggcatttgaagttgtcatcttttgttttcttgatgttggctttgctgcctcacctttctcttacaggatctgttccatcccacctatcagtacccaggaagcatcattagtgaccaacagaatataaattaaaattatacatagttttaattttttattatcaaattagagaaaacttttaaagatatactggtattcttcattgttttaagtatggaaaaatagaagcttctagatcctggtataatgttaatgggcagtctatctcacagagcattctgatagacctgttaaaattctaaatgagtacactctctctttgccagagcagagcctgcataaatacacaatatatagtgttcatggtgcattgtttaaaagttggagagaagagatatgctgtcaagaaaagttaagtgaattatgtattttctatagaaaaataccacagacataaaaaaaaaaaaacagaaaaatgctacttatccattagtacatgcctgaagcttgctaagctgagcatgtgtgaggctttctctgtctttatagtcactgtagtgtttcctatggttttgtctcttttatgcattttaagttttctatgacttattttttagatggctaattctattttaacttacttttttttttttttttttgagataacactgacatcaaattttaccatgtcaacagccttggagcatacatttccatgactttaaccacggtcaaaatatgtatgtttttacaattacccagttctaaaacattctcatcactgtaaagccaaatcaaactaacacttgcacccctaagcagccagttttccctttcctttgatgtcctggcactcactgactgatggatgtgtcctggtgaatgtctacactctgtatgcttcatatgaacaggagtcataaggcgtggccttctgtgtctggctccattcacttagtgtcctggtttcaggatttacctatgtgctagcatgtgacaggtcattccttttcatgaatgaatgacatttcagtgcacggacatactatacttttatccattggttcatcattaatgacaatttagcttctttgagcttcttggctatagtgaataatgcttctatgaacattgatgcacagatttcacatgcatatgtggtttcatttatgtatgtacctaggaatggaatggctgcgttacataattctatgtttaatgtttttgaatgggtgcgtgtttgtgtgtgtgtgtgtgtgtgtgtgtgtgtgtgtgtgtgtgtgtggtatttgtctctgtgtgtctaccaggatgttatgtattcctctgtcactctctgttatattgttctgggacaggtctctcatttattgtgagctcagcattttgattgactagatggtcagcaaactctcaggacccacctgtctccgccttccatacatatgcagcatagtgagaggttagcaacaataacattatacagaacaattaagatgatagtctacaataaaattgtcagcatggctaatcttgcactttccggccattagtaagtagaataaagattgcttgagcataagtgctgtgatccttgggtagttactctcatgaccaaggtcaccatggaaggactagcaggcaggtagcacatgcagtgtacctatggtgaatgaagagcggatacctcgagatttcatcatgctctggactcacttagctctggtatttggattaaagttggtcctggatagtggtgaccctgaaaagagcaaccttgttattatgctgaggagggccagcagcacaggacggcagagagtcaccacctcgctggtttccctgtcacttccctctttgatgcaattgacttttgactaaattcttctctagtacattttgtccttttgtgtttaatagattgcttgtatagtttaattttaaaaggtattccttaaaactttaattaaaacccccttcttacaatgagaaaatttcttccagtcttttattaggacccccacgtccttctgtttctctgtgaacgtctgaagcttgtccaggcttagcttctctctaaggctggcacccaggtttaaccttcacaattcattttaacttgagagatacttgaaatggtttaattaaaattttagctgagtagtaattgatttattgcttttctctccctttataacatgaaggctcctaagccctctgctttatttgatagccctgtaatctttcctgttcaccaaggatgtggtctgcaaaatgacctttcactccctccctcttgcaaattaagtctctggcagtgctccaagctgtgatccagaagacaaaatagccaaatggatcaaacatcaagctcgttctccttggtgtgtgtgtatatgtgtgtgtgtgtgtgtgtgtgtgtgtgtgtgtgtgtgtgtgtgagactgtgatatgcagtgcttggctgtgttggtcctatatgcatggagagctgggtcattgtttactgaagaagttatgggtcttccaagagcagcatttcatctcctagccctttgcagacccctcaaggggaatgtattcttttccttttcatctttcccttcctttccacttctgtgttcaccacccattgaccctggggctgctttgtgcttggctgctatgctagatgctgaggggtcccaagtgctctgcctgtgagctgttcctctctggtggatgacaggtacgtaagaggtactgtgaatacagtggctgcgtgctttggaggtgctaagtctggcctggagattatatgctctggcttgagggtaaaaggaggcttcctagggaaattgatgtcaaaaatgttagacctgttattgaattagaaaagaaaaaaaacttaaaaaaaaagggaaggaaagaagatgactggtcctgagtttggcgcaaggtaaatgtaaaaaaaagaaagaaagaaagaaaggaagaaaggaagaaagaaaggaaggaaggaaggaaggaaggaaggaaggaaggaaggaaggaaggaaggaaggaaggaaggaaggacatgactggtcccaggtttcagcaacaaataagtgaaaacaataaataaaaagggaaggacatgactgctgctaggtgtggtggaggaggtttattatagataaaagggatacaacagccagaggcagactgtctgggagagtccagagtggtcatgaccccgagccttgtgaggagaagggggagggagagaggggaaccaggtacaaaagccaggagacccaaaagtacaaagagagcaggtaaccaaaatggttggattgtatagggaataacattctagcccctggcctgaaaaagtttagggtaggtggtagggtatatcagccaggagaaccctgcaaaaaaaataagctagggtctgagggatgcagggggaatctgatggccagtgcctgctttgatatgttaattaaacaccttagccatttgtcccagctttgaaacctgtttaatgttttctcttctggatatttgttacagataaagccattatcaatgatgtatgagcatattgctctgacattgttatgaagttcactgactaagtcatttctgttcaaaccctacctctgctgctgcctagccctgtgactttgggtcatgctaactaatctttgcaagcctcaatgtggtttttttgtttgttttgttttttaacctataaatatatttattttgctttatatgtgtgtatgtgtctgtgtttatgtgtgtgtatgtgtgtatgtgtgcctgcatgtatatctgtgcatcacatgtgtgctggtaccaacagacaccagaaaaggacatcacattccatagaactagagtcacaagttgttgtgagccacccgatgtgggtgccaggaaacacacttgcgttctctgtaagagttgcaaatattcttaacgaccgaccgagccatctgtctatcatgtttctgttttcttgactgtgtagttgggatagtgctgccgaggtcccatccctggggagtaaatgaaggagagcctgtgcagggctcagcacggtgtctgtggtgtatgcacagcagcatgagtcaccatggctgtcctttccacagtacgtctgatgaagctgcagggcggaaacagctttggcctttgccttctgatgccttagctgtgaggtagaacaggacgcagtctcttcccacagaggagtatggcattgtgcagaaacctgaaaggctccttctctccaggttctgataaataattcattgtctcccctattgcttcctaggctttggaaataaatgtcagggagattgactgtcagggctcccgcaatgctagtctttccagattttccagtatctggagctatactgactagagaccaagctgccatctaagagcactgggtggccatgataaagtcagtgtgaccttaattccactttgctttcttggggtgtgagctattttaaaagacgaaatcaaggaagtacatccattgagtcagagtgaacagggatgcaggcacatctaagagctacgttatttaatgatagcctggttggaaaggtagttcattgttttttgttaatttgagataggatttccttgtgtagtcttggctctcctagaactagctctacagaccagcttggcctcagacccacagagatctacgtgctaactgctgaggttaaaggcagtgccacctccacctgtagtactttcttaactaggatactgccactcagaatgctatggctatagggaaatagcatacagttgccatcctgtcagccatttttgagtacactgcctactgttacagtggccacatctataacaggggctctgtatagtggaaactgatctgtgtgctgaggaacttgaggtggaaggcttgtatccaggactgctcaactcaaaggaattttctctgtactatacactgggtccatccagatgtttacagctgactatcattagtcagccctgaggggcttcagcagtaaggtctttggtagagaataaagacacccactttccagcgctacatgtccagcaaatggttctggaaaaagtgcccgagcatctctgggtctttggtttgtttcctactgagtgaattatgtttggtgtacacatctcacgaagtttttttgtttttgttttttaaacaataaaatgagagactagcggagagtctcataaacttgagtgatgtacaaagaaaaggcctatattattatttttttttattttgttgggctgttttgttttgaaaacttccccttgattatttgtttctttgccaggacttttggccttggatttacaacggtgattttttttttttttttttttttttttttgataaagaacgttgaactcacgggctcagatacacaatgactctggccccttcttttgttggagacttaaaacacaaggcacagctccttctccaaaagcctcactggctattgtcacctggtgatcctttgcttcttacctgctgacacctctccacttctgttttaagaaccagcaagaccaggaattaaaaggcagctcaagcttcagggtttgtagaaggaggaggagaggaaaaggacatagggaactgtagttgagaccacattcaatgtactagtgggtgtgacagtctagtgagttcatggctggtcctgcctcactagctgttggcagcatccaagagaaggagttaagatttggatggggccaccttctaggatgtgcattagggtctgatctgcagggaaagaagtggacttggtgcaggggccggatgggaagacagggatatatatgcatgttcatcaaactctgagcaactgcactggacactgtaaggggaagcagaggacagagtgggtgccccccccccaaccctgtgtgtgcatgcatggatgcaggcatgtgtgtttgtgtgtatgtgcatgcacacctgtgtgtgtgtgtgtgtgtgtgtgtgtgtgttttgtgcgaaaggggagaaagcccagcattgagctaccttttctagagagacatgaccaatatctgtgtacccagaatagaataatgacataccagagacatcctttcatccaggtctatcttggtgaaccagtgagtttcctgggctcacttgtaggagcacagaggaggggttacttacaggggcaagcatgacctaaaaacagctgctttaccaacttgtcacactttgcatgggtgacagccttcctataattgcatagattgagcctacccttcctttagtctgttgccttccatgtaccctagcacctcctgagatctgtgtagggtggagtgggccagaatcttaagagagggttaatagccctgtccagcctcccttcttttagggatggtgacagcctcaatcttaggagggtctggacagtgtaactattcaaagctgctccacgtctgagaagacaaagggatacatcatgcctggtgaacagtgttccccagtaccttgtctgaggatggtggggcagatttgttcagaacaatggactgttccagagctaggagatgatatggagacaaaggacaggggcaggaagaacctggagcagaaggctagaacagaaatgagtggacagagtcactgaggacagatgaccagagctcagtggcagaccgcggcaagggattcagggaggagcagaggaggaacccagccaggtctgttctggtttgacttgaggctgcgtgcttttcttccccgctccagcattcacagctcttcatgaaaatgtgggtagttgacagcagcaacttgttttcagaacttaaattattccaagctcatttatgaatatttcatttttagctaactaattggtttcgaggatctgaattatggatgtagaggacggaagattagttttgtcgctgttgtgtgtgggaagctttcagggctgattttatttcttccttaagcaccagatcccacactgctcattagttcagttcatgtggctttgtggggtcaggacactggctgaggtgctaagggacgtaaggcatcatcaggaggaggactctgcctgcacagagcacccagtgtactggcaaagagactcacagacagttggccctatttctccttgtgctgtgctcccactgtgtgtcaccagcacatgccagcccagcgcagaagtgcctggaaatccctggtcaaagcatggggtttacactgagtctaccagtcctgcaggtgagggcacagctctccacaagacaccagccccagttgagcctttgaatggctagctgcagtttggtggactgttgtgaccttcctcatgttttacttgctagagaaacttacagaacacagtaagagcctccatgtgggactgtggaggagactaggatggctcacagtggagccttgggtttctcacccagggccaggttcatcacctcctcctgtccttggtgcccgatgaggtcaagactcactcgggaagtcactctagctttcagtgcacccagcctctacttcagtctggaagacaatactgctcttgtgtgacctctaccctcctgagatttccaagccctttccctcccgtccatctggaggtcagagcttctgggtcatatttcaaagtccccttcacatagcacctaagtcaaagctttcaggcagtcatagacatacctatcaggaaggacgtaagacctttaggtcacccagggcaaaggccatacctctccatgggtgaaatttgccttgactacatagttgcatgctcagagcattcagagagcagcttctgtctgcgcaatagggctttgctagccatggggttagggctgggccacagacttcagtgtcacgtgcagctggtgggtgtgaggtgggtcttttatagattctgctaatgctgcttcttggatgttaattgctgttccttcaggttgcacaggctgctgtaaagaataataataagaagtttgcaagacattgacataaaggctttgttcttattccattactggattccttccttgaaccttcagttgcctggtccttctcaaacacagtctctgtccttggtgggaattagggctggcaaggggaccaaagggctttgggatgttggctgctttctttgtcctgtctcttagtttgtcttcatgtctgtattcactgtgtcttcccatttcaacccaccccacatgccttacgtgagatggattgaagtctgaaatggtccagactacctaggctgtagcctggatcctcaggcagtgctgacctgcggttggcattgtatctctgcagaggctctgccctacagggtgctcccttcccaggaagtttcctgtcccattccagtgtgcagtgtccctgaatgcttgaggtctgttgcattggctagagtgccacagtcatgcagctctgccctgcagattgctcccatctccctccctgcttcgtgggcttgggtgactcccttaattaaagggttccacaagttgaataaagtggctggtgtttccttttgcaagcctcatctttattgagagcaggaagagtcctcattccacaaccaagccttcacgtaagatggtgccaaaccctagacccctcaaccctgaagggttgtccagtgacagctctagcattgggggtgtcattagtctgaggccacaccccttcttggactatctcagagtctttccccagcatattgcatccatagaactgtatgagtcccagttcacatgattgcatgtgcagttctacccactccctgcttcattccatcgtcagtctgtagatgagtgtcttcatgatgcgcactagtggacaagactgctttgtaacatggcttggaactcactctgaagcagttctgatcatgctatttaaaaatcgccaggtcactaggcaacttgaaaaatattttattatctttcgccctataatttgtggctttacattataatattttttcctcctctttgccaggacaatttgagtctttgacataatcagaatagttgtgtaactcattaggagtgtgttcctctcagcagtccctgaaacccttctgcaaaggaagcttgaagcacgttctgagctctgggttcacgtggaagcagggattaataagggacaggatttgtgtacttccagccacaatatgaacttgtaccccttccagctttattgaaggagtacatgcaaaggttttgtccagttgatagtcttgaagcaggatattgcaaaatcaattaccattagtagatagatacattgacattaacattaaagatgcttgcagctggtaatttggggaactgcttcagacctcttattttaataaaacacatgaccattcctacacaaagaagctaagtgtaactgtcctgctttgtccccgcatgtgactgcctcctgccctgttgtttcttttacagagtttttggttatgaagagaaagagagggaggcctaagggttccacaaagaagcccagcactgaagaggaggtggtagaaaacctcgtgagccccagtgaggacggtcccctggctacagaggaagggagcagactggcccccagcagcttggagtgtagcaagtgctgccggaagttctccaacacacgccagctgcgcaagcacatctgcatcattgtgctgaatctgggtgaggaggatggagatgcaggttagtgggtgaggaggatgggagatgnnnnnnnnnnnnnnnnnnnnnnnnnnnnnnnnnnnnnnnnnnnnnnnnnnnnnnnnnnnnnnnnnnnnnnnnnnnnnnnnnnnnnnnnnnnnnnnnnnnnnnnnnnnnnnnnnnnnnnnnnnnnnnnnnnnnnnnnnnnnnnnnnnnnnnnnnnnnnnnnnnnnnnnnnnnnnnnnnnnnnnnnnnnnnnnnnnnnnnnnnnnnnnnnnnnnnnnnnnnnnnnnnnnnnnnnnnnnnnnnnnnnnnnnnnnnnnnnnnnnnnnnnnnnnnnnnnnnnnnnnnnnnnnnnnnnnnnnnnnnnnnnnnnnnnnnnnnnnnnnnnnnnnnnnnnnnnnnnnnnnnnnnnnnnnnnnnnnnnnnnnnnnnnnnnnnnnnnnnnnnnnnnnnnnnnnnnnnnnnnnnnnnnnnnnnnnnnnnnnnnnnnnnnnnnnnnnnnnnnnnnnnnnnnnnnnnnnnnnnnnnnnnnnnnnnnnnnnnnnnnnnnnnnnnnnnnnnnnnnnnnnnnnnnnnnnnnnnnnnnnnnnnnnnnnnnnnnnnnnnnnnnnnnnngttagtgggtgaggaggatggagatgcaggttagtgggtgaggaagagggagatgcaggttagtgggtgaggaggagggagatgcaggttagtgggtgaggaggagggagatgcaggttagtgggtgaggaggagggagatgcaggttagcgctgcatgccaggtttttatcacgagcggtgacagctaatacctgctttcaggcttgttgcttgggagtgagtgctgtgtgcttgatcgggtctctccttctggttcactggcttcttactgagcttagagtagtccttgaggtgaagatgttatgcagtaggtcagacccatggcatgctggtgagggaggagatgtggggattatagcagtggtaaaactcttgtctctaccttggtgagttcatgtgttgggagactggggagcttgaagcaaagtgtgggcgggcagaagggcggtcatcaagaacattcattctaatgtgagcacagtggacctggacaatcctgagtgtgaggaaaggtgatatctcagtggaaagacagagcatagagaagcacgctgattggtcattgatgactgaagactagactgctagacggtaccggctgttcttggagataaaacagcatgggcttcctttggctatgttcctggctagacttcaactctgaagcaaataaagtgaggctgagagtggccccaagcatgacacggagtgggtattccatggcacatttgcagagggccttttggaaggagttgcagagctacaccaagggcacctgctgtgggcctggggttgtttgatgctcgggctcttttctgtcttcaaggtgggctgtgctgtgctgtgcaaagtgtgctatggggaggcccagcatgtgtcacgtctgactctgccccagctttgctatcctgctgcagcttcagttccgtcatcgataactcaggaataaaaactgttctttcgtgtgagtgctttgagtattaagcgagacaggagttctgtggagcttagcatagcaatcgccgtgtcagaagacccagtgtacattagtgctgttagctgttctttccatctcgttctagcacgtttgtccttctgtgttctgaggacagcacacttcgacactgaagagcaaagaaatctgcttttgtctgttaggtaacaagaggacctggcctttgaccccaggccactctcttgaattgctgttttgaaatgttttgtactgtaaatgtctcccactgatgtagtaagatgcttggcacgcaaaatctcagcacagataggatggattattaaataattcatcaatttatactaacaggtgttcaggtgggtggccgaggctcattgcctgcacctgtggcagctgattaaaacatctttccaattccctgaagagctcccgagatgatcctgtggctcttgccactttgtgtgcttaacagaaccctgacacagcagtggactggctgctgtccctcagtgtgagatgtcagtgtttaggcgggagggaggcgtctgtatcttgacttggaacctaaattcatttggaaggttttagggagaagttgcttagggtaaggtcataccacctctgaagctgaaacttagacagccctggctctgtaattcactgatgtgggttacgggcattgctgttctctctctgtgtttcttctccatctccccggtgtcttgtcttttttacatactatgtgcagacacatacatatgcacaaacacctacagctcctctcttcttttctgcaccctacctaatgcttgttacgccttcagcagctctggccaaggcagcctttctggtttctgctggtccttcgagaactagttctctgccgtgagtgccggtggccgtggctccacatctttgtcctgccatgcccccaacttttctgaagatgcttgggatcagggctttcagtcttttgccatactgagttctcctttctgcctcccagacctaggtctgattttggggcacagtaataagtccttatatagctggcctagaacctatctctattttgacaccttgttatgtggtactgtggcatcttcagtccccatattccagtgttgagaagccagggcacagtcagtgacaacttgtgttactatttttcttgtggattataaacaacttagtacaatgtctttatgtatgtgtctgtgcatgtgtttaaattcttgacggtaggtctgcctagtcaaaaattcgttagtacatttctccatagaaaactcataccaacttatggccagtaaaggtctaggaacagcattggatgttttaacttttggggtgtgtgtgtgtgtgtgtgtgtgtgtttgtgtgttcatgtgtatacagataggcatgggaaggtgaagagatcctcagttattgaccttcagtgtctgtcaactagccaggatctctcagtggctttgagctctgtattagccaagctactctagaatcacagactgtatggaatgattttacagtggctacccgtgaacagaaagtccaagaatctggtagttgctcagtcccactaggctgggtgtttcagctggtctgctgtatacactggaatcctgaagtagatgccagtgccagtgaagaaatgaatgtgctagccaggtgagggaaggcaggcaaagagcaacaacttccttcttccatgcccttatataggcttccagccgagggtgtggtccagattaaaggcatgtcttcccacttcaagatccaggtcaaaggcttatgtcttcctacctcaaagatcagggatagaagtagatttatccacttcagaccaagtagaaaatctctcacaggcctgccctccatttctgaattatagtttattcaagatatagtcaagttggcaaccaagagtaggcatcacaagctcactttgtcagctggctatgctgcctggccagagaagcccagggctctgcctgtctttgccgtccattactgacattctaagagtgctgccttgcttgtgttttgaaaaagcttcttactgtggagtctggggtgaacgctgatcctcgttcctgcaaggtaagcacgatactgactgtgctggctccctcgtcctgtggtttcctttttacaacacaggaaatcccgagaaggcaaatataactgactctatgagtacaggtaatatgcctgtgacactgcccaggaggaaagaccttactccacccttggcccaatacatcttgtcaggactcttctgagatctccttgcagtttacagtctagcagatacacttttagagttttaaaaattttattcctgtttatatgtgactgtgtacctggtgtgtgtgtgtgtgtgtgtgtgtgtgtatccctgtgtctgtgaatacttgccacatgtatgtgggtgcccattggagacagaagaggtcatgggatcttctgcagctggggtgacaggtagttgtgagctgtcgcacatgggcactgggaactgatgtcgtgttctggaagaagtgtatgcttgtaaccgctgagccatatctttacaactttttattgttttgagaatttcatacatgagtatatgatatttgcatcatttttacacttccttctctctttttcaactcttccctcacctctgtcttggggctcatgccctcatcttgtataattattattgttatatacatgtacacgtggtatttgtgtttgtgtgtgtgtgtgtgtgtgtgtgtgtatgtatatatatgtgtgtgtgtgtgtatatatatatatatatatatacatatatatatatacccatatatacatatatataggtttggggctgaccacttgagactggataagctatttggaggtctctggagaaagttgattttccccctctaaatgtttcctaactgcctatagctcttcacttaggagtgaggcttggaacatttccaccatcctcttggctcgtcacctggtatggtaattatgaatgttgttttaggcaaccgtagttttgagatttcacaggtgcggcatgtctatcatgtctaaaagatactgcttgcagcaggcatcctggtcctttgcctcttcccatcccttatttcgtccccatcttctatagttgtactgtagatatgtaactgagggtgagcacctcaaggtcacttgttctttgcatttttgatcagttgtacatctcaatagcagcctccaactgctgcaaaatgaagcttctttgatgaggggtgagagctacactttcccatggatataaaaacaagtgtatagaatatagcaagaagatatattgatttagggacatggtcgtagtggtttctcctttagggtctgtaagctctcaagcaagggataagtagccaggtgtacagtatcaggcattccctcttatcgaatggccttaagtctaatccatttgcctacaaaattaatgatggttgttttttaatagctgaatactattccattgtgcagatgtatcatatttttaaaatgtattcttcagttgaggggtatcttagattgtctccactttctggatattacgaataaggctgctatgaacatactggagcacatatccttgtgggatggtgagacatcttttgggtatatgttcaggaatggtatagctgggttttgaggtagaactatttccagttttctgagaaactgccaaattggtttcgaatgtggttgtacaagtttgtactcccaccagcaatggaggagtgttccccttgttccacatcctctacaccatatgctattacatgagtttttggtcttagccattccgacaggtgtaagatggaatctcagagttgttttggtttgtatttccctgatgactaaatactttgaacatttatttaagtgtttctcagccacctgagattttcctctgttgacaattctctgtttagctttgtaccccatttttaaattgagttattttggttgttgttgtctcaagttctttataaattttggatattagctctctgtcagatgtagggtttgtgaaaatcctttcccaatctgtaggctgccattttgttctattgacagtgttctgtcctgtgtgtgcgtgtgtgtataagtatgttaagtaagcttataaaacagtatgtttccaggtatacattttaaaactgtatttttttcactatcaaacaatctgtttcccagtacctcttctattgccagggtgattctcagtgttccgtgagtgtctcatttagttgtcaacctcaagagaaagacatagtaggtggtatgccttaggagagaagattgctcaatgtgatgatagttctgactggcctggagatagctatgtagaccagggtagccttgaattcaaagagatctgtttttttttttccattttttattgggtatttagctcatttacatttcctatgtgatcccaaaaagtcccccatagccacccacccccactcccctacccacccactccccctttttggccttggcgttcccctgtactggggcatataaagtttgcatgtccaatgggcctctctttccagtgatggccgactaggccatcttttgatacatatgcagctagagtcaagagctccagggtactggttagttcatattgttgttcgagatctgttttttgtaagcctctgtactgctggaattaaaggaatgtatcactactacttccattttgaaaaatattgacagcctgtatatgatacttgtgactgttttgctaggtgtcacaaccccaaacaattagcaaatgtcaactgttgtcatttttaaaagccatatgacatttttgcatagttctatagtcccggggcattagtactgttttttgtttgtttgtttttgtttctttgcttgtttttgagacagggtttctctgtatagccttgcctgtcctggaactcactttgtagaaccaggctggcctcgaactcagaaatctgcctgcctctgcctcccaagtgctgggattaaaggcgtgtgccaccaccaccaggctagtactgttttaatgtagtatttaacatgcagttttatcattagtctttgcatgttattttgacttcggtacaggcctcatcacatggtttgggggtgaagaaggaccgctttacatttcagcacatgtggctgttgtcagaatgacctgccacctcaggtctccctgctcccttccagctgagactgtgtccaccttgcctttgtcctcttggcctccactgagtcagtagttatcctgctgttctcatgcaaagcaggctttaaaactttcaatctgtggccactcatgaggaatggattctctatgtacatggctaggttattggctatttgtgttcgtagatggctggggtagtcctcattcatatgattaactcactctgcatctggactgtcctatgtacttaaattatttcccacagtttatcatttactctctaatgtcttttgcatttcttttctactcttttttatactagcgtagacaactgtcatcatgtcctccaatgatgaaaatatacttctgtatatttttgtttctggtgtgctttcattcagtctacatattttaaagttataatttggaaattgtatttctccataacttgagaagtaaggacacacacacacacacacacaaaaccaatacattaatgtaaagaaattcttaataaatattatttagttaatgaattatttaaaaatataaggtctacagagaagatagggtcttgcaattcaaagtctaaaaaccccttaaaattaaacattgtgctttggagttgcaaagacagtgcaaaacggccccatgtccccacccctcacacagagccaaggagtatcaagattcccagtgtgccctgtggttcagtcacttgttgcctgtatagatttgtcagccatattgccagcaggtggcagagttgccctgttccctcaaagctcacctgttgctgctcttttacccacattggtctcccaacacttgcccactgatctagtctccaaatctgtgattttgtcattctgagaatgctgtgtaaactgaacaacacagtatgtgtttctgtaagattggttaaaaaagaactgggcatttaagctccttttctaatttagtccctgaggaatttaagtctagccaaggtgtttatccagtgtccccgttggggggaggtaaggagcaagatctgctctttcaggctgtgtcctgagctaccacattcctgccttagaaatccctgttatctctgccttagggggacagagcacactctttccccaggcctctggcagggagggtttcctgtaccttagtaagaaatcaaagttcctctgcaagcttcgtactgttggcagtacattctgtgataattaggcagtgactgtagcaaggcaggcaggcaccgtcctcctcacaggattatcagtatacatagtaataagccccgtggaaaacatcctcatccgtcactgatccccgtggcctaaaaggtcttcaatttcacagatacctaacgggaaggtagagcctcgttgttttccccacctctggtctgggtggacgcctctcaagtctgtagaagtgcccttatgcccagctgcctcgggctgagctcaacatactgcacggtgctccctaggctaccaagcacaacattacaatcggaaaatagtcacataattcttccagcacatgcactgtaaagagcacttcagtgacatttcagaaattgaccttgactccagagcttgttaaaacaattagatgaaagcaaaataagtgttttctctctctcctctgaaccctggcaagttaaaataacatttagaatatgtatccaacatttatttattttattctgcatttcaatagtaagaggaactgggaaaagagttttttcccctgttgtgatgaggaacagctggtgtttttgaaaaacatttttcagcctgcagaaatcaatatgtgaagcttgtgaaagtggcttctgagcccccaaagtttcctattactggggtcattccctgaaaagagaactgtgaaactccccactgctcttgttaaacattcctatggaagaacacacagtagtttccaggtcttcttgaagacacactgtgttctcctggagttttcgactgtacttccttcagctctgtgccttatgacacagttgcttgtgacagttgctggacacttgatgaggatagttctgagttgcatttgagagtctgcaggtggccttctgaccagcacacatttctccttgggaaagtgagtgatggctctgtttctttttgctgccttttcgttgctttttttttccccctcctaacaactcagggaacattaggaaaagatagcagactaggacaccccaagactgtcctcagcacaaaggagatctgtttgcccagaggaacaaaggacagagaataagagacaaaggcaggagatggaagaagagggagaaggggacaagaccaggggagagaaggaaggagtatttgtcttagaggacaaaggactgcctctggatagaggatactgatgtggcccataggcaaacggcagtttataaacgtaaaagggagcccctgagttaggatgaggtgtttaattttaactgggcatgctaattaggtgagccaaaggggcttttgattacttcagtactctgagagctggaccttggtagttagcctcaggaggaagaaggggccaaagaagggaacaagctttgggaatccaatctaatagtttttagcaaggcaaagagaatgagggagaagggcaaagcctgccagagccctgtttgtcatgcttggactgcctagagttcctccgggaagagacaccagtaggcatccgactgagctcagccttgggcaccatgtagtaaggatgtgtgttgtatgtcagactttttcctatacagacacaacacacacacaccaactcaccctagatagggagaccaaagtttggataccaacaaagtccaacttggtgaaccagtaagttttattccggttacttataggagcagaaatgactcaaagccagagctgcaccaccaaagcccacctcataaaagtagaaaacctggagcacactgtacagcctgcaggccgctcagcgggttggagagtcctttccaggtggctcaggtggtctagacctcttccaggcagctggctggtttctgctgcagcatgtgggcttgactaagactcttctgggtgaacccttgtcttggcttgtctgagagtgactctcagcaggctggaagggtgggtgtgggctcttgaatctggataattgtagggacttcctgaagcagtttgagatgtttctttctgtcttagggagcttctctgatggatgaaatattttgatccgagagctcgctgctacatagtgctgtggccctgcatggttctttcccctgggattcagttgctgcagccctcctgccttcccgctctacctgcctagtcttctctaatgcccttctcttctgctcatcacagaactgtgccagattctgcccataggcatagggcatggctcaggccactccacctgagtggagctctgctgacctgtcctttagcaacttctggatttttgacctatgactgcccctggacccctggtcttttgtcatgtccatgtagaggttatgttggctttacaccagtcactgtctgattctgcttctggacctaagaacctgtccagagtgtgcagagcatagagtgctctgtgcttcttgctcaagtgtctcccatgtccaaccatccccaccactgatgtgcctggcctgtcttaccatggtctgggactggactatttgtcacagtccacttcctctttgcatttcttgctagaaagtgttccctagattatttcagtgtttgcctcctgcaaagtcttcttggcccccttagccagctattttgtacttttctgactgtgagtacagtgcctacagcagaggcagtgccggggagggagagggtctgtggatgcacaggcttctgattctttatacagccttcccattcattcttggtgttgcctggagaaggagggaattgaacacctagagctgtgaacctgtgggaagctatagggtatttagggaagcttccatgggcctggaagattagacagggaaggtttccatttgcctacttccagaggtgatggaggcctgaacttctccactcttagtgcaattccacaaatgtaggtggagggattagaaagcctggcactgctgtcttctcgtgcccaactgagcaagccactaggcaaggcactatatgtctgcctccttctaccactggatgctggggcaagtgtcttctcctcccttgggttaagaaatggagggtcttctagacttgagaaatgtcttaagtctgggtggagagtgcatgtggaagtgaagagttgggtctcgatctctgaaactcccaggatccagctcttgctataagggtcacagtctttaggaggcagtgtcctgcactgtggatcttgactcttttgcctgcctttggaacaaaggatgcttaggcaccttttcaaggatctaggatacccactaaatcctgccccagaagattttgaaccactactttaggaaggaaggctctgcccatatcttggaggcaactggaagctgcatgctcttaggactatgcagtagaggcctgctggaacatgacagaggcagtggcagcaaatagatggtcgtgttgctgcctggtttcagggggctgcttgctctattccagtgtgagaggccagggctggggtgcctgtagtgctgctcttgccactgggctttactgagctgagatgcaagtgtatataaactgaggctttcagcaccagatttataaatggagaacgtagccaaccactccagagtgtgcttgaggggaaggtttttattgtagccaaggagaggcaaagggagggctgagggggaggaaggaggaggaggagggagaggaggaggaggaagggagggagggcactcatggcagaatagcagagttatatgggaatgagaatctgagagagaacagcagtgagctggagaattttagggtaggggacagggggagccacaggtactcgtgatactgagtgagcctgaaggccagcatgcactttggtatattaatgggaccaaagacaacctttggtcccttctgacagtgttgaggaaatggctcctttgggagaagggaatggggccccggaatgagggccaggacaatttcctttggacccgacacaagcaacggttacttattgtaagccttgtccagaggactgctctgtgtccctgtggaagtctctctgacctgcgaggaatagatgatccagggttggcagcccttcaccaaattacctaggcttccaagatgttgaggaagtctgctgtagctcagtgctaagtgagccttggcagcacacactttctttgctctgttatgagcttatggtagattttggggatcatccttgagttagacacatccaatcctttgggcagctgagtgtctggggagcaggacagagatgcagatacatgaaatacaatggaggagtgaagcatatgtggagggcagagccatactgccaatggggcatcttaggggtttcctgcaggagtagtttgtggggtgtgagtttctgccatctctagcatgctgtgggggtacggggggagtgtaaaaggtctgtaggcatttgctgctcgatggtgtgtgccaaacctggaggtgaagcaggaacatcagtgagtatacagtgttgggaggggcaggctacatggatgcttctgccagtcctggtctcttcttccttgaaatcttttcatgggagctgttagaagttaggctcacctgtctttccctcagcacaagagcgacagggagctgtgagaaggccggagggaagagggaagggatgatgcacactcagcaggttagagagttgttgtggagctgggaggtttcctaaactgctgtactagcacagaggaacaaatcggtggcggaggcccagagtataatcccttatcagtctgctactgttctaggccttccatcaatgtggctgataatgtttgactctcttgagcattctgagatttaattagttctggggcaatttagaataggtgctttagaacgttagtgcagtactaatatttcagcaatgcacagaaactaatgtctacaaactccggtgcaccggtcgggaagacatgctcatgcagaacattctgtgactttctgtggggcgtgaaggaaaatgggggttcacatcccactcagtgtgtgtgcagaactggggacaaggagcccagtggcagaggaggggtggtaagcaaagagctggaagacctcagcacaaagggaacacactgaggaggtgccgcagctcagcactcttccgtatcagttaccacagcgctgtgacagagctcctgatggagctgaaggtaggaagggctttgctttcagtctgaaaggttcagtctgttatggcatcatggtgaactgctggctcacatctgggtggatcaggatgccgagtgatcagagctgctgctcagccttcttcaatgcagaataactactacagtttcttttgtgtgggtatatgcatgcttatagttaaaggggtaagcagaacgggagcttttgaaccccagctatgacctagaatcatcaagggcctgctgtctgtatctctggtacttgatgactaaatgctgttcacaaagcagaggtccttgctataaagttctcagagtattggacactcggggaagtctgcaacacttccggcacgtgctagtgatagtgggtaggacatgctggaggtctgcaagggtggtgtggagctgccctgtggctgaagatctggttctgaagtgtggagatggaagtgatacttgaaggcttgagaaggtgtgagaagcatgggagagggacatagggttagttcagttacagaggaaccagcaaccacacagtaggtacaaggatcccgtgtctgaactatatgattcagtggttaagattgatagaagggaacccactttaaagatgctgatggaggaagacgggagagtgactatgttgttgttagcttgggagcttgagctgacaggggcaaagctgccgatctcagataactggggtgataaataggtttggttgaaaaaataagttaattttggtagaggatggagtttggtcaactgaacatgtgcaagagaatgtcacctttcagtgttcagccagcatacagggcttcaacatcaatatccttagttgcttggggtaaaaagatggcccaggggagggaaggaagccaaagaactggacaactagggcagcttcttgaggacctgggatcaccagaggtgtatagcaataatgcttgcctttatggagaggtagttgggtaaacagtgcagaatgtagctggaggctcagagaaatgaggctggtgtagaggagatactggggtcatgttaccctaataggtaaagggctagggttgggagatcttagagctccatgggttgtgttgtggagtatccaccagaggagaatacctggacatgagggtttaaaccaatagaatgcattattatcctggccagtgactatgctgagtcttctagaccccagtatagcactgcacctttcttagggtgagcatataacacatgttctggactacatacttcagctaagaggaacagttagccagaagcagagctatcgcagacaaggtttgtgcatttagagacttttccagaattgtgggtgttgatggataaggttttcattttcattttggcaggtgatgctatttacatgctgagttttatggcttcagtggtacttacatcatgaagtcagttgtgctaaggcctggaaccgttacaggtgggggctgagatgaagttactcagtggtcagttggtagcaaggaactctgggaataaaggttcaccctactctctttttgctttcacctcttgctggtacctccagtggccagacacagttcgaagccagagggctctggggtcattgtgtgaccccaatgggtgaaccattggggatgggaattgggtaaagaaaaacagagggtggtccagagggaccagtgggactgctagagaatcccagggtccatgggtccttttctccttatctacccttaaaatgagaggccagactttgcctcttacaatggctgcctctagcattctgtcagaacacattactgcatgcgagggtgttagggccgtggtgcaggggaagggtgggaacatagtgtgccagcatccagtaacatctgcttccctctctaaggtttgctttctcctatgcagtgtcatcactttttaaaatgctttcatttccaaaggaaacggaatatagagaattatgttaatttgccagggttgaagagcgactttgcacagatgtcaagaacttaaatgttatagttgtcagaaacttgggagaatgcaaggccaggtagcagggtgaggcaggtacacacagcccatttctacccgtttcctactctcagagctggcccatagggtcatagctttcactaatacaaagcaaattaaagcccgatgtgattccaacggggattcgttccaagatcctcactcgatgccccagaccttccttgccactgagtcctgcccatgctgtagttctgtacttgtgttttataaactggcggtgtgatgcagagggaagaagtaccttggtgggctggcaaaggtgttcccctgagtgataggctatccactggcctaatataaaggagatttattggtgggaagggaaggggacctggggaaggggtggaggcagagaaaacgggacagagaaggacagaaagagagagaagagaggaacaaagagagaaagagaagaagctggcctggcaaggagtgttcttataagcctggctcctggcttgtacctggtggccagagacagaagctgtggctcggtaactgttgggcggagcctataggaattgctaacagtactgatcacagttataatgatgtgttttcctgaatatatatgcctataagtgttgatctgaaatctggcacaggaagattagtaatgaccactactaataaacagatcatgatcatgataagattgcaataaaagtggcctaaaattcttaattgtttacttctagaattttcagactttgtttgaccatgcataattgaaaccaattgaggttggggtggctgagttccagcccagacctgagctggacttgcaatgcagcagacatgtctgtcctgagaacttcacatgtgtgcttgcttcagcctgtgacaaggcactgtgcgtgttctgtcatgcatctcccagtgactcattctgcagatgctgctcttagatgcagtgagttctgaatggctgcagtggaaaggcagaataggctctcagctatgatgtccttggcacagtacctgctgatctctgccatgtcttctcaaagctgactttcatatctagtgacctttggccagctacatggtacatcccaatccagcagtttgacactgttaccagagtccttcaaaagtgctcagaggaaatagctgcagagaccaaggacaggtgtgcgagacgtgagagggtggtggtggaaccaaccccttctttccaccttacttggcatgtctgaattgattgatgacactgaaattgcctgaacaggtcactttaaaaattgtttgaaagtcatcatcccagtgtcttgacaaacaaagctggagtcacacagtactgaggtatgatacagtatttgatggacaaggggactttggctaaggaccttgttctttgaaagcacagatttttaaaagccttagaggaggaaaaggatgtaggaaatgcttggctagaaaggcacaagcatgtgtgtaggaaaagataggagttctgctcacagctctcgacagggctttgcctgcagggaccaaggcgttgctacagcaatgtggtctctctctctctctctcctgtgatactgactgcaggaagcacaggtgccagagaccattgctaggtgtttctaggtgtttcgtgtgaacctcacagctgctcatggggttgatattgcctcccgtaccttcctgatgacacaactcctcagttgggaccaagaaaaggttgtaggggtttgacatgtcctaaatcttaagtgtctcagatacatttcagctactactttcctaaaacttacgtcctgttatcttttgaatgggaatcatttctagaacttgttaaacagtaatgctaccttaggaggcgctaatatgtttttactaggtcattatgataaaatacttgtgataactgacttctaaagaagaagggtttcagaagttttcatgtatggtcatttgaatctgctgttcttaggtgagactacatggtgggaagaacatctgctagagtaaagctactgaaatcgtagagccagaaggggagactcgggatagcctggggctcatccgccgatctgagttctcactagacctttctcttcttagagctgactctacctccactgtgccccaggttagagactaactttttagcacagtgacctttagaagcacctcagcttcacccagcgttgtgtaactacacatgcatctgctgaagagcatcccacaacccaggtgcctttgctatctttatttttggaactttggatgtgtttctttaaaggcattcttttggggctggagtggcggctcagtggttgagagcagtagctgctcttccagaggacccaggtcctcttctccacgcccacttgggaaatcacaaccatctgtaactctcatactgggacatccaatgccttttgacttctgtgggcactgcatgcgcatggttcacatacatgcttgcaggtatgtgaacattcataagcataaaaacagacagacagacagacagacagacagagaggcagacagtcatcagcttgtcagcccttcagccattcctcattaggcaccaactctctatactgagggataaggaagtcaataagggattctcttgaataagagtaattgtcccaaatgtcttgttgccagtaactggggactctggatttcacctggtgagtcccttactctgccctatgcccagccatctcaggaagggggtgactttaggattctgtcttcttccgtgttaggaaataaacacttgtctgctgaacagagacttgcctcttcagaacaagaaccttgcctgcccagccagaagaattgggaataccctagacagccttaatggtatcgagagggcctggccctgccactgcatctgttgctctaggagccagctgtgcatctgagtgcacggcaggcttgtgctcaggctgggctcgagtggggctgctcatctgcataaagtgattaggagcaaatagcctcttgctgtttgtggaaactcagctgaaggcacagagagcaaatgccagtatttcttctggccaaattagccttaagcacagatggcctgggcctgtctgagtgagctggccttgagagggagctgcttagcagctgcagtatctgagctgcctgtaagccggccagctttcgagagacagcaggaatagttgtggcgatcatgatctagtgctgcggttctcaacgtgtgagtcatgatggtcttggggtcacatatcaagtctttacattatgattgataacggtagcaaaattacacttgtgaagtagtgacaaaataatgtttgtgtttggttgtcaccgcaacatgaggaactgtatgaaatgaaagggtcacagcattaggacagttgagacccactgttccagcttatcagcttaggccctgtgttgtgtctgggacatattctgttagatctctattatgtaggctttgcgatttgaccacattcttgtgtcatcttggcaatcctcatgcagctgactcttttccgtgtactttgtccgactgtcagctttgcacagtttcagcggtgagggagacagtggggcatgcttgccttgcagttacatagacttacacatgatgctggtctgtcagttcagcgagagtctcccctatgtcatccctccctctccatgaaacttggtttttcgtaatgtgtctaaggaattgggagaagtcttccagggcatagaggacaggcaatggcaggtccagtgagttgcatgactggggtctagtcattgttactcatggcttcttctgagctgccagaggatgggtgacaggcctggccattttccaggcctctagtaccccatgtagggccaaatacgtgggacccttccttgttaactgcttaaggaataaatgactttgctcatctgagatttgtagcccttcctatgtctctccactttgtttcccatctctttctacttcgtttcatattgagcaccttggaagttgctcagtgggatgagctgaaccctgctaacctcatagggcttctgttttacttgggagacacatgagacaggatttgaccaatgattggcctagtctcagtagcttttctgaccagtagtaggaatgttggtgtgagatgtgtttgctacatcagaactcagagcacagcctacacttagaaaatgccaacttgcactgcctgccaagtcctgactttactggctcaggtggattatgacttccactgggtcactgacctatttcttgtgttcacatccaatgtgagtttatccctgccatggaagatcctgactggagtcacacagtggtatttgcctactgactttcctctgctattagcaggctgttggatatgtatgttggcccattggcagtgtacacacagtgggtatgtatgttggcccattggtagtgtgtacacagtggatatatatgttggcccattggcagtgtgcacacagtggatatgtatgttggccattggcagtatacacacagtggatatatgtgttgtcccattggcagtgtgcacacaatggatatgtatgttggcccattggcaatgtgcacacagtaggactacatccaacatggtttcccaaaaagcagatgcattgcagagctattgagttttccaaagaaaaggaagctacagagaatataggcatcagcaggggtgggggagaaagtagaaaagctcacaaagtcagaggaacaagaaactgtttaaaacaccccaaagaaaggacttgaagcatgctagctgtaaatgccatgcccttaaagaagcacccaccatcatgactgtcagcctaagtctggaaggtatttcagtgggagaaaggcaactgtgtttgaaaaacagagagagaggtcatgagcaactgggagatgtattggttgtttttcccattgctatgactaaacacctgacagaagcagcttgcaggaagagaggttcattttggctcagtgtttttgacagtagaataaatacatcacggcaggaaaggcatggtggttctgtgtgctgtgctgggcccttgaggatcaagaggcagagaacacaggcaggagtgcctcggagcatgcccacaaagatctacttttagacaggtcagtgtctgcagtttgcatagcctctccagacagcgccaccttctggacaccaattgttcagattcatcttaaacccatccataacaaatggaaaacattgtctcaaatggagagagcagaaaccagcctccctctctctcaaataaaactggacccttacctgagattccagcctcttttgcctgtccttcctggtcacttgcacataattctgccgtagttgcacgtgggctcagaggtcctagagtccatagcatgtggagcgttgacggagggggaactccctctgtgcagttgtcatccatgcagaagtaagtgtgagttcttagtggtatgactgctttggttggtgatacccacaaattagttaacagctcctgagtgacccctcacaaatgaattgcttctggaagtttgtttttggtagacctgtgcttttatttgttgttggtaccctccgtgtaacgacagggtagatgcttgttatgtctccctagggaaaggtttgtcatggacactgccataggtgtgggcgttggactcttgggatgcagccacacgactctagcagtagcagcctgtgacagggttcagagtgactctgtgctggctccacctcagtgaccgcttaagtagggtataggccatttgtatgtggccagggactcaggagtgtctctgctggaggatatgtcagagtggtgatcacgcctgagcgctgagaggtgtaagattctcttttgctctgacttttaggttttcttccaattaaatttgtgggtcaccatataagcttgtagatttcactgtggcatttcatacatgcacgcacacacatacacacacacagagtctgtagcttggtcatatttatttccccacttctctctgttcccttcctttcctcaaatagcctgccttccactttcatgtcatatgcatgtatatctatctatatttacgttctccacctatgagagagaaaacatgaaataaaatatctctatcatcctctctcccattctcttatttcccctctgtccttccttcccccatggcctctttctacttccatgtccccctctatactcacacacacatacacacacacataaatgcacatacaaatataaacatgtctacacacacacacacacacacacacacacacgagaaaatttgtactattcattgttctgagtctggtttatctcttagcacagtggcctccggtccccccccccacacacacacgagagagagagagagagagagagagagagagagagaatgaatatgtactatttatcgttctgcgtctggtttatctcttagcacagcggcctccgattccatccatttttctacaggtagcctcgtttccttcttcctatggcagcccttattttttgactctgatctctgctttagtttcccgtcttctcaacaccatcccaccagggactaagatttcagtgcgtgagttttgaggaacagccacctgcagagtgcagtccccctttgaatcacggaagatgtgtaggtccagggaagaaatgcagcgtgattgagtcagtttgtggcccatgtacttggaaccctgagtgggagaagatatgcatatgagggtgtcccttggaagtcaagactctggcctcagtgggtggtgtgacagatggtttgtgggagttttgcagactttcatactaattcttaatggagacagcagggtaggcattaaagggtccacacatgagagtaacttgattagatttggattgtagattggttcattctggagctaaggtagagggtagtgtaaagatcttaccagaggcaccagttaaaaacaagtttagataagagcagaactctccacagaacaagctgtctggggttggtagtccaggctgtctgagtgacaatgctgtgggactgtctttttctttatgagcattatgaacaagcttttccttggggtctcttagtggctagtgcttcagttcaacaagtggacctcgttaagattgtgagcaatattttgcttattaagaaagaaaagtgctttcagaaactcctgacagccttctctcagccctgagtggccaagcctggatcttcaggtgctgcaatgtattctcagttcctacaaagagtggtggcattccttcagagggtagaattggggcagtgtagctgtgggactctttgagtggaggcatggctagcagaggagacactggttgatggtgacctttgatggttacaacttctggtcagaactctttgtttcctgactgtcacagtcatatgaccagacatcttacactcccattgccatttactggagctaactctgtcaccacctgctatggtgggctgctccctctgaacaattagctaacgcaatcttcgtaccacttaagctgctttgtcaggcattttgccacaatgatggggaaagtaacgaagccaggtgcataccagcagcctatcacactgcagccaggagggaatcggagtagctgcagtagtcaggggtgttttcatagtctctactggggccaacacaggtccctccagtgtttcttaataggaggtggcttccaagccttcaccctctgctagccaccaactgttcacactcatttctccagtgtgtacacctagtgcctatagcagagcttgctaccattcatcccctatgctgggtgggacctcttcttcatttcttcttaccctggctgatagtgtgcacccttgtttgcttgttgtggatttatattgttcaccaggctaagcttatggtaaactcagactctcaggtcctttttttttttttacgtcaacatagctatccttggcatatctcccacatattgaatcatatcccatggtgaattctgttatagagtgagacatcattttacaagcaaaaaaaaaaaaatccattaaatgttgttctacctttttatagcatccaaaatatcctactgtagtatttatgtgcacacatcacccgatatccaggcgacgaaaagacttctgtgactcagacaaatgggaggcttttggaaatgtttttgtaatagccactaaaaaaatcaggcaaggcaacaattgctctgaggcatgttgcatagcaagcttcccaacacggagcgtctgccagcaaccttggagaccaggtgctgtgcccatcctgtcgctcactctcaggctctgaatgtgttaatatagcgttgctccttgaccttgggccttggagagcagcatgccatgctgattcatgatgcctcccatcacctctctcttttgtttgacattgatatatttaatactaatactcttctgttaaagactaacccagactgtctcctgcaagccggggatgatccaggaacctggcaagtactgttggtttatggggcacaatgtgaatgcctggtttgactgttctatttccttagcttcacctcagccagcatggctgctccattatctgttatacatggactgattcactgtgtcgggctggctggagctgacttgagatgtaggaagatcggtttctggctgtctccctttgcccatttccctaccccactccacagtctctatcttgttgttccttggtttcaatctcacttccctgataaccacatatattcctgcacgttccaaccccgccttccctgctgcctgtccgctgcacacatgtctcatacagaggcgtgtggaatgactctcagtgttctcttttgatattctgaagatctggtcctcaggtgggtcatttcaggcctgatgattctagtaaagccctctgtcccctccttccctctgctttatcgcatttgggactgtccaggtgtttccattctagagtgctcctttgtccttcactgacagatgaaggctagtcttactctttaggctaataccatcgctgaacctgtcatggctgctgtcgtatgtctgtaactgatgcatttgttctacagtgcatttgaatggtttgccagtccatgtactgcattctctacaacatggcatacatgtaaaactctaagccagctcagctattccttggattaggtggcatcagtcgctcaccattaccttcaagagatgcatatgtgaaccaagaagtcccatgatgccctaaatatgttttgcttggcttcccaattgtcttaagaaaggtaaggtagcaactagccttgaaaaaacagcagctcctgtaaaaacctggacgtattgtcattttttggagccatcaaaagacatgacaatcactccacatcccaggagtccccagcagggccaggccagacacagtctatcttctgttgtgcaggttgactgggcttagtgtctcacccgtgggagattgatgctcttctcagcattcatggccttcctgtatttacctcttagtcttgacatctttttaggtcactttctcctttctcctgcaggtgtggccaccaggatgctcagccaagtatttatccattgtctcagtcttcttttgttagactggagcattgctgtttattatcacacaccttcccaagaccgcacacatagctttgtcctcatcactggttcccatcttccccatccagtgcttcattaaccctcgctttttcagtcagccatagctaactgctccataaagcctttctgacctatcaggtaacctctaccatcctgtcccttattcttgtttcatacaacacagaacagagactactcttgatcacatttgttatctctttgtcttctctggagtggagggcccttgagggcttggtatgttcttaccgtatgtccaccatgcctggcacagggaacatgcctgggaagcataagatgattaggagaagggcgttcttggactgtgactctctaatcattttctctacagtgctgatattaatgatggttcatgaaaatgagccaagggtctatgctgctttgcccagcagtgcattcccagtacccagctgtgacctggaaacagtgaacatgttttgcattgagtttgtgaagatccagcaatggtggatgagccagcagaatgctctgcaagtactgtaggccaggaagagaaagaaagaatggggttgggtctgaggatagagggacggaggcatctcctttgctatcacctctggtaagaggcatatttcctttccagctggtatgaatggaaagcttatacattttggcatttgcttcctaggtaacgagtcagaccttgatctagaaaagacatacaaagaagatgatcgagaaaaggcttcaaaaagaccccgggctcagaaaacagagaaagtccagaagatctcaggaaaggaggcagggcagctttctggagcgaagaaacccatcatcagcgtggtcttaactgctcatgaagcaattccaggtgaccgaggacaggctgggaatgatatgatgagagtgtgtagcacagctgcccttggggtagcctgaggaaggaggcccaggtcagagtgtacgtgttaggtattttagtggagtttcatttagtcacctgagtaagaccacagacctctttatcctctggagctgtcctctatctcctcgacctactctgttgtcacccaggtatgcaagaacagtcccttctgtgcctctccccatcttctcaactggcagtgcccccatcagctacagtgactgcctccttggtgggtgctgcccactcagcaaatgtaagagaagcagctgttctccaggcccaggcagacactgcctggcttcttcacattttagtggtattcattaaaatattttcttagtactataagtttctatctatttttccttttccttgtagatatgttaaattttcttttataaaaggtctcttgtaggaaagactattttaggaaaacgaacaaacaaacagtgtcttaggagtttctattgctgtgctaaagtgtagacataagtaacttgaggaagaaagggtctatttcagcttgctactctcaggtcataggccatcacagagggaactcagagcaggtactctaggcaggaacccagagtcagggactgaagtggaagccagggagggatgctgcttactggtttcctcactcctggtctgctttctttttgttttttgtttttttcaagacagggtttttctgtgtaaccctggctgtcctggaactcactctgtagaccaggctggcctcgaactcagaaatctgcctgcctctgcctcccaagtgctgggattaaaggcgtgcgccaccactgcccagcccatggcctgctttgttacacaaacatgcctagtgttgacactgtccacagtgacctgggccctgccacatcaactactagtcaagaaagttctctaaagcttgctcataggccatgatggaggcatttactcagttgagttcccctttttgcaggagaccctagtttgtgtcaagttgacataaaaactagccagcaccatttgtgatgtatttcaaactatcataaaagttgatatagaaactaggcagcacaaacggtttgtgatagattccaagatatcataatattgtttttctctttgtgtgctttgggaatattagctgtctaataaaatggggacattgtcagggttttcagaacagtgacacactttaagcatctcctttagtactaatagtagacattgaaattcaaaactctgaatacagtttctctttatacttgacttacaaagtagggtgctcaggagagaaaagaccatagaaaattaggctgcttgaattttctggaaagtctcttcatctgccctactctgcttcagagaaatattattgtggataaggaaaatcccataggacagtttcctgttctaagtggtattagataaaatttccacttcgttttttttctcaaaaatctgtagtaatatttgcagattcccatgagggtaaaagcataatcaattccctctggtgttttcgagccaaatggtagtgggaatctctaaccctatctctttcccactcccactccactcacagactcacacaatctaagctcacgcgtgcatacacccacattcacactcttacattcacaattgtacacatactcacacgcatgctaatacacacttccacgtactccctcaaactctcatacctatttatactcatgcccattcaatacacccacacagactcaggcgccaaggcacactcacacatattctcacttgcgtgcgtgcgcacatgtactcacacacacactcacatccatacacatacttatccccagtgtcacacacctacacacatgtacacgtatccacacccacagtctctttctgctctcagaggtcttgggttggtttatgatgtagagttgcagaagcaaaggtgacctgggagttttctctttgcacctcccatttctgttcatgggaagagaatcagtaacattacagtgctcacattcctaatttgttgactgctctgccaccacatgctgccttaatgcggctttatggttgcttcaagtttaacagctttggctgtgtagaaagtcttgcaagagacatatgtatatttgactgtttcataatcagatcgagtgaaaatgtacttcaagaagacatttgggcatattactagtgtattttcatataaatacacacacacacacagaaaaactgtattttcatataaatacacacacatacacacacacacacacattcttaaatctggttatatgaataagaaaacaaatgtgttgcatggaagtcctacagtaaaatgccccacaggacctgctgactctgctggacaggttcagggctacagctagcacctctcagtaaggaatgcactgtgtatcaatctcaggtgctaccaagattatcccagtggaggctgggcctcccgaaacaggagcaccccctccagagaccactgcagcagacctggtgccgcggagagggtaccaagaatacgccatccagcagaccccatatgagcagcccatgaagtcaagcaggtgagttgtcccatgggctctagttaaaggtgggctgcaaataccatgcacacagagcaggggagatctggacatctgctggcctgggttctattcatgaccttatctatacagtcttgacccattagcttagctgaagattctaaccctgcccatcatgccctcttagagctcttcttcagagatcaaagcagaacagtccaccctaagaactgagcacacaatgtcttcacatgttacccagtcagatgtatcctccaactaggaaaaggtacaaatggccttgtttgcacatactgagagtatctaccttcatatatttggtggtttttttcatgatataccatgatatactagtataaacatattttattttttcaatataaaatactaaatatgctagttttttcctttaaaaaatttactgaaccttgaaaaaaactttcattttagtacatattaaaaatatttatagctgggcagtggtgttgcctgccttttaattctagcacttgggagcagaggcaggtggatcaacgccagcctggtttacaaagcaagttttaagatagccaggaattttgacatccccactcccaaattgtcttcttcttatgtgtgtctattagaatttaaatggcttaaaaatttaaaaaaagttatgtagcctaggctgttcttaaactcatcgtttccatgcctcagcttcctatgtatatagagacaagtgtcacagtgttatagccatgtgccacaatgcccaggtcagtcagtcatgctttgctgtgatagacacctttccaagcttcttcaagatttccttaagtatgcattgcttcaagtgaaaccgttacatccaggaatgtatacttaaaagttaaatggaccgaaaactgcccctcaacctgggacttgtgcttattgctttctagataagtcttccctggatatggccccattgaagacagtggacaaatagataagcaggctctgaacacaaagtatgtgtctatgtgagagccttcaaggctatttctgtccttaactactgtgaaatgggtgtgaaggtgttcctatcttcaactgattctccaattgttcctcagattcctagaggtagagtcactgtggtagcgtgtgtgaccttttgatagtcttcagtggtacctctctcaccaaataggaaacacttgcagtaaggaaactcagaaaacattctgtccctgtcacagcaatgtcaactgatactcagtcattacttagggctccagcataaaactgaatggagccagcctagcatcgtcacgagctgtagcaccttccatcaaagtaggcctctcagggctctgttttttgtctaataatattaaaaacaaagagcaaaagagtctcataaggccatttaagtctctcaacagaggaagagatgctgaggtttgcttatctaattaatatgatgagtctagggctttttctccagtgttctttacaaaatgtctcaccttctagatgtctttatcatttgggaaacatccaaattactttcctcaaagaagctttaggcatagcatacaggcgaactagtaacttccagatttgaatattgtaatttcatcatgtgaattgtactctttagtatttatggactgcagtccactcaagtgctttaactgtaaagagacagttgtctgaatcccctcatcaatacagaccttatatctgtggtagacatagtttaatggggctaattaatagcactgcatggttattagtgtgtcataaatttttcctggctagcctagatagaccttccagaggaagcagcagttgccagaggtgcattctcttttgcttccttgatctccctcagtgttcttgtttctggggcgtggtcacatacttcagtgctcgcagttttggtggcaggcgtagcccctctgaaagagcctgttccatgtgtacagtcacactgtaaaggggtcgctgtgcagagatttcatgccataagtgtgataaggaagggtgagcatgctctagaggccatgggatgcttagggtcaaggcacgaagcattgtttggtgttagacagatgcttagtttccttctgtgtaaaatgggtctgatgaaagtggggattaaatagtcagcacggggctggttgtaagcactcactgattattagtagaacctctgtatttcatccagtacattcctttccatgttgaaagagataggctccctgaggcaggtcatgcttttattcaccaccatatatgtgaaatctaacacatgtccacagcatgctgtcttgtgtaatcagtagaaactgtttatttaatggcatgtgaagttgataaaggcagtgctgttttcccccatctgagctctaacccagcagtggtggaagaggacagttgggagtgagtccgtcagctgtgtatgagagcttcaagagagaggagtgtggctcctatcagtggtgagcttgcccagcaacctggctctcctacctatgacctggactcccactggctgagcacaggtgcctctctcgacaactcttgctcaccacaggcaggtacatccctgccgtcttaccaaaccatagatcttctgccaaatgcattaccatccatctgttttccccctttctgggtagaagggagggcaaggagaaaggccaaggatctttctctcaacagtgtcttcccctgtgcaagctttcgacgagaacgagatccacccagacagttaatggaatgaataggcaggtatgggttatcaaatttgccgaataagtcatcgtgtctagtttcatggggactgaatttgctcctgttcatgtttcccagaaggaactcagctttgaagcatacccagtgtccaagcttgtctgagtcacaccccatttctgttgccttctcttgccaccgcctttgctgtttggatgttaccttagcaggcgttcccagtggcctttgttcccttctaggtgtcagactcctttcagtgactaccgtgctgttgtgggacactgctggactcccttctctcccactctagtttgtgctccctaaggaccagcaccctctgtcctcattgtctgtgcctatcctgttccgacccacaagtcttagttgctgaatgagtaagtgtcgcacctttgccctgcacctgtagctgactacacaggcttggtagttggttcactggaaagcttcgtggtctccagaagttaatggtgccatcttccatccctaggttaggtcccacccagctgaagatcttcacttgtgagtactgcaacaaggtgttcaagttcaagcactctctgcaggcccacctgaggatccacacgaacgagaagccatacaagtgctcccagtgcagctatgccagcgccatcaaggccaacctcaacgttcacctgcgcaagcacaccggagagaaattcgcctgcgactactgctccttcacctgcctcagcaagggccacctcaaggtgcacatcgagcgggtacacaagaagatcaaacagcattgccgcttctgcaagaagaaatactcagatgtcaagaacctcatcaagcacatccgggacatgcatgacccgcaggacaagaaggtcaaggaggccttagacgagctccgcctcatgacaagggagggcaagcggcagctgctctacgactgccacatctgcgagcgcaagttcaagaatgagctagaccgagaccgccacatgctggttcatggtgacaagtggccctttgcctgcgagctctgtggccatggggccactaagtaccaggccctggaactgcatgtccgaaagcacccctttgtgtatgtctgtgctctatgtctcaagaagttcgtcagctccatcaggctgcgctcccatatccgagaggtgcatggggcggcccaggagaccttggtgtttaccagctccatcaaccagagtttctgcctcctggagccgggcggggacatccagcaggaagccttgggggaccagctacagctggcagctgaggaatttgtgtgtccagaaattgatgtacgcaaggaggaggcttgtcctggggaagctcagcctgaggtggggttgagggagttggtggtccctggagatgcacatgcccctccacctgggcccttggccaccccccagagtgaaagtagttccctgtccccctgcaaactagaaaccactgtggtctcctccgacctcaactctcttggagtggtttcagatgattttttactgaaaagcgatacctcctctgctgagcctcccgctgctgccgaggcaacctcggatacacagcatcgagactcagcccagactcagggtgaagaagtcacactgctgctggccaaggccaaaagtgctggaccagacccagagagctctccgggtggaaggcagaaggtgggtgctctgccagccagtgaatctgactctagcacatgtctcagggcaaacccaacagaagcctcagacctccttcctacagtgactgatggaggggaccttggtgtgtgccagcctgactcctgcacaccatcctctgagcaccaccctggcagcacagcattcatgaaggtcctggacagtctccagaagaagcagatgaacaccagtctttgtgagcggatccggaaggtttacggagacctggagtgtgaatactgcggtaaggaaaggcggtgctggtcaggtgtgcctttgagcgcagctctccttcccagcagccctggccattcctttcttgctatcctcgccgggattccatttgagctcatgttgctttgcagagaacacctcctccctgaggcgccctcctctgtgatagataggagaaatgagcccgtgtcagaagtcacagtcggagccttccaggagtcggctgggatgatgcaccgctgactgtgttgggggccatgttgggggctgcccacaactcctcccaccttctgaccaagaagaatcattcttctggccttcagttgtggctccatcacctgggtagagagggtaggagactgtctgcagctctgcatagggaggcccaagaagctcgcttctaactgggagtggaagctcactatgcgagctcccagacagtaggagtataggatgtgggcagcctagagtgtagcccatagcctagggtgtcaagaggactaggaggctcttggctttgtacatttgcagggtagtgcttgacagaattggctctcctttctcttttcctggccctaacaccatgtggaagctggtgataccttaatacttgaatactgccagttctgaaaagtaatttcctgacagaaatgtggtggagagtgtgaagggcatacaagataaaggagataaatatggtagtttaaggatgataattttaaaaaaaaatcaaatttagtagaaaagaaacttccttgttctcatgtgcaaatatttttttaggcaaacttttttggtaccaggtgcattttgacatgcatgtccgcacccacacccgggaacatctgtattattgctcccagtgtcactattcttccatcaccaaaaactgccttaaacgccatgtaattcagaaacacagtaacatcttgctgaagtgccccactgacggctgtgactactcgactccagataaatataagctgcaggcccatcttaaagttcacacagagctggtaagtagcaagcccgaacagcagcccccacccgcctccccctgggtgcccattactctctcacatttctgcatatggacctatctctgctgcaggggtgtgcacaccctgcccctccagacacagagggccctgctccggcctcttgatgcctcacagagcttctctctaccccagctcctttcctagtgagcctctgactagactgaatttcattctctgtgcatacttttagcatctgagtctacagaagagcgaagcccagagtggaaatgaagcaaaggcttcataaatggcatttttaagtcttattaacaacaggaataataatagctgcctgtgagtgtttttgggggattaaactggatgattcgataggattaggtgattataccaggaacactgttgtcatattagtgtggcattcattataaacatcaacagaatctagaaagctttgatttaagaagtgacatgtttatccaaggtgctgttaacggcacaatggtcatgtctggttcagtagtggttgatctcataatgatgcaatgagtgaatggcttttttttctttgcaaggtctagtctgatgagaagaggctgacagtcctgagactgatttaagacttcttactgtaatagacaccacacctggggcccatgtggctctgttttatgtagccagcacaaaaggaagcttcagaaatcagaagagttgctttgactttctggtataagaatcactaacagccaggaggtttgtcatcaaggtgcatttggggtgtttggaggtatgaggagatcaaagcatgttgggatagactccaataccatctgccacatcgccacaggctctatggcctcagacagttcacttgtcatgtctgacagctgccaccttttatataaaatatacacttaaaagtctgtcttgttctgttgctgtgacgacacaccccaatcaaggcatcacttaaaaggcaaaacatttagttggggtgctctttacactttacaggtttagtccattattatcatggcaggaagcatgggggcatacaggtagaccctggaacagaagttgagaactacagtctgatctataggcagagagagagagagactctgggctttaaaatcacacagcccactcccagtgatatacctcctccagtctttttgtgggtcacatcccctaatcctttcaaatagttctggggaccaagcattcaaatctgtgagcctatgggaggccattctcattcaaaccatcacaaagtccattatgtcagtacccattcatgcacactcatgtatgcacacatatatacatagacatgcctgcatatatgtacacatctatgtatatttgtgtattcctattttgttattgcagtgttgagatataattgctgtcctccttctccggtagggcatgtggtttattaacttttctgtcattgctgttaggttggccctgagcctgaggaggagtgagtccagtggtagaatatgttcttgttaggagaagccttcgagtgaggtgttggaagctaggaaggtagaaggatggattgaatcctcactcctccactgcttacctggtgtttggtatgagtaatgcaaataatctgtgccacagtgtacctgagcggtgagggtgaggtgaaggaggacattaagtgcttggtatagactattgttttgcagctcactgctctggacttagagcttctgaactcaggtaaaatgggcgacaggagctaagccattgttcactgaaaatctgactgtgcagcctaggctgcctcttgttccacatgcagaatttgcctgttagttgtgaatggcctggagttgctcgtctagcctggttgttttcttccttagatgctgatgctcagtctcttgtgtacatcccacagcgctagggtcatgagggagcatcaggagtatgcagctgatgtctttcgtcttgcctttgtgtgctttgcttcttacttataaacagctgttgtagacgctatcctctgagggtagcaacacattcatcagaacagctgtgctaagtgcagtggcccttggagatcagtgacattgaacagctgtgctaagtgcagtggcccttggagatcagtgacattgaacagctgtgctaagtgcagtggcccttggagatcagtgacattgaacagctgtgctaagtgcagtggcccttggagatcagtgacattgaatgttgatgttctcttacagaaacgggcacagagagggtcgttggaccctcacctggtcacagttactgtctcctgtactctgcagctagctgtgtataactcagccctaactacacatatctttgagatctttggggatgctagagtgtgtagattgtgtgtgtgtatgtgtgtacggggtgttgaccaaaatgcttggaactccatctgtttagctagttgtcattggttctgaggtgagacttttctcctttggggtaacccctctctcacctgtgttagataaagaagtccaatagactcattggttctccaggttagtctctgactgacatgcactttgctctgtcattggacccctgtaaggaatgggtaagcatttgtctgcgtctccccagggaatgtcacacagcacttttctactttcatggtgaggaatgtgattgcaccttctttccgagcactgatctcacttctagcaatgtggaagaagctctggggagaccaaccttggggcagaaagctgctggcttgatcttgtagtcacttccttgtgtttttacttaattcccaagtcccctctagttgttaggaatcacttcctctactgtgtagagtctcgtgtctaagtctctgttgtgcaatactttgtctgtggctatggcatgagtgagggttggcagattgcatcccatggccttatcacagcccattgctcttcactggctgctggcgggtcagcagtgttagtgatgaagctcttggacacttgtacatcttctgaaggagtgtggcagaggtggactatggcccaggtagggacaggagacagtacttctgtattactgtggcagccattctgaaagctgcatgagttaataatatctgcacattgctcctagagaagtataacatcctgatgcaaggagtgtggcttagtaaacgtcacaagagatatactgtcttgcttctcattagttctcacattttcttagaagatcttagggtctcatttctacttttgcccttgttggtatttgtaattctttccattgagataagttgtttttgaaaacaggtcctcactctgtagcccaggttggcctaaattcatagtactcctctggcctcggcatcctaaaatctgggactgtaggttgaagccaccttgcccagttcaattgaagaactctctttgtttgtttgtttgtttgtttggttggtttttaacttttcttcttctctcatacattacatccagatatcaattttccctgcctccacccttcctccccactatccccacccccgcccagcctaccctctctatagatcaactgctcttttgtttcccttaaaaatattgggcctcccagggataaccgcccatgtggcctaacaagatacagtaagtctggggactaataaccgaggtactcttaaaggtacgtaacttgttgctgcttctgaagtgggaggctttggcctgtgcatgctagcaaggggacttcagatacaaggaagactgtcccttgctgcaaggagcactctgctttctgtggatgaacagatcaccagtaggaggagaaggctagcgggtcaacaccctgccctccccagccagcgtgagccgctgtggagtgtgactgtgaggttgaggatgttcgggacaagaaagggggagggggaaatgaccattcaaactgcgaatactttgatttcatgcctgagcacttgttcctgaagtgggcgactgtattgcctctgcagtgaagaggacttctttgaaaacctccagcttttgagattgtgtgatatttgtcttttgagcctgatgtaatttatttctgtcctgtggctgaggataccacacagggacaaatcttctgttcatgtagacactgttgacctgataatgaaggtgttagctctaaaatacttcacatctgcagggaaggttgtttttaagctgttctattgatttgtgatgtgcataaggtataatttattcttttacaacgtgaagtttagtagaatttagtctacacacgattatgtagccatcagcaactttagaaaaagcatctgttgtcccataggaaggctttcttgtctgctgtcaccactcccttctctgtccctagacacttcctatgtccacgaacattttacataaaagggtcacaaactgtgtgcgactagtgtccttctttatttatgtgatagcaggcttcatgttctgctccgttttatggttgggcagtgctcccttgtgtggagtttccctcactctctgagttgctgagcatttgaagtgcagttttagtggtgagcacagcaggatcgagccttcagtgctgctggttgcattcatagcacttgagctaactcttggtgaaatctgtacaggcatcttaactttcggaaattaagtgttaatcatccctttaaaagattttcaagatttcgaagcatctaaggagaagctgctcatattctccactgccaagccttccatccctgcctttaccattgctgacacattcacatcatcactgccaaggaagagataacactggggatttggagctaggacagagtcccagcactgagacctcctgctgactgtaaatcactcagagagttccagggagactgggtgaacttgctggtgatgtagaaacatcttacattactgtggtccaactggacttgagtcccatcggcatctaccgggacagggaatgatattgctcttactaggaaaccatggaaactttctcctggggcttgattttcttatatgtactcttgaagagaacatcagatgtgttaaaatgttggccaaggtctcacttttgttttagtattctgctttgaacacagattcctatgaagaacagaaattaaaataccgtcctctacctccagatgagcctacatatactgacatactctggttgtattagcatgcagagataatctagcaaattgctagtttctgtgaccttcatagtatttcacagctaagaacacatctagcaatcaagaagagtgggaaggatgtaccttcctctcactgccacttccttctcgttcctaaggacatggcgccaggttgtagtgagggagtgcagtcatccctccatgggaactggcccaggtcataggacattttgaggatgcttggtatcctcatataaaatggtatacatctcggggcccttcttgttactgtgataaaacactaacaaaaacaactgtaaaattattaaaactttgtgaaaaggcgacttggggaaacacgattttagtcgaccgcaagggagctctgggttctggtgctcattccacttccacgctggtcttgatgatttctgtgcaaatcacataggctctttgagcctcagttctctcccttgtaaattggagacagaatacttccctcatctcttaaggctaaggggatttaattaggttagtgaaggacaagatccccagatcatgattcattagagggtagtacaaacatttgactcagtcatgcctggatcacaaaagggggatccagtagactaaggtagagttcactcccacacagggcaagggtcacttccagaggttttttttgtttgttttggtgttaagtgtttgaatgtcagtgagtattagtgttgttgggtgcagtggagagttgagggagcagaagctgttaagcggctgggtttctgggtccctattaaataagtgtgtaagctcttgacctaagtgatttcactggagacctccctgaaccttagtgccactgttgccttcgttaggagtaagactcctggcctcccgctgtgggctttgggaatctgtcactcaaagaaggccccctgattcgcctttgtattcttctccagaggcctcagaggggcctattgggaagttgtaccccaagcctgagtgttggttttaatgttttgaagggacatacccttgaccttcaacctctcaaagtccatgtcatggaatggggcatccaagattgccctgggaacagagcatggtaatgttggtgaggactcatcatggtctcacacattaccagggatgccctggtaactgctatctttaccactaacccatcctcctagtccctttagtgaggatactagcagtgagagcattgcattgctccgaggttcctgtgtggagggcatctttcttgggctctggaaaaacagaaatgtctttggcagatggcaagctttttctctgcaaccctaagtccagcacattctggtattgtcttccaactgatgtaacgcaagtgtccccttcctacttcttgctgctgtttttgcatccctgcatggatgagtgggctctctgtgttatcttcagataacttacaggtcacagatcagcttcctttgtttccagcacaggttctggcatataaccaggactgtggttgtgacccattcctgaaaaattggtcagagtgagtgccaacttttaggagttgatgtctgttttatagtgggatacaagaatatgtctctcacatagtaggaaaattcattttgatcttttctagcctgtgtgggcctcagaactttccccttctttggaggccagtattatctcccagtgatacacaggtcagatgaggtcaccttcctgataagctaggctcctagcctcagccaagggcctctcctgcatctcttgccatggctgcagtctcatgctgacacccagtactttctaggacacaaatggctttgaaggcatctctgttggagcaaacagactccaaaggctgggctcttagcctccctgtggctagctttcttgtgttccctgcctttgccaggggctcttttagctatagtcctttttaagtttgctgagtgtgttattggtgtttgggtttcatctgcagcaagacattgaggttttgaaaaagaagtaaatgaatcctaagagtctacccttctcccaccctcctcctccactctctgtttcctgacaatcttcaaagacatcaagaaatggggcccctgataagctctaagataaattgctttcagactatcagggattaaaagaagaaaaatcaaacagcaaggactcaggggagatcagtgtaaactccttcaaagcccttctgaatgcttccatcagctctgatgacaagggcggctaggacagaggtgggagggcgcagccagagtaccagagtgatctcatgaatttctgtaatatggcaatgtgaacccagtgtcaaggacagtggaggggtaacaggagcacattgagaaaccccaaggccatgttgtcatgagaagtcagtgacactggctggccatacatacagctcatagcaatatcttacgtgtgtgtgtttcatagtagaaaactttatcttttattatatattttgatcttactcacctcagattcttgtctccctaacccctcccatatttcctcaccgcctcctaatgaagccatcaactttaaatagcccatcaattagggtcagggcctcctgcattcattccccccccccccccccccccccgcctcttagaatgttgactggcttggtcttgtgttcatttctctaggcctctttctctgaatctataattaaatgtgaactacattttttttttttaaatgggtacgtgagtgaatctaagctcagggccagttgtgttttgattggtgaggaaatcatatcctgctgggtcatcgagcagccctggaatgtgtggtagagcttcttggctgtcctgtctatcttcttagagttctctcatcaaaatctcccacaggctgtgtagggctaggtggctgtctatcgtgtgctgggaaggatgtgggggatgttgggttttgatgaagcttttgcttctggttgttgaggggcaataggattgatgatgattgcgataatgtccatgatgctggttgtatcgacagtgttaatagtggaggaaactgtgttgatgatggtcatggtggtggtgcttgtgatgatggtggtggttttggtgatggtatttgataacggtgatgatggtggtagtggtggtggtggggtttgatgatagtggtaatggtgtgtgttggtagtggtggggatgatgattgtgtttggcaatgacgacagtgatgataaaagttatttttctatagaacctagacttaagattgttaattgtcctttctttttcttttttttttctcttaaggacaaaaggagttattcttgtcctgtatgtgaaaaatcattttcagaagaccgattgataaagtcacatatcaagactaatcatccaggtaaggttatgaatttaaacggaagattaatttttaaatagttatgtctattttaaaacataatactgtagtaagcagtaccagcttagaatgaagagggaggcttgaattaattcattatttgaaatgttcttgccttcagaagccctttgttggccttgctccacccagtactatggtaggtatgctggccacaaacccgccaggaaatgtcagttttactatcatgtgatctttgaggtagatcttagtgtcagactccattgtcatattaagtagagcaggcagagcggacctgggttctctgtgttacttaaataattagcaagcaaaatatacctccttctcaatccctgtctcttcttattgacaaattagtgtgtgcccttgatagaggagaatggcctagtctgtgaagagcaaagggctctcacagttttagctggggacaaggtgagccttgaacctttgtcagtatgggagctcatggcttaggttgtttgttctatgtcactctagtgtgagctgactatatcctttaagagcactgacctttgatcatgaatacagaattacacaaggaaccccgcgtgtccaatctcagcttccacgtgcttctaatacatttccaagccctttgtatgtatccacccagggactttttcttctagagtattttaaagtttagctcacttaagttttctatgaaagactatacaggttatctcaataaataatggttttgcttagcatgacctctgtgtgacctataaaaagcagcgctaaccatgattcttactgcatcctaagatatttattatgtatggtcatttaaagtatcctgggttgatatgagattttttttttgtatagtttgtttgaatcaagctgcagtattttagtatttagtactttatattatttatgttccttgtagtctgtagagtccccagtctgcagtctgttttccacactagtgacttctgggagaaactgagttacttttcctatgaaaagcctgtgttgatttgtctggtcattgccttgcagtgttttctctgttcttcatactaaaggttaacagagtcttagatcacggcttgatcagatccaagtttagctttttcagtaaaaacactgtctcacgacaccaaggaggcacttgatggacatttcttaggtatgcaggtgctccactgaagtttatttacctcacacctgaagagcaaagtgccgcatcccctctgattaccaccctgcttttctgacagaggtctccatgaataccatttctgaggttcttgggagaagagtccagctcaaagggctaattggaaagcgagccatgaagtgtccatattgtgatttctatttcatgaagaatggctcagaccttcagcggcacatctgggctcatgagggtgagttgtctttccatctggaacatctatttaattttattctgtgtacattattttgggattacataaagaggaagtttgcctttgcataccctgctgttgtgatttctttagcatgtagatatatgactctagccaatagagatcagagattaagaccatgactttaattgcagttgcagttgtggttaatagaggtgtttcccatcttctagctctggatataactgtagtgaattagaccactgtcctttgcttacgggttaactagtgtcctgagaacaggaaagcccatatgttctctgggcagttgcagtgcccactactctgctctgtatgtaactagcattgaagaacaatggaactatgaaggattggcagtaaaacgggctgctggaggcttgacattttggcagtgtggagcgtcactgtttatactgtagagagaggattggaaagtggaagggttgagtagaaaggtcgcagtccagagaagcataggggctgctgtgctctgggggcttggccaggactggaagtgttggacagctacttgcaaagattctgacaagctaggagtcaagggtcttctgtcatcgacctcattccttgccgctagaggagaatgttgccctcctcagaatgaggaaggtgcaagtggcaaagtgccctgctagtcctgcgtaatagttccttcctgcttgtcgggagcttgaccactataggcaggactgtagggtcagaggaagatggatggccaagtattttgcataacatactatcagtggcagggctcaggggaggagctgatgggcagagagtcagtgaagagaggaggcagtggacctgaggtgcagtgctggaactgaaaggtgctttcttgtgtgccagcacttagtaagcactgtgggcccagtgtgtactttcggcttgctcatggtacgctagttagtgcattcagggactagcaagccaggttagttttaccagtgaggaacacgaggcacagaacgctatgaaatgctcgtgttgtacagccaaaaagtagtgggaactgggatttggacccatgctacatgattctaaagccctgttctttacatctttactgactcgcactaagagaaagcgatacctcccatgtggaggcaagaaaggaggagttgacagtggtgacgagatgaatacctatatgtcattttctgagggcactgaaggaagtcattgctaggagttttctcagtagagaaggaggcagaagcctttgtgtggagattggtttaggatggtgctcaggggagtcgtctgggagtggtcagagacagaccacgaacctgacgctgatgcaaatccagggagatggcagcctgaggattataaatctgttcccctgggggataatgcttgcatggcagacagaggtctggagtgggagagcgtggttcagtctttcctttctttgtatgtgacgcaggatgggacaaatattccatcttctggtcacttttccatgaaacacaattataaactgccttgagatttgctgcaggcatcagtgagatggtctcctacattcctcagaagaagaccctgtgtatgtccaggcttaatgtatagccaacactatgcattcaaggacacggggtgtcagtattccataccaggcttaatgtatagccaacactatgcattcacaggacacgggtgtcagtattccacattgaacttctggaagaaatctctcaatttgaaaaccttctgaattctgagaaaggtttaggaaacgaaaggctgcagttttaggatggagtgttcatggcctgctctttttcacttgtctatgaatttctttataatgatggaactgtaaaggataaagaaaagcctacttacccacattacattattcgcgagtctttggagctaatcactgcaattgcactgtaagtattctttctcccagctcactcccaaaataaaacatggaaaaagagcagcagtaggcaaatgcaaaagataagcatgaagactaacaagaaggggcaacataagataagtctggggactctccatagtcataggtgttgatcacacgtgaggaacttcattcacacggtgggcaggtgctcagagagtctaacagttcaaagaggtcaagaaatgcatttgagatgaaccacgacagcagttctcacactggctgggtgggggaaagcaatacaagtggagtaggcacaatagcttgggaatagttacatgtgagtcatgcagaatgtccagtgttttgtgcttctgtttatgttatgaatgggaatattcttccagacttgacctgagtgcctgatcctattgatttttgcaaagaatgacgtggcctataattttatttagtttaactcagttgagttggatttaatgactgctttgtaagttgggcagggtgtctgtcttcagggagttaccagactgtagggagagcagaggtgatcaaatcactgtggtatgcaagagcattttggcaggagggagctgtaggattacagaatgctgataggcagctagaactgtcctgaagccgaggcttgggaaccctgacttctgcggtatttctgtaaggcggaacaagatgaggtcggccagacatgaggtgtgcggacacgttgggagtaagcaagtatactgctctgttcagttggatgttttatatggtgtgaactgttctttgggatccccacccatgtttgcacagacacgtgtaaatgtacagctatccatttctcgttggtaggtgtgaagcccttcaagtgttctctgtgtgaatatgcaactcgtagcaagagcaacctcaaagctcatatgaatcgtcacagcactgagaagacccacctctgtgacatgtgtggcaagaaattcaaatccaaagggacactgaaaagtcataagctccttcacacgtctgatggtgagttcccaagctccagtggcctgtaagtgcaaggctggaagctggcatgccaaggccagcagagactgtccgatcccgggtaacaggaaaacactagacttcacaggatgtacaatctgaaagtgcacgtggtcctagcctgtctttcttctcaccagggctaagcactgtctcccttcaacatgctctgcataaacccctgtgggatacgtgagcatgtgtcataagcagggagaggtagactgctggaggaagtaagatgttaatgtttggttctggaagtttctgtcctctttagccttccatctcaccttgagcctgattgtaaggatagctgtgctggcacctggcctgatgtttttaacatcaaagctacctcagggtttttactgatagggcttagcctgaaatgtaatcagtatgaattcctgtggttgtgagctgtgaaggtgggttctgggcgcaacaaggccataaggatcagttcctgtttctaggtgggataacaaagagcaggtatgtatttgaaggtaagtgtctgattatggagagctcagaagcctaagggtcaaggctcaggcacagagcgttcataacactttctgatatgggcttcacagaggaaagacattgagaaacacaggtagccaaaccatactagaaaaagttttgatttaattagaaacctcagttggtgggaggtacttgtgactgctccatgttacaaggttaataaaatttcttaatatatggttcttgcagcgtaattagacataagaattagggcttagtgaacagattaatgtaagttccatgctgattccaattctggagcttaggagatgatgtgtctatcatatctggcctctgttgggtatctgtcctgggagtcagccctgctgggtgtgtgctagctgcttccttggcaagagtcagactgagcttgcggcccttagtgggaaaggctgaattcttggttatgattcctcggaactacagtcagggacttggggggtgttgaaccaaggccacagccatggctattgatcagtactttctttaaaaagaaaaacgccataatcaagatgaaacccatgcagggttgggtgtgctcagtggtagagtacttgccttgcctggatgagactttaggttcaatcactaagcagacaaagagataaactaagtaatataggccatcacctagggataacgaaagcttttgtgtcgtgtaactagttaggacggcttcactttctcagacagtggccttgctgatcttgcattccctgagtctttttgcaggagctgtgttcctgcatgtatgtggtagcctgtttctccctaaagtctgtactcgtgaatgccatcaagccccaaagccacggtcgtctcagtgtctcctgagttgtggtaacatcattcaaggagactttgaaagggtacagtgatctgaagtttgactctgaagtctgggtcaaggccatggaaagccatctactcagacagaccctggatagcacctttgcacatggagggacgggatcattaagagtggtgtggttaaaaagaggaatatggccttcctgcaagggaatagcctggcaaatatggtggagtctttcccagcaaagctattgaaattcgtagtttctctttatttatttttcccagcattttgggaaacattgttattctgaaaactgtagagacaaggccttaacattttcctggtctcttagatgtggtgcacagtgattctcagcaacttcgaggaggatcagctgtgtgtggaatgtgatgtgcctgaggcttggttctgtgccctcaggcctctgtgcctgtctcctgtgtttccctttgacccgtgccttgcacccctgtttttgagggctggctgctaagcaggtgctctcagcttgcccagcgaacctagctccagtgactatctgctgcagctctcgtcagccccatgctcttaaatccctttttattttatttaaagagctttgaatttctcccccggatgccatatataagatacagactttgaaaagattttatttccctcactgatttttgcaatgctcctgttgtatctcattggtttcatagagctctgtggacctcagtgcattgcagggttctataaatatccccccaggttatcatttgcttttataccttatggtctctctttatagacagaagttaaagagctttgctcatttacatttatcaatattttcctttatgtgtttaccccctctgagttctctgtgggaaaaagaaacctctcttgtttcagaacgaactcttttgccataagttttatttatagttttgtaacatttatgaaatttcaggttcctatgatttgctttagtgtctgcagcatggtaggaatcttcattttcacacagctgtctactgactcggcgtatttatggagaaatcatcctttccttctacgcttgctgggccagaattccccacaatgctggcgttcattctgagattttgggttgtcctgatggcttttgttttaggtcactgctttaaaagatactgtcttcttgttttgttttgttttgttttgttttgttttgttgagacagggtttctctgtatagccctggctgtcctagaactcactttgtagaccaggctggcctcgaactcagaaatccgcctgtctctgcctcccgagtgctgggatcaaaggcgtgcatcaccacacccggctaaaagatactgttttaattaatgtaattttatcatgtattgctccattctattttgattttgtagtgagacttctgaagtgtcactggattgttatcgctttggtcccagaatgttagtcttgaaagcatccttgcttccatccctggctcctcttcaggagccttgtgaccagcctgtcgtgaggtgtgacctggctagcacatgtcctccttactcattccctgggtaccctaacgaactctcagtctttagtcatagagggacttcatatctcgcagtaaacactgcttgaaagtctacagtggctgtttggtcgtcagcagactatcttatgaggaagagctgagttctttgcttgtgaagctacacagaaatggtagagctgagagtctgggttgaatgttgtctgcccgttcactgcagggttaccaggacaggtgacttctctttttccatgtcattgaactgggactagataccctgtgttgtgctctcacgaggccaccgagctccatgttttctgagcttcttcctgcgagcttcagtgttgtttctgtggaggctttccatgcaggaacgccccactctgctacccaggccccaggcccgcccaactgcccattgcatgtgtgcttgcggcagtctagatgatggactccttcagatgctcccacattccactgctcaatggcagctcctgttcttcctccacacgccctcttttctgtgagccgtggagatagccagatgttgtaacgagatagtaaatattttaagttttgggttccgtttagtttctgccacagtttcagcttctgttcttgttcttccaaacccaattgaaaatgtagaaaaacaaccgttcttatcaaagcaggaagcagtgtggagttggtatgggccttacactgctggcccctgctgcacccaactgtagtgaatggctacccattttcagctgctcctgtgagaaaccaggtcagccttattcccactcagaaaagatccattagcaagctgtcatgctttctttcacgtgagctagaatccaccctctacttcagagctcacagtgcccttttttatctataacactgtcctgtcttacctgtgttcattttttttaaaaatacagcatatttgtttcatcaggcgtatgtataaagaaagatagggaacaaatttgatgattttcctaaactgtgctcctgtgtgacccagctcctctgcttgggtctgacagggagatagcatctcgggcttttcacccagcttgctacccatacctgcaggtgctctgaggatgacaactccatctctagacaccccgcccccccaggctgtcacctctactctgctagcttaatctctggtgctctctgggcccctggaaaagtgtctgttgtcctcatcacctggaaattctgatattctttctgagggctttgagaattccactctcagctggagccattcaggtcttggtggttcttgcttttgttcacaggccactggcctgaggtgactcagctctgtctgctgtcctggtattcatccctatgtaggttgctactttacaggaggatgcagcgtcagggtcctccctccgaggggaaagtgtactttggtcatattcatgttctatagttctgtctttgatcatggtgggcaccataacaaagcagacttttatttaaaatagttttggtgactcttctttagatcaaccataaaaaacccaagctttgtttgaaaataccctactaaatcgcaataccgtgtgtgataattgaaacagaagggttttggcagtgctggggaatgaatacacacttggctgttgaacatcaaccccaccccctcaggcagaacggttttgaaggcatttggaaagctaatcaaacttcacgcacataccaaaaacgcacgttctgtaactgcaatgacatgagaggtaggacagagtttctacccgagtacaccccatgctctgtcaccagtaagaaatgctgctggacagcattctggctcttagacacatttcagtttcacagataagatgccaaaagtatgtatctcagaaatgatgaaagaacatagtgtagatgtgagcatgagcccaggggagagaaattgtccttgccatccccgttttctggggaatgcagtggcctccttgctgctgatccacttctgccctttaccctgggatctgttcttctgccatcagccagtaaacctattgcagcagaggctagatctgtcattttgggtccatagccctatctccaatatagtgatgcacattctttgtctcgtttcgtctcgtcccgtctcgtcccgtcccgtcccgtcctgtccctttcctttcctttctgttagttttctgaaacagggtttctctgtgtagcccttgatgtcctgagactcactctgtagaccaggctggccttaaactcagagatcctctgcctctgcctcctggccagttttcaggttctttgtgggatctgtgtgctcactcacctcctctctgccctcatctcttctaaccctccgtggtcttatctgctggacacattggtaggtctccttatccccattctgaaatactctctcttcccaacagagactttggtctttcctgaagaacatttctgagtgtgtctttcttgggtcccatgtttctgcagtctccccagatttccagacttgtctgcttctcacgctcctgtccctggctgtcttgtcaggtgtcccgtctagttgggcgttgcttcttctctggaggagctcccctggaagcaacctcatgccctttgctcctgtgagttctgtttctctctagccctgtctctctctggtgccctatagtgttcccttgttttctgtgtcttcctctaggtcgttagcccagcaagcaggcgtggtacatggtgtatttgtcttgtgtatgcagccccagaacagcatctgtgtttagtaaatttttatagggtgcagaaatgaaaagcaaaatctaatacccctcatatagagaggttgtgctatagcaccacttaaaaaatgtcaggtattcccttatcatttcatctcagatattgtgttaaatcaagtgcttgtgaactagggattttaaaacacagctgaggagctcactagtcaatgactcttcttggacatcttctaatgaagtaaaaagatagtgactcattgccctctcttctacctgcttgtgaatccaatttttcagacttattggcttatttaaagtgatatatccctgtgtgttgcatttctctttcccacaggagctcattacagtaagttagaaaggataggctgaacagagtgaggactttacttacaaaggtttccctgtcagtatcaaattgatctgttaggggcctgatcagtcgatggtatacaaaaacttagggggaaaccagagaccacacacttcagccttttacagtgatattcatgttgtagaaactagaggtttccacttgattcggtgtatctatggctgatgaggacgaatggatcccatggtactttcctattacataatcaagtgtgaatcctttcatcatgaaacacatggttgtttttgaggttctgtgctgattccttggatctttacttctcttagtttaaccttgttgtatctattcaggaagaactttgctggtaagatttattaagaggtgtttttcagacttcaagcccttgtgtaataatttgacaagctgacttggatttggaaatcagctgagttcagaaagtaacttctctcccttcacttcataataagagctcttgtaactgctccttagttggaatattccaggtaatgccaagatggtttcccctccctttccttggttttctatccactaagagaaagtacgattgctgtgggttaaagtgcatccatggctttaacttctcagagctgtcatatgcaggaagggcagaagaagagcatgcacccgcataagcagtctgcatctagggtgctgtcctgatctcatccttccttcctgtcctgccctagaaggaaggctaggagcaaaggtgggcacgggcaggcgacacatgccgcaggctcctgtgtgtcttcctgggctgctgccttaatggtgtagggagaaagtgagctgatgccaagggccaagaggacgactttggatgtgcactctgttaggtccctatgaagctctttttctctcggacttatgtgaaccacacgatctgtgaaaaataatcgagtctattgcacaacatgtgcctgacagcttacacgaccgttagcctgatgtgcagactgaggtctcaaattaagtgatgtagggttttcatgcagatggatgcctgccatggtgtctgccacttcagtagaggcctagtgccctactccttcctctccttttctttggttctgcaatattgtccaatgctggtcccttcctctttgtataaaaactgatgtgctaattacagagtcatcaccaggctcagtctgcacttgcttgaaattcagcttttttctttttcttttttttttcttttctttcttttttttttttttttttttgttttttcaagactacagagacgtcttatgccatatttttgttgctgcagctatttctgttctggtttgccgttgcactgcacaaattactgctgatgctcaaattatgagctgcggctctgcaaaactctggcagcaaagagctggcgatgctccctgcaggatgctctccttgctgtaggtggcgacctttgagtggctggcctgctagaagcacgaaggcagagcaggtagaaggtcatgtagaactctatcctctggcatgacacagctattggtgttttgaaacagtagccatgattacatataggaaacccttacaagactagtcccattcacattctgtggtaaaagggcagagaacatatgagtgttataaagtatattaagccgtgcccatccctgaggatgttcaggagtgtcttccattgtgtggctgtccctaattgcccaagttcatgtaagtaactacctaaagaccatgtgtgtgtgtgtgtgtgtgtgtgtgtgtgtgcatgtgtgtgtctttagcctttgtcttaggaagaatagaaatgaacaccttgggcaagtttaccaatacttcatgctatacagcctctttagcagatttataagtggggcttattttctctgttgctgtaacaatttggcaaaggtgtagtggcttagagcagtggtgggctcatgacatcatgcctctggaggcccacagtctacgatcatggtgtcagcacaactgcactcctttgtgaaactattgggcagagtgctgttctatcctgtgtagtgcacagatggtgagctctttgatttggaagctccttcctacattttgtgagctaccagtgcagtgttcttcagtctgtccctgcttcctcacatctgttttcagtctctgatcctcatgcctctttctccagatgccattagaccttctacatattccaggataggctccaacctcagacactttacttggtcatatctgcagacttcttttctctctgtgtgaagtaatgtgttggtttcaggtttgggaacgttcttcctttgtggcaggtatgtagcattattggcctgctaccctgggtattgggctcacaccaagtacgtggaccttgtacctgtttctctacatgccagggttctctaaggcacagtacttgacaatggtgggaaatcgtagctgaatcaccacgggaaagccaaatccaccttctcttgggcattctgtccttagggcacagagccatagagagtatcagtgtaggaaaatgccaaacactacttttctgaaaaaaaaaaaaaaaaagtaacttttccaaaaatttctaaaaatttacttatgcaaaaatcacctttttcagtaagtctggataaacagtcatgagacatttctactttattcctgtagatatttttactaataacagtttaggcttatggaaattggttctctaagaacttcgggatcccttcaagtctaaggtacgtgtagtttgatttggcagtgctgtttacttagcagacattgcaggcaagttgccttccatctgcaggcatctttcattgctgtggctttgtgttcaaatgtagtccaaatgccggaacctgagtgcaatggtttcaggtgctttgatcactgtattacttttatataaaactgtaaccagccccagagaacctgatgaagccggcacaggtgtggtaaaggcaaagataacagctattcttcacagtgaccttgtatatgtgttagagcaggcttagggctctgagttcccctccctcatgggcaaccgcatgtttctgtgcttcagatctgcttctgtatggcttcctgctacagcctgggggtgatgctctgctggctcccataaccacttgtgtactttctcttcttccatagcaggcagtccatgggcagcaactcctagaggtctgctggaccttttatctaagctggggcaaggcattgggtggccacagcccatgttcccctcctgcaaatctctccctgtcccatcagcatagagtaggtcaggtaactggccccagcgagggcctaagcaaggtgaaccatgtcttgtggaaccatctccttaagtttagacagtctgttacttcttttctacccttcagttactgtagcctttgtgtcagggggctgtctttgacatgcatacctttccttaatcggacccctccttaggacacttcctacctcaggacctttgctttgttcttgcgcattcaccactgttttactcttcaagtacttttaccagagatttgaaagtatgatatcttaatgtgttcatttttagcactctgtgttatgaaaaatgattagcaataggtatccagtcttctgggttataattggtatttatttgataactcataaagtcgagcaagtactgtacagattaaatgcctgtgcttcaggaagcttatgtaacatatggtctagggttttgtgtgcttgcttttgtaagagtttatgttggtgggctagagctgattttactttctctggaggaggtgtgcagtcatacattctcttactgggttagcagctacctgtgctggagctcttggccagttgacagaccctttttgaggacccaaaacagacagtggtttatcatgaaagtcctttgggctctacagagatagtggttatttctctccccaaagctggctctgtctacctagccactctctttttaccgtctatttcaacttaacatcacaaccccactggggccttcgcaataaagcagcctcaggaccatgcccttctcgcccacccccttcatactcagcactctataccagtaatggttcttggtcacattttataataatttatttgtattcttgcatttagttgatgagccccaaagggaccagctccatagtcttgctcattcctgtctcctgtagtcaggcatggctctggcatgtaactactgtttcatgtagccaggcatggctctggcatgtaactactgtctcctgtagtcaggcatggctctggcatgtaactactgtctcatgtagccaggcatggctctggcatgtaactactgtctcatgtagccagtcatggctctggcatgtaactactgtctcatgtagtcaggcatggctctggcatgtaactactgtttcatgtagccaggcatggctctggcatgtaactactgtttcatgtagccaggcatggctctggcatgtaactactgtttcatgtagtcaggcatggctctggcatgtaactactgtttcatgtagtcaggcatggctctggcatgtaactactgtttcatgagtgttgatgaatgactgagcacagctgccagactgcgtctctgcatctgcactttgtgctgtccaccttgcctctctctgcttccttcattctcatgctctctctctctctctctctctctctctctctctctctctctctctctccccccttcctctcattgtctcctttagccactgtccacccatccccatgcatactgattggttacttttaaatagttcatttcctggatcagctcaggtcacttgttttctggtggcttagtcctctgttgttagaactggagatgggacacaggccatgtcnnnnnnnnnnnnnnnnnnnntcatacctacagcttgactgtggagagggaaagagagtgtgttgcagggtatatgatcacactttgaaccccaagattgtattatttactgaaacaaacaaacaaacaaacaaacaaacgaacagtttctagttgtggtgtggctcagcccttagaacacacctttaatccctcttactagaatacagacatgaccttaattccctaacaatgaaggtaaaatcatttgtagcaagaagcacccctgtttgaaagtgatgtctaattgagtggcagaccaagtgatgaatttgacagaataggatatgccaactctcacaagaagagaaggaaacttgaaggacagtgcggggggtgggggtgggggtggggtcagctttattggtacagttgtacagagacaggttgcagaaagtgaaaaagctagacacaggtgaagacagaataagccagagaatgagaaggagccagtagattagatcagatttccagttagtttgaggccaaacagagaattaaggagagtctgagggaggggggaggacagttgaatcagtcagcttagagaggagtttgagccagaacagcagagttgaaccagccagctagagatcagaaagatctagagtataagtctcagaggctgaaaatattctaggcctagattagattgtccagaggggagaagtttccaggactaggcctaggttagcagacagaatcaggaagcctccagatgacaatcacatctggtgaataaaagatacttgtacaagggtgtttgcgcagccccagtgagtgctgctctaagttctcactgggctcatcttcactgctctcaattctcagcacctagcttgtagaatgaaaggcttacagttctggccccagaatgcccacagctgggaaggagctcatagctcagcagagttgtattagttaaccgctagccattttgtaaagtaagtcttctatttgacaaccctgatgacagcaacagaaagtataaacttccactgtcaggagcctgaaagtccagtgagtgagacagatgataagcatggtaaaaatcaataaagacatgctgtgttacaatggaaatcttgaaccatttcaagaactgagaaaacttgggaatgaaagtaaaaatataagtaaacaatgattcaggttctatacaaacgtcatgagcttcctagtacttaatcagcaaagtaggctgtggggactgttggtctatactgggtggctgtggagtgacctaggagaagcgacacttgaatgcaggtgtctgagccaacagaatgtggatgatctgagaatcgtcccaacaactgggaagaacaggctctggatgtgtggagtgcagagaggagagatggagtcatgtgactgaaggtccatgcagatgttgcaggctttgagatgtgttgtgtgtagagaggccaagagcttgtaggagactggagctaacagtcttttataaacacattgattccacactgcatgcacttgattgcagttattacattttttctcttctatccttagtctgtgtagacagccttacttagaagttaagcttggattcccttagagaatgccagggaaatgaatagcaagaggaaaggagggtctctactaagtagttggggtcccctgtggaaacgaggctccctctggtcccctgcatgtatcccatctcatctctcaggggctaatttttaggtgctcaccagtcctgtgctttagttatccttacagtagagaagagtttgtgtatcatgttttctcccgtagcccctgattagcagggaggaatgatcccaggaccacgcagggtgaaccagtcacttctcctgctactcttttctttggtgtctttttctaatgcacagctgctctgtgaaacaggctgagtttatgtgagaggtactgaccaccatggacggtggcagttatttcagccctcattagatgaaacgattctctaagctaggaggtagaatgtacctgggtcagagtcggggctttcttactcccgtttatgacctagaaaactgcttagctctggtttgccatccagaaacggatgatacttcctgcatccctggtttcagtgcccaatgggaagacatacacccagctctagggctgctaaaaggtgcctaggtggcagttttgaaaatcaacctcctcttttgctttgtcgttgttttctttcttgggtgctgtgtggtttgtatctgcatagagctgtgtgatgttcctcagccagtgttgcgaggtcattttaatccagggaagaagtagcttgccctccacattacacacaattcccaggtatctcttgctctgggaacaaccagaagtctgaaaatggcctcatgataactagttgtaaatctgcattccattgttttgattaggcaacaaggatcatgttaagtattctttggggcctgctagttggggctctatctattccctggctgggttgcccagggcggggatggccttttggagacacccactttcctgtgtgtacagagccttggatactaggacattccatttctttcttttttgtcctttttaatttttctcacttttcttcctgtgccccaaacccccacttcctcttgaaatcatggctccatttttttatttgttattgttgcactcctcaaacatgtgcccctaagtatataactgccacttgctcagtttgtttagtgttacttgcatgtatataatttcagggatggctacttggtgttgggtaaccaattagggggctcatctctaggaaaggcaaactctccctttttcagccatcctcaggtctgtagttctttgtctgtgggagcccattaaagagtttccttttcaatgttagcatgtctagtgaaattgtatttattcagaccttgtgtaggcagccatattgttgaggtatcatgggtaaaacctctctgtcatttttaagagacacaatttcactgcagcttttctggtcctctgctctttcactcttcccacctgatttccatcagtgttccccaatccttaagtgcaaggaatctgccgtagatgtgtcagttggggttagacatctcacagtcacttatgtgactgtgttttttatttttaattttagcctgttgtggtctcctgtaatcatttctgttgcaaagagaagcttctttaatgagcaatgcgagctacactgtatctgtcagtataataataaatatttaaagtacagttaagattcatgatcgtttaataaagtctaggtagaaactctcctctaagatccataacctcactagtgggtagttggctggattttcagtgtcagacaggatttccttatgctgagggaaccataactctaaatagagagttccttgttacctccaagatataagtgccactactcatgttactctgctatgatgactgtccttgttgctcataattacttggaagtactcattgtttccttctcttggaaatcacaccttccaatattaagaaagcttgtcctcagagtgcagcctttcaagtcagatacagccagggtcctccagttctttttccaaagtatattatgtcttcagccataaggacataccttcaacctctgtgtagtggtttggatgaaaatggccctcattagtctcatatatttgaaatagttggtccccagttggtggaactgtttgggaaggactgaggtgtgaccttcttggaagtggtgtgtcactgagggtagggtttgaagtttcaaaaaaattcatgcaattcttagtgttctctctctgtcttctttgtggatcaatatataagctctcaggtattcctttattctaccatcatggactatgaccctgtgaaaccataagccaaataaatgttttcaatcatggtgttctatcacatgggatatgggaaagatactaagacactctgagctgcaagtaagagcaacaataaagcctaaagttgaacaaaatacacagaagactatagtgtaagtaaagttatcccacttgagccaacccttcttcccccacaggccataggctatcgaacaaaagcccaatacttgaatctttcacattttagtcagggcactccaagaaacaacccccacctgcctgccaaggatttactttttaaagatttattttactctgtgtatgtatgtgagggaggatgtggatactccaggtccacctatatatccaattattggtggttgtgagccatttgacatgtgttctgaaaccaaactctagtcctctgcaagagcaatgtgtattctaaactgctgagtcagcttcctggtacttcaagagttctttttagtacttaatgttttagtgtatgattttgttttttgatacggagaagagttctatccactttccttcccctttataatagtaaagaaatcaagcattttcttgggctgctagagccacgccgatgttgtctcctaaaccataggtcagtggaaaggtgtgcacggctgaagttatactggagatatgtagaactacgtggcctgtgtctgtggaaatgttgataatgtatttaagaaaacatattaattgctctctaactataacttgcatactttacaagttagaataattctacagtttggacttgaagatttagtaaaatttaggtggagagataacttactattaacttactagtctaaagcacttgctgctcttccaaatgaagagtttggttttcagcaaccacattgattggttcatgactgcctataactccaactccagctccaggcgattgccttccttcttccatcctctatgggcacccaaatatacatgacatagatacatacatacccatgtacatacatacatgtgcaagtatatgtgtgcatttatgtatcacacaaacacagatacaagtaaaatctagagtctggaattcatacacttaagatgataagtacaactctagtattaatatttttgaaccatttgttttttggttgttgtttttgctggccgtatgaaaactgttatgtgtataagatgtaactgttttcttgcttgttttttgcccatttcaacttaataaaatgtatgaaatatagtcatatatgtctacacctagacattaggtttctgagatgaaaaatgcatggcagcccatcctgtgggcaggtagttactgtgtgtggggtgggaagcacactgtggtaaaatggttcatagggcatggttaagaaaagcctaatgctaaatggaatagagagagtgatgacatcagggcaagaccctacccagcctagcttccaacatgtagacagaaattaaagaaaagtttaagcagtgaaggaaaccattaatatcggggagctgacagaaatacatttgagtgacagagccaagttctagcctcagcaagtagcattgaccatgtggttctagctttagactcaagactaaaaacagggcttgtggaatttcccactgtggttaaggaaagccgagggcagatgtatgtcaggtgtgtatacgtggcctgcatggaagtgcagagaggccatttcatgaagttgtgaaggtgaagcctggattgtgttggagatcccaagatgttagagatgccagaatcatggggtgcctgccaaagagagctacaaagagggagtggaaccagtccatgacagagaggtgtgctgtagccagcaacgctgaaagcagttggcgatctggagtgttttgacatcagatttggggatgcagaatttggagattgccctgctggctttcattcctgctttgattcagtattttctcactgtgccttctttactcccttttggaatggtgatgtttatcctgcgccattatatattggaagtatgtgatctggttttttattttgattttataggaggttacatttaagagattgccatgagttgcagaagagactttgtgggctttgaagactgtgtaagactatgagaacttttgaagttggactgaatgcattttttctttcgttatgatatggctgcaagcctgttgttgtcagggagtgggatgtactagtttgaataagcattcatatatttgaaccagggaatggcattacttgaaatggattaggagttgtgacctagttggaatgtctcacctaggggtaggccttcaggtttcaaaagccaaggccaggttcagtatttcttcctgctgcctgctgatctagatatagaactcagcttcttcagcaccatgtctgcctttgtaccctcatgctccccaccatgatgataatggactaatcctctgaaactgcaaggaagccccaattaaattctttgttttatgaattaccttggtcttggtgtctcttcaatagagcaatgaccaaggcaatgactaatgggtggtgtctcaaatgttgggttgagggaagagatctgagtagaaggtgtaggtttgggcatcaagtgtgtgtccagactgtagggaacagtcatgtgcaatgatactcagaatgacaagagtgtgggctatcagtttatagagaatgattgatatggatactgtcaccaagatactcagtgactagtctgacacacatagctgctggtggtgtagtaccaaagaataaggctttttggtcagattgtcagcagagactcaggtagtagagtcatctactaacaccaggagtgacatctaccattggtttgacctagtggttactttggtaggaacaggtatcaataccagttgtgcctttgctcagtttgctttgacttcaggggttcaaaataggggagaataggaaatggaactatggagaagtcttgttagtctggtctattggagatgtgtggagttccccagaggagcaagaatttcttagaatcctgagaaatcctcaactactgctgaggcagtagttgtatttgtgtaatgctggcaccagtaggaccattttctactgaaggaagtaggccatacttctgtttgattacttatttgtatgattgcaaatggagagtttggttactttcatcgggagcagggtggtgtgttccacatatccatctctttgttttaacatgttcacccactcacctgattgttgactattgctaaaacagtgatcttctctgacgttgtctttggcacttttgaagttatgcttttggctctcctaccagcatgggagctgtgtacagtgacctttctccatgtagaaagtcattctacagattcctctgctgctcaggatctcctcctcattgagatgccccagatcctcgatgttttgctttcatcttctccagatcaacatgtgatttactgtagactgcacacttccgttccaggaggaacatggggctggtgtttctgaccatcgtgtagcctttcctgctgctcttgtgttctctctctctctccctctctctccccctccctccccnnnnnnnnnnnnnnnnnnnnnnnnnnnnnnnnnnnnnnnnnnnnnnnnnnnnnnnnnnnnnnnnnnnnnnnnnnnnnnnnnnnnnnnnnnnnnnnnnnnnnnnnnnnnnnnnnnnnnnnnnnnnnnnnnnnnnnnnnnnnnnnnnnnnnnnnnnnnnnnnnnnnnnnnnnnnnnnnnnnnnnnnnnnnnnnnnnnnnnnnnnnnnnnnnnnnnnnnnnnnnnnnnnnnnnnnnnnnnnnnnnnnnnnnnnnnnnnnnncctccctccctccctccctccctccctctcttcatctgtccctccctccctctctctctgtcttcctctcatctcttctgtccctccttctctcttttcctttcttcaatctcccccttttcttcctctttctctctatctctcatgaacacttctcttttttcagtgtcctctggaggtggctgggcattcatttttctccctttaggagtctgctgtaacgttactgttcagaatcttcctagacaaagctggccactgtcttccttcagtgggtgagctccttcttgctcctccttgctaacaactgaccatgctgccttgtgtctgtacactgccttcttgatcccctctgagaatctgctttcctacctggcaagggacacctgtgtgtacacagtccctttacatgcaggagctaccagcctggcaatgatcactttgtcctccgcttcattccagggaagcaattcaagtgcacggtgtgtgactacacagcagcccagaaaccccagctgctgcgacacatggagcagcatgcctccttcaaggtaagaggtatgcgaggcggaagtgggaaggacgcaagtggacacacagcacttgtggcattgactttgctttccagccctttaattgtcatatgcggagtttactctgtgctccctcgttccataagcatagagtttctctgtgttttggaaaccaagacaagaaacagtgttcaagagggtacagacagaagacaaggcatgtccttcccgcttgaaactggagtcagttttgaggagtgtgaagtatagacattgggaggcggatctgtgccttcaggtcttagattcctgcaggtaaattgcctggtaaacagttaaagcccacctggcaggcttctatatgagtggagagcattctggtatacccactgtaggccctagcacagtgcttctcagccttcctaatgctgccatccttaaatatagttcctcatgctattgtgattaccaaccacaaacttattttactgctacttcataatggtgattttgttactgttctgaattgtaatgtaaaaatctgatttgcgattcctgtgaaagggttgtttgacaccgctcccccaagggttcataacctacaagttgagaaccactagcctatcatgtgcaggggttggaggatggagtccttctagttttcctaatgcttgtaagtaatgttttttcagcaggtttggtagcatctacttagccagtctctcgtggaattttgcagaggaagaaagatgacccactgtgtttctcaataaaaactctgcatatcacttaagtcatcttgacccttgacattgttacatctgctgatatgtgctcagagaaattgaatttttaaggtttgtgaccattatgctttaaaatgctttttgaaatgccttttatagaatctcatagaattgtctaatctggaaggaatgttggtcgccacatttcgggctttctctcattgaacttctcaagctctggctttgtgtaaggagattcctaactgtcaccttagggctcccaatggtacaaactgctgcccttgcttatcagatgagaaacccgagcctcagaattgagctgaccagctgtagtcttttctgccacagactctgatttcagctggtgttgtcatgttgaccttgtctgtcatttgtgaggtgagaaggaccttctgcagcagcaagctcatcctgtgttcagaacagcttgtgcggcctcttaggacgtctcctcatacaattgaaggacttaaagcactctgagtgtgcaggcatacgcttttagcatccagaaaacaaaggaggcagaacttaaactacatcctcccactgttcagtgttcttcctgctgtatcttctcagtgaatttgggcaggaggggagaactggaaaggctataatcatgaagacagttttcaggtgaacatgacttgctacggtggaacccacatatcaccaggagtagtaccatatgactgaatctgttaagtcttcagtttttatccccatttttctatgtaattaaagcaaagggcttaatttcatgtcttacgggacacaaacgtgtttcgccgggagatgatactccaagagtagtgtatttaccatgctagagagcagaggaccaaagcagccttctgtctttgtaaatgaggaattaggtcagctgcaggtaattcttctatctgtttctgtctcagtggcctttgcagtcattcttggtttacactggtcctgatgagaatagatgaaacagtctttagccctgagcaaaattctcattttctaaggtttttgcctgtggcttatgtgctcgtgagaggagtgtgggatttattctgttaagcatctacacaaacagttaccatatatttcctccactgtatctttggcatccagtgcagaacctgttgttgctgcatttagctgggtcctgggccatggctggtctcccccagactcccagtgtattcaggatcctctttatcaagtatccatagcttagaatgaaactcacacatgttgtgcaacaccacaggcagccttggtctctcgttctgtagctcttctgtgtcagtttgtctaagtggaatttctcagttcacagaacagcatgaagttgttccacaccatcctctatcatccagacagtagtaatcactcttctgtattctcccctctcatctcaggttcatttcctcttgctaaaatggattatcaccacattgtgttgaaagaacatacacattttatgattctgtaactcaaaagtctagcatgctgctccctctgcccccaagatcaactgtcaatgttggcagggccagctctcagacccatacccttgtctttcctcactgctagagtcacctgcaagtggcttatagccactttctctatttcaaagccagtaacatggcatgtcccctcacgtcttctgctctaaatttcctctctgacttttaaagatccattttgggctgctggtgggtgatgttggagagatggctgttggggaagtactgtgtagaacgagcatgaggtccttattttactccccggcactcacatgaagagctggctacagtggtgcacgactgtaatcctggcactggggagacagagacaggcagatccctggatcatgatccgcatacagtgagctctgggttcactgaggaaactctcagaacataaggtgaaaactgattacagatgattagcaacctgacgtttacctctggcctctgtgtgccctcaggctcacatgcacatgggtatataaacacacggcatgtgcacacacacagggggtggggggggggnnnnnnnnnnnnnnnnnnnnnnnnnnnnnnnnnnnnncagtttccaccaagtaaatcagaaatgacagcatatttgtaatcccagcactcagcaaattggacacaagcaggcccagtattcaactttgactatgtagcaagctcaagcaccagcttgggattcaggacaccatgtcccaaataattaaatatttaaaggcccctgtgatgacacaaacacagcccaagtaaagtccttacgctttggttaggtgtctagtgaccttagtttctgattcctgtcctttagttgttactgggttttcttcagtgacagggatgaacccaggtcttgtacactcatagaaagcactcttaactgagctaatacccccacctaaaccctgtagtcttcattccttttaaacagtttcatggatgaggacatgagtgtcttgagaggggcactgttctgccaatcttcccccccacccccccacacacagtttttcccttcacgtctgtctgtggaggagcttttctatggaggtcagaaaaaaacatttcatctggtagcgaatgctgctaaacacccaagattctctttttctctactattcagtgtgggcagggctcctcaggcagatactactgaacttttgcagttggtttgcaaaatgaaaacaatttgcttttcctgaggtggatttaataatttatagtgtatggcttgtgacaggaaacactggggtaaggcagattcctagattgttttttaaaaatggcatatttctgtttatgtatttatttagtattcattaaataggacttgaaaatgcttataaatttcttcctttatataatctagagtgcttttgaagcatttttaaaaagatgagtttgcagtccaacagtaaatgagatttttttttttttgatggaaatgactgcatcagcgttaccactgataaagctttgctgggctctgtggcatagctgagtgtcttggtggtttgctaaacatactgcacttctgagtcagagctgatggcagagtagaggaccctcccagctgaaggcagggtagaggaccctctgtgcacttagaagcattgcgttccattgagtacctccagtcatttttacacttcatgaaggagatttacaagctccttgtcactgctgcagaagtattgggttctacgctttatttaatcttgcccctcacaattgagtcattcggttgctcccagcttgggctgttataaattactgaacagtgggcatcttcatgcaggaagcattctcatgtctcctaaaatctaatgggtgataaagttgagagccaagctcattacaccactgagaaatcacagatattgcctgcaatcaaaatgcatcctcagaggcccagtctgccttgaccttgcatggcttagggactgacctaactgtgacaacaggcattgaagaacaacaggcacacatagagaaaaactgggtttttatggtgacacaccagcagctcagaaattcagtctgtctgctttataaatgtgagtcatggaggtgggtttattatatataggtgaagtgaaaaaggaagcaaggttggctcatctccataggtgggtctctgaatcggagcagtctcaaactagaaatatcaaggaagaagaagttacagttcatattatctgcatagactgtcaccatccacataggaaccaggggaaggctttgccaattccctgagcctaagcccaggaagcctttgccttgggtctgaggcactgggatccttgtcatagttgtgctcaagtcaatgatacagctgccctcaggacttacccacttcttacatattctctcagggttcctccgctcctcacaacagtcaacatgcttgacgttagaggagtgctggaggaggtacctggttgtgatgctcaacccccaagctggagggtttaaacagtggcctgggcaccatgtttagatgtatgatgtctggattaaatgcatccaggaagagttggttagttccatgatgttcatgccactgtgagaccagtgagcacgcatctccaggtgagttgttattgtagctcaaacaaactgtttttaaatgaagtcttgctttttttttttcatttttttattagatattttctttatttacatttcaaatgctatcccgaaagttccctataccctccaccccaccctgctcccctacccacccactcccacttcttggccctggtgttcccctgtactggggtatataaggtttacaagaccaaggggtctctcttctcaatgatggaaggagttacagagacagagtttggagctaagacgaaaggatggaccatccagagactatcccacccgggggtccatcccataattagccaccaaacgcagacacaattgcacatgccagcaagattttgctgaaatgaccctgatatagctgtctcgtgtgaggctacgccagtgcctggcaaatacagaagtcttgctttttatctaaagaggatgtttccttttgtaggtgttgcatctatcactccatacaaagtttgagatttagattcttaattcttttgagtggtacatcctttgatctaaataccagttctgaaaatgtagtcctgctgtactttttcctgaggtgagagatgtggtgggtgtggagggtgctgttgctggaggttgtgcaggggagagagagaggaggagcgggagagagaagtgaggggatcaggaaaagaagtggctagacgaatatcacagaaagtcaagtccgccatggatcatagcctcacatataaatggttgtttagaccagtcttactgagttgagccattctgtccttccttggactatttcctagcttgattgattagctcattcattcaaggaaactgagatttctcttaacatactttgagatatcaaagtctcagaatgactaagatgactttaaaattcaagggaagtgctgagcagctcaaattattttcatatgatgattttaatttatcttttattctgtttttgtttttgtttttgtttttgtttttgtttttcgagacagggtttctctgtatagccctggctgtcctggaacttactttgtagaccaggctgacctcgaactcagaaatctgcctgcttctgcctcccgagtgttgggattaaaggcgtgcgccactatgcccagctttatcttttattcttatgaagagttttctcataggcaagtatggaacaagaattggtcacaagcaagggaataacttgggtacatgataaaatgttcaacttcattgattgaaaaaaatcagcaaaaccatgcaatgattatttttcacttgtatcaataaatatcaaagttcaagtacacactcccttgaaagccatgagggaatagcgctgttcatataccattgttgggagtaaaattggcttgttcccaaaggagatgcgtgaagcagaaactgctccaactgcaagtgtgtcacagagtatgtaaaatggtcacttgtaagaactcatctactccatagatcttggctggtatatgaaccaactgtgtagggtcatttatcagaaataggtaatatatccatcaatagggtactggttaagtaaaaaaacccagcaaaatacaacagaatgatttgtagctttaaaagagtctaaaaatcgttctgctcacttttatagagagacatttaatctgtataagaaactgtaaaaggaagattaaaaatgataaaaccatatttcttatatttactttcaaggctctgtgaaaacaaatgcaaaataaacagacacagcatcaattgaggagggtaaggatatgaactgagcatattggaagacagggaaatagtgatgtgtggtgagtgtacacatgcatgtttatatgtgtggggcacatgtgtggaggttcacatatatgtgtgtatgctcatatatacaatgcacctatagcttgctgttttggcagcccatcttgccctaggaatccctggtctctgcctcctgtatacttggattacagattatcagtcacgcccacatagcttctgcatgggtcctgggaatatgcgctctggacctcactctcccagggagctcttagcccactgagccatttcccccaaccaatgcttgatttttaaactgtgtgaactgaatgggtcacctctttgatatataggtaaaaatcataacattgtaagaagaagaaaaaaaaagatatcttagaaactaaagtcaaagcaggttatgagctgagtgtgagcatgttcctagtctttggtgtcaaccccagagtagtgaggtgccttagaaactgcaggatttacagttgagttagttccttgctacaccacctgtaggctgtgtcatttcactcctttctgtaaatcttatcacctgtaaaatgctgatgtggtctccgtttcccggtgttagagatactaaaagcaatatcatttttatgagcagtgggtctggtacatggtacctggtgggtgatcaaaggatgctggctccattttcttttctcctgtatctcttgaaaatgactctaatttcccaaaagtacgaaggcaaggggtgtaaagcagcctgactgtgcccatattctttttgtttgagtcaaactgtgcctgtaaagcacctactctaatattctcatagatgttttgcactttattcatttctagaaactagtgatctttttgttgttgtgtgacttgttcatcagcaagtaagtatattagggccataccatggggctgttacttatcgacgaggagacctttgtggggctcctttactaacctgagccacagtttgccttgttgaaaactatcagtaatctaattctttccaaggctgcttttaggagggctgctgtgaagagactggacagtggctctgtatagctactgactctggccatattcatgaggacagctgggaagggtaccagctctcgctctctttctccaaggcctgttgccatcttccatgccaatttggcttctctgtagtcagtattgtaatcattattggatcttggaaatatgtagtgagtgaatttctaaccctagggactgttctcagtgagccagagccattcttcttgactgagacgacactttcctacatggtgatggtgccaaagcttgcaaggctccaaagccactgcagtttctgcagttaacagccagcgtgggatacggcagttcgttgctactgacacttcaccattgacacattattaaccgcatcttatgcttcacattctttcctttttatctgatgtccctttcttgctttaggatctcaggaggaaacaatattttactaagtatcttatattttatagctctgtttagatttgacagtttctcagacttcttggttttgatggcattggaagagaatattctcccatttaggacttgttgaccttctgtgcctcccccccacctctgtgtgtgtgtgtctctgtgtgtgtctgtatgtctatgcatctgtgtttaagtagttgctgtggatgctattttttaaaaaactgcatatggtttcaaataataattattttgtgaacataaaaataaaatccacaaaaactatatttctccattgacaaacttatactttagtatcatttatattatgtttaattaagttgttaactcttcaatacagtgctgcttttgtttcaaataaccagcaatatttagggaaaattcaaatgtacatttgaaaatataattcttaacattttaaagttaaaacattaaattgaaaatatattaagaggtgtaaatgtcaaatttacctatatacttaacccctttcccttgcaggtctgaactttggtcagatacactattttctggcctggaacatttccttgagcatactcatgatactcatgtgctagacagacttgggttttctgtttttctttgataccgccttcatttgtacagagtatcttgaaggcagaggcaggaggagcagacaccatcaggtgagggctagcctgctctatacactcatctacatactgatctatgtggcagaggcaggaggagcagacaccatcaggtgagggctagcctgctctatacactcatctacatactgatctatgtggcagaggcaggaggagcagacaccatcaggtgagggctagcctgctctatacactcatctacatactgatctatgtggcagaggcaggaggagcagacaccatcaggtgagggctagcctgctctatacactcatctacatactgatctatgtggcagaggcaggaggagcagacaccatcaggtgagggctagcctgcttgctctatacactcatctacatactgatctatgtggcagaggcaggaggagcagacaccatcaggtgagggctagcctgctctatacactcatctacatactgatctatgtggcagaggcaggaggagcagacaccatcaggtgagggctagcctgcttgctctatacactcatctacatactgatctatgtggcagaggcaggaggagcagacaccatcaggtgagggctagcctgctctatacactcatctacatactgatctatgtggcagaggcaggaggagcagacaccatcaggtgagggctagcctgctctatacactcatctacatactgatctacgtgcaggctgagccacagactgagtatctggggaacatcacaacgagatacttttcttttgctctctatccatcactggtttgaacttctctgtcacgggtctttttcttcaggctgactcatgttttttctgccctattttgttttgctcataagaacactaggaatcaaggtaccctttgtgtgtaccggacttgcagttggtgaatctttgggtatgcaggtggtgtctttcatcagctggacacttctcatccattgtctccttaaacacttctctctgttcatttgttccctgtccctctcttagggcagtaacgcccatgtcttagattccattactcagaagatctctcacctcctttccctttctgtccatctccttctgtgtctttgtgtctcagttatttttcttggcctttcttcaagatcattattctctgtctttatgttgtatatgccgtttgtaagactttcaaataaagggttttagtatttaaaaattcctagcattttcatttggttctttcaaattggctctagttttcttagcttttttcatctgtccctacaagttctctctttctttccagagcctttcatacacttattttcatagtttattctaataatgtcaacatatggaatctatatatcaatcccatccccattttgaggttacattgccttgctcctctctctacatatatcagaatatttaatagatcaaatattatgtttcaataaataattaagtcccacttaaatactagttgatataaaaaatgtaagtgattttaatgtgcagtattgtgcagaagaggcaatgaagcaaacccagctgctcttatgagaggttagcttaatggttggacttcacaaattcctgacactcgggctgaaaagaacttattctgccttcattgtgcaaaagatgtggtttatattggagacctgtcttccttcctggagcaagtcctgtaaccttccgaagttacctgttgcttagcaatagaagcagtatatgatctacctctatacacatgaacactagtaagaaacttagtaataaggactttccatgtgattctcagatgctcatatctgtcctttctctgccttcttcctggtcacaggaactcaccttgacggcacatactctgtccgtcatggtcccattactcaacattcttgctatctgaggcaggtgccagctgttcttagagtcatagtcacatgtcccactggtttgacaagtcccttaatggtgcgctctaacacataaatgtgccactgttgtgagaacttttcaccaggtgtattatctgtatagagtgcttgtgaacatctaggcatttgctcctcatcagccccaccccttcccactggacctactgcccatgctttccagttctgcttcctggcaaagatcaggctctatatttccccactgtcctctccccatcattgctgcccaccagtgctttcatcacactgagacatattgcaagggctcagtacccaagagactttgcacattagctctatcctctgtagagttccaaggtcaccaagaatctcctggcctctagagaataagtttaaagaaaaaatgatgtgtgagttgtgcaagtctgcaaagaaaaattcactctgaagtcagcaatatgtaccttttggaaactgttcagggtggctgaatgctgacccatctttatttagcttcctctgtttctgacactgtgtgaccttcttggccattggccctttcctttttgtggtcagaaagcccttagatatagctgaggtcaggagttgacccttcaccttgacaacacactgtcgaatttatatttgatatgtgtttgaatgcggttgaatccttgacagtcagtgccacaaaagcccaaggaatctattgctttattgcagttgaaaatttgcctagccacagcattgtcgcaaaactgataagaggttaaggtgaccttagtctctaatctcgttatcactgataaacgtctaactcttccctctggagtacactgtaccactgctcagcagtcacaatgttcaggggcaaagtaaggacgactaagggattcaatttttactggatcttttgatgcaatgtaagtgagatgatctgggaaccagacccgtctctgtcaggcagtgccaggtgaacaggcttctgggctgagctcaagcctctgtctgccaggtttgtaggcctctgcagagccaaaagtgcatcaaaaataatagctgttgcatggagtgttaggggaaagttatgtctcccaggagctgtggaaactcagaagaccagcacaaccatcattctcatttttcaattcttctttcagccaagttaagattatattatcctattgcttaaaacccctatttttggaactgcagcaaaaagattctccactgattgataaccacaagtcaaagggaattcaagcagcacttagagaaggaacagatgaaagggttcagtgtgcacaagtccatcagcagtgtactgacatgtagtgtgggtttatatgtggggagaattgagaattgaggtgtatatttgcataactgagcacacctgctagagatgtgatccctctgagccttgtctctgcatgttctggatgtgtctgtcgtacaaggtggtcaaagatgtccttattgcctgagaggccagggtgcctgtaagagggttgctctgctccgtgctgtgacctcatcctcatggagagccactataaagtttttcttgcctaggaatctaagtttattcaagaagaaagtctcagaataatgacttccttgtccatccaaaatgatggagacagacaggaacaaagtcagaaatgcctggctttcatcctgcgtttataaacagttgcttcagaggtccaagttgcagagccaatgctctttaacaaaagcagttttgaagtgcctgcattttgatcatgaagtaagtgccaaaggcctttgtgatgtgacaacagcaagctgcagtgagctatgtatatagaaggccagggccatctgaacacatgaggacacatacgcaatgttggacagagagagtctgcaggatgacgtcagccaaggggattcctgttgaaataagttactccgggttttccttctaacccttgtaaggaagaaataaagggataaccgtgagtaaatagaagacaaacacttgtaagctgttcaagtttctagtatctggagtgatctcactcagttgtctgacattgctgtggaaagtgttttatatgcacactttaacttgcccggaaaatcccttaaggcaagtattaatatctccattttatagatcataaggttaaggcccagaacccaatgaaggggcatgcgttaggagtcctggagctttccagagatgatgctgcggttttgatgtctttgggtcttgtgtgaagtcatttggacataatgacttcatcagtctatgcatttaaaggacagtaactttttacgcctttgtcctttcccttacctgatgatacttatccacaggtatatgtttagctatcaaataacaagctgactaagttaatagctggaacacttaccagcttccgtggaaaccacagttcaggggcagcaggtgaagactacgtgtggggtttctgtggcggtatctgaccttgaagggcagtaaggtctctgatactgcactcacttttctgtttcctatgagtgtggagatgtgtgtgggaggaagaaagggcatgtgcacctgggtggcaccttggccctttgttaaccttgttaactggattccaactacagagcttgtgctaaagaccttttgtgtcatgttcaattctgttgtaccttagatttttttttacagcatctgtggaaaaaaatggaaactggataggttcatgttaaactaaagtcctatccatctatgagtatattctctgaaaacactgcattttttcacatcacaagtgattacaatattaataataataacaacaagaaaatagaatcgataaccagctaacactaaagagtcttctaagctcctccaccaaatgcaattagtgtggattgatttactgttacatattgtgatgagttaattgcctcaaggcaagctggctttgaacttgtggtaccccacagctttataatatttattcttctaaattgtttaatttgtctctggccttatttgaaaactgagctagctttgtgcttattaactgataatgatgatctgactcctgctctttggatactgaccctggcattggttttgttcctgccacatttgacccagtgtagagctgagcaccagctttggatgatggggattcttaaaagagacaaaagtatgagcaaacttttaacccttggcttgctaaacttgtctttgagactcccaacacaacacaaagcttccaccatgaaaagcccgcccgtgttgcagggagtgaatggtattttcattgacacccatatcctgtaagcctcagacgtccttgtatatcttggtacaaaggctagtcgctaggaacaagagtccaggaaagcctccatcattccctgtgcttctctttgtaagtcccatgtctgtctatatccaattgctcctgtccttctgttgctcttttcctgtctgtctcttccaaaactccatacatatcagtatgtggtcagcagagtcacctgtcttttggcagtactcacaaggaaagcgtggatcccacccatgactgaaaatcctgccacccccttaccctcagcctccactcctctaggcagacccaatatggccatgtcacctggtcccctgctccatgctcagcttatacctgctccacacttttgctctgctctgcttctagatggccacagtggtctcctctcctttagtttcaagcctcctgctttgtttctgtaggttaaatgatatctcctttgaagctttggtttaactttttgttctactaacgactctggggcagcactttctaggttgcgcatgcgtacacactctgcagatcttttatatttctttttacacagggactcacttagcccttgctgacctcaaacttgttatgtagatgaggatgaccttgaactccttctcctgcttccatcatcttcgtccgggggttacaggtgatgggcaccttgcctagtttatgtgatgctagggatggaacccaaggatctgtgcacgataggcaagcactgtgccagacgagctgaattcctgagctagtctgctggtctgtatggtgataagctgacttcaagggtgagtgtgggattctgagctgctccaagaccgcagaaccacaaaggttcaggataccacacaccttttattatgggccattactgggctcattctcatttcatatgtagccttgagacctaagttcttccttctcacagtagtgagaactttgagattctaatggaatgaagcatatgggagtgctttggaagtgagatgctctgtaattgccttgctctgagcttcagtgagtcaggtcctagttagtgctaagcctcagagcagttatgcagccagtgtgcaagggtttgtctgtttttcagcagagaggaagttaaatatctgtaagtgtattgttttctttgttgggccctgtaaaccttgtttcaccaatgttaaggaatatcaaccccaagattccagtgaaaggcgcatgttcgatgcattctagtgtatcatctggaaataaggaaaatgtagttaatgtggatcttcagttttgtggtagtgttaatcctgtctggcctgcagtttccagtcagcaggagcacactggtgcgtaaccagcattccaggcaggggctacacaaagtcaggtcaccacggtgcggctagggagaaaagggaaaagaagcggctgatggtgtcactgccagttttctaggtgttagaagtaccattagcaaaatgacactgccacgtagatgctgtaatttgagacccagcatcatgtgtaaaatgaaaagctcagtctagtagggaggttgcaccagtcacccagctgatgcagcagcaggagagactagctgaagtcacactcatttgcagtggcctggattgatctgtgaccagctccccaggaggatgctacctttggagacctttggagtctggctcaaagcctggtttggtagtactatctgggcaccctctccagcagcccctacctcccaggtctcatctgcaaaatgtccttgattttttcaccctagatgagaagcaggcaggacaggcttagtggccacttcgttgcttttctctctgtccccattagcagattggagtcccctcatcttctgttcttctgtcactgcaaacataaacaggaaggacctcacgcttcaagtgcagggtttcagatgaaaggaatgctctgtgttctgttgctttacatgaggccttttgcatccacaatgcccatctgagccattggtgagagttatttcataaagtgtctgtgtaggcttctgtgtttatatcaccactaatccatccaacaaaatgggcaaacttgcctaaagttgtacagctcttaagaggcagaacccagattgagtttaagtatctctgataccaggaactgctgacagtcaaagatggtgagaaatatcccgggccacagacctcttctggacagattgttgggaacacattctagcagcatcagtcctggaccatgctcaagaaaggcaatccaggggcaccccgcacctgaaaaggctgtcagctcacccccatctttcctagaatctgattggatagaattatcttatatgaagtagtaactgaattaggtctgggagagagatgaaggctgaattcaaagttctcaggaatgtgggagctgcctcctccagcctagctgcatcttctcaggctaccttaatgcaaacttgcgttttaggagatggatggctacatttgatattaatgggacagacaccatcttctccaagtactgatgtaaatcttacatgtgtctcatttgactccgaagccctggggagtgcttgcgtaatccaaggctgctggagcgtgagtgaggctgagggtgggcagtgcagatccatagttagtgtccgctccaggcatgtgctcctgctgaaggctcccctttgtaccttagggcgtagtgatggtgaagcacatgtaacaataacaaggcaatttttgtggtacaaattaaagaaaggacatctagaagtttcctttcatggccaaacagaggccatgttaatagtaatagaggcagccactcatgttctctgtattctgagggtttcccaccaaaccttgcacaggggaattatgtcactgagttcgccattagtcacccaattcttttctctattcttccctcaactctttctgaagttgagtgtatatccagaatatcaaatactatatgaactatgtaataagcagatcatttcctcatcagatgccctctggggaccttcctgagcttttgcagtctctagcccaagattgctgcttggttgtttttttttttttttcactctgtagttttactgtctaatttctctgcacgtatgtccagagaaattaatctggtcatgaacatcttaattatatgtatgcatacacacacacacacacacacacacacacacacggttatgcgttatttatttttcaagattttcatacattgtacacagagtcggtttcctccacatcatctccctcccattactttcctccattaccctagatgctttcagttcaaccctcatgttgcatatatatccaggacatttggaatgcttgtgttgagctttgcttcagccacacattgatgagacaggacagggatctttcttgttcctggttctaatccactcattctttgcagtagccaagtttactggctcctaagtccagccctggccactaggaaagcacaggtgattattnnnnnnnnnnnnnnnnnnnncactcattctttgcagtagccaagtctactggctcccaagtccagccctggccactaggaaagcacaggtgattatcgtctgacgtggactccatagaggagctgccggccacgggggcaggtagacatgctgatggcagagttccccggtgggaagaaactcattcttctgagaaaacttggcgtgtttcttgacatgcacgtgggtgtacagtgagctcatgagcatgtgtgatgtgtgtccactctcaggcacaaggtagcacatgtggtgagttaacatactcgagcagttatgaacatgtgtgacgagcatgtccactaccaggcgcatgtactgttagtaacttgtggatgaaaagatgttgttagaatcttcagttttggttcaaatctgtgaagtgtgactcacagcataagtgaagtccttcaccccaacagggatcgtcttcagtaggcatgggaaatgttttccgaggatgtggttctgtgaatcatgctttgtggatgcggtataattcctctgcctgtagtcagtgggtcagcactgaactcattttgaacttctttattcatatgactttggctcattgtcactgtgtcatatatcactaagacaccacatcccctttttttcctagtcctatggtgttaggatcaattgactaatgagactatcaaggaaaaagacacagtgtggcctacagaactcaagcagaaagaagtgaagtcagaagggcagagatgccgacaaagaggagcatgaggtaccctcagcaggacagttatgtctgcccatcctcccttgaagttgccttaaagttttagacaatagagcagggtgaggtggggtgtctttagagaaagaggaacagcctaaggatgcaagttgagcagccgggtgatacagtgtggaaggagctatcaatattaaacactgcctcgtgtatacctgacagccacagacgatatcctgagctcatgtgggactttgtacatgcctttgccaccaggtacactaactgctttgtcacagagactctgaggagatcatgtgggctgtgcctgtctgcttcctggcaagcttgagcagactcaggaagaagtgggggaacttgtaaaatgagtggtgggtgggtaagaagtagtctggaatgtagtcctggacatggtacatgaagattagggcagagtgaccataagaaaggatatgatgtgactacatccagtgactagaggtaactgtggagagcagtgtggccagagctgtgggtagacacagtgcaggcgagcccgagaggaaggtgccattcctcccactgtgcagtggggcacaaaagcttgatcagaagcacacatggtctacttcattgtgtgaaaagattgctcacaggagatcagtgtagaaggacgactctggacaataggggagactgggacccacgagggctctcccatggccctcactgcctgcctaaactctcttttccttctggctgctctgaagcagaagttcagctgtgggtggtggaggctgnnnnnnnnnnnnnnnnnnnncatacattgtacacagagtcggtttcctccacatcatctccctcccattactttcctccattaccctagatgctttcagttcaaccctcatgttgcatatatatccaggacatttggaatgcttgtgttgagctttgcttcagccacacattgatgagacaggacagggatctttcttgttcctggttctaatccactcattctttgcagtagccaagtttactggctcctaagtccagccctggccactaggaaagcacaggtgattattgtctgatgtggactccatagaggagctgccggccacgggggcaggtggacatgctgatggcagagttccccgtgggaaggaactcattcttctgagaaaacttggcgtgattcttgacatgcacgtgggtgtacagtgagctcatgagcatgtgtgatgtgtgtccactctcaggcacaaggtagcacatgtggtgagttaacatactcgagcagttatgaacatgtttgacgagcatgtccactaccaggcgcatgtactgttagtaacttgtggatgaaaagatgttgtgagaatcttcagttttggttcaaatctgtgaagtgtgactcacagcataagtgaagtccttcaccccaacagggatcgtcttcagtaggcatgggaaatgttttctgaggatgtggttctgtgaatcatgctttgtggatgcggtatgatgcctctgcctggagtcagtgggtcagcactgaactcattttgaacttctttattcatagggtatattgtcttccattttgcttctatgcctccaagaatcctgggtgactgacttatcatgagagtgcagatgtagccaggaaggaatgctcctgggtcacaggtgcagccagcattgttcctgtgttccttgggtgctgtccaaggtactgtcatgtcagtacactgtagtcaaaggggactctgctcctaggagtacatgttctcttgggagtgtcagatacaagcagaatacaaggctaattgtgtgtcatagtccaagacagtgaacgtcacaaaatagtcattgagtgaaccagtttcaagatgtaaggggataatctctgagctcatggagcaaaactgaaaaagaagtgtgtgtagacacctgggggaccaaggaggacatccgagttgctgtgaaaatcacttgctatcataactcgggatgcaagtcttgtgatggtggtacaaacctttaatcccagcacttgggaggcaaaggcaggtggatctctgaggttgaggccaacctagtctgcaaatcaagttccaggacagtcagagaaactcagtttcaaaaaacaaaacaaaacagacaacaaccagccaaacaaaagcccccaacaacaataacaacagaacaggatggaagaagagcatagagagtcatggattctggcagtggtgatgtaacagggtacttgagcatttagcattactgtcagggaaatggtctccctggccccttacaacaactgttctgacagtcattttaacccccatacttcagaggaagaaactaacacatcagggcgtggaggaaaatgcttaaggcccatgacttataggtgacgatggcaaccttttacctgacttattgtactaacagggcatagggacgcagaaggtcaggtatgtcacagtcctgccatcagatcttgtatgccattagtgctcacttagtgctgggcagggtcttgttggatctttagccaggattttggaattcttgatcaggatgctctgtccccattctagcttcctccctattgaaaaattgtctgcagccaatttgtttctcctgcgctgtacctactgccttctctgctcccatcactatttctgcagggcttctttctcatcagccttgggcttgacatttctgattggatgcaagcagttgaagaaaccagtaggactttatggattgttctgttctaaatcttgctaggacaggtaaaaatgtggttatcttcttgacagctcgggttttcctgatgcaacaaacatgtggttctgttctatctatgagaaagctgtgaaaaccattttcctgttgctgttgttaattttccatttatttcctgacattttcttctatagcttgttgactttgaaaataacaatggtggtgacagctaacatataaactaacacttatcatgtgtcatgtgctatgtttatagcatcttactccatccttacaggatctgaccttatgtacatttgcagaagagaaaagtgaggcacaaaaaaggtgaagaggtttgcccaggcacttgtgatcagatgctacagctagacttgcgcctgctttgacttgagaggattttgttaggcatcacacagattgtgtgtgtgtgtatgtttgtgtgtgtgtgtgtgtgtgtgtgtgtgtatgtgtgtatgtttgtgtgtgtgtgtatgtacatgcatgctcgagtgtgtgtattattttgttttagagacagtcttgctatgtaacgcaggtttgcctcagcttcttgtttgctgctattgaagctgtatcccatcaggcctggctttagatatcttttgttcttaatatcttttaaactgatgcattaatctatcccaattcctttttttaatatttgatttgattttattttttgtctgtgagtagttttagttgtgtagggcaatatatactctgaattatgagttgaattcatgtacataaacttggtcaaaggttttggagtcaatgaatatctacatcagcatttgctcttctagatgtttcccctttttactcacgtaaaatgcagcaccatgaaagtatctagagcagcttgtggtgtacctctacagttcaaccccagcaccaagaaagacagtaaaccccaaactcttttgctactgtttacaggagtgtgtcataggcaggagtcataatcagcgtgtacacagatgttgtgatgcggttgcggtgatgtgggcggaacactatggagcctttgttgatgtgtgaagaccatggttcttggtgaggggacaagcctcactcagcatgcctcgggatgaaggcaggcctctctcagaatgtccagctatagtaagaggaggccttctctagagtggaaaggaaaggaaaggaaaggaaaggaatgctctcttcatggagagttggtagggctatctaccaggagggttttcaagtctcaggtgaccacgttagcaaatgtaggcaaagttcaccctccgcatctgagtagcttgctttcacaactcctcacagacaccaccatttgcatgtgctcaaatccttttcataagatgcctaggatatgcgtgtgactgaggtacgtcacaaatacttggtctccagagtaacttgccatacgtaaagcaatatgttacagtttaaacagttgttatagagacctgcccagaacagacacattttacaaaaagaacttaggatccttagttgaatccgtagaaataggatgtgtggatataaagggctgacaatatcacataaccgattaaggacaaatgtcagaaggcctgttgtgccttgtacttctgacattacagtcctattctgttttttgtgatctctttggagccttggtaggtgagcagaggcttctgctcccatttaatacgggatcaaaagtggtagggaagaggggaaagccagacaggatgtggagatgtgggtttggaaccccagaactggggaggtggagatgtgtgtatccttcctcaccagccagcctagcaaaagtggtgacctcctagatggtaagagccaaaacaagatggttgctcctgaggttgacttctgaccgccccccatataccaaataaacccacatatgaattaatatgcatacaactgagaaagggcacatgcatccctggcccccaaaacaattggagtttttatagctaacctagtgatggatctgatatctgagttcagctcttgcctcctggtttactctatatatccactcttgctttatgtaacaatgataatgtcactgtgaatggccacggtagtgtgaaggtgttgtgtttaagaatgctgtttctaataacaaatcttgtactaactagtctactttgtacaggctgctacaattaccttgtgttttcccacatttactagaatgccaatcaaagaagtgcttaatcttctgtgttaatttcttaggcctgtctcatccaagatgtcagacttaggccatttatgttctctgtcctcaggtttgacacactaaagtcatctgatactgttgccctctgcatagagggctccatctcaaaggaacaaggtcagaccttgttctctgagcctcttagaacacacccacaaatggaatacaaaacttgtttgcttagattagattttcctgatataaatccacgaacttaaaaattacagccttacaaagtcaattgtacatttattcaacctacactgagggtcatgaatagatgatatcttctgagcattggcccatgacccagaactcattcctgccccatgtcccctcagcaacttgtggaattcagcgtttgtttttgccttgctagtgaatctcctcagcgagctcaccagagctgaccttttcttttccagcctgtgaacactgccaaggccttttcttattgggcttctcaatgtacttgactctactgtctctcccactgtgaggacagcagccttggacccccaactccagaagcctctcattcttcgggttgccctccctttctgctgccccctttcctgcccattattcggggccattactctaatacatggctgccaattctcttgccacaggcactttaatcacagagcatctgccaggtgctctattctagatatgcatctataccacaatttcttgtgtgttttatatttatggctctatctcttctctggaccaggaatctagacttcctagttttacccctgtaagactgtcaccatctcttctgttatctgaactagacatattgatgatcccctttctcaagcctttcctcctgtacatcatcttaaccattgggtccatctcacttcccgcctccttctctctgactcgtggcttccttgcagggtgtttgttccttgctttaggctggccctcagtgactctggcctatagcattgcagcaaaggacgattggttcctgctccactctagtttctttcagtccatcctctatttagtttccagagcaataatttgaaattcgagcaaaatgtctacaattccaatacttcggagcattgtgaagttaaaagccgcatcatgtactagcactttcctctctaaataagcaaatatgctgaagttattatttctagagtgctagtatttacacagacgtcaagaaaagaaaagacactgaagttgtttactggccacatggtgctcactctcctgcctgatacctagagcctaatgttatttttcccatagatcacacattaatagctggtgtgtgtgtgtgcatacgagtgtgcatatgcacaaccatagtggtgcagtggccttagtctttcccactccaccatagctctttgtttattgttaactcagggctgactcacatctggtatctataagcctgaatccttcccagaagacctgtgaggaagaccaatgctctcgaaattgtggctactgaaaaactaaatcatttctgtgtaatgaactctgtctgggtctgaaaccatgcagattaggggaccatgaggctttgcgcaagatcttgcatcactttgtgcctcagttgccttgttggtaatatgcgaccaataattgtacccgtgccaaatcgtgagacatagaagaataagtccatgaaaagcaaagctcccggcatatggtagctcaggaactgttggatgaaacagcttgattatgatggtagatctcagaaagctgattaagtaactccagtgtgaccaaacagaagctgtgactgacagctccctgtctttttttctgatttcttttgagctacagtaagaactttagatcttgttccaagtgaactatgtggatgcctcaagtttatgcgtctcctgactcttggctacattctactctgaagctcagaataaataacgtctctttggaggtccagtgtcatttgctatttgcgagtatctggcttaggaaccaagttttatgatttagtttgcctacgtagcatttaatctttaaaaactcatatatattcagagaaccacaagcctgcctcatttatcatggaatccccaggtcagggaacagtgtctaactcacagtaggaggtcagtaaatagatgcttcagatatgaaatcttcaggcctgaagcattggagatgcagccagacttcatgtgcagcagggccttagcagtggtttgtgtgccttcttggtaccacagcccctggagtgttcccagactggcactatcatgccttctcaaccttgaattggatttgctaggaaggtccaagtgtggttcagtgaatgtagtttaggatggagtaccccagcaagggatttcatgatgtgatggaaagggtttaaggagcagaagtaagccgggggaaggcaatcgttatctttctagccccagaactgctcacctgggagccatctgctcagcccagtgctgagctcactctgtcacagcaacctgatgccctcccccaagccttccaatgtcaagaattgagattttgataaaactctgtagcttggggattgctctctcatttgacctcctctgtacaccccttgttccctggcatacctgtttgccattttttcttattagaacttcttccaaggacactgcatgggaactaaagggcattggaattctcatgcggcaatttatctgctttgccacatgaaggatggacttggttctcagtgtggatttggtttgtagaccatttcttactttgattggcccctctctttcgtagctgttgcccacggactgtcccatgtgggcagtatagaattctcagtttcttttcttgatgtctgtataagtgttaatattccaaaaataataaattcataatttttttatttagaaaggaaagcactataacatagggcggctttttaactttgtcacagtctgttattggacctttggttccctgtacagttgataggtgagaagcccctacaaatgttgttgtttcaggatcttgaggtccttctgctaaatgcagaaatgtagccttacatagaataaccctaaatatccggtgcccaggttgcttttgatataggatgttctctgagatgttttgaagctcctgtttgtctttcttttgagaatggcctttctggggcacgacaactttctcttaggagaatttgggcttgagatgttcagtgacagagcgcttacctaaccatgagagtccttgggttgcaatctctggtgcccaaaccaatacagttgtaatggcctccgtctctggactgcagtagcagcagcgaggggcagggataggtcctagggcctaggtaacagaaatggttgagctggaaaagtggccatggtgagtgccagccttttgtgtctgaatgatcagcagactatataggaagatatgaatctgaaattgctttgagttatgcctgtagcatatccctgtggtgaaaactagaatgtagttagatattcctacctggggaaagagagaggaaggatcacactgaacatttacagccagccatcaaggttgtaaaaataatcatggaaaccagagcagaaagacagagcaggccccaggcagtgccttagcgagtcggccctgagtatcagggatgaaatgctgatcctgtcagttaattcagaggccatcaacagaagctgccaatagcagtgctgctgtgtcctcttatcctgggaggtgacaccatctgatggatatgcaacatggggtctgacaagacagtgctggctaaaccattggcaacgttttccccaggagaccgtagagccctaggtgggaaggggaggagtagaaggcacgggcagaaactggtttgaaggagtggatgggtatgcagtgtggagaaagaagacaggcagaggacctcctttgtgtttacccatccatccttcctctgccaccctgtgggagacttggacacatttgtatacccgagaggaagaagccactgttagaggctgtggaagcttccggtcagggaacccccacttccggctggcaggtgttctccacattcagttattgtgcctctgcataataatggtgaaaggatgaatttgtcagaatcaagataatcttactagatatagtgatgtgtcagcttctgtgtgtgcaagagagttggaaacttgctcatggaaacaactgggagcatcttagctgctggtatgtgttccaccctttcatccagagcatcgactaagaaggtagttattattctcaggtttcctgatgaggaaatggctctgtgttggtttgctccttgtctgaggttcccctgcaggtgagttcccactgtgaggccaagcatgcttgctctgagcacctccctgcaccatccagagtactgaggccgtcttactggctcatgcacctcttcttttactgctgggccagaaaactagtgctgccagatgggcccaaatgccattcagggattcttgtcactctgtctgagctacacagcaccatgacacaggagggcactttggtatgagaaagagcctagcatatgacagtggtccaggtacatagctatttccaggcttatgctgatgtcttcctaagggacctatgggcaccccttccatacctctcactgagtcttcagatgtgaaatggaggaggccagacaaggctgtggacccatttgtaacccgttctgtaagtgccccctccagcccaggtcaggctacaagcagcttttgccagatacatgtccccacatcctggcactgcatgataacgacagggagatgtcaccaaggaagttgtttagatgaaagaacaagactatagaggactctgttgtaatgggacctgcttttaatgatatctgcttaaaatcatgattgattcatgtattgctttttatttaacgccttcagtgacagtggtagagaaaaagaggaatcatgaaataaggacagcaaacttatttagctgagcccccgagtcctaccttgccctggccacttggtgtagcacagaggaaggatatcttggttagtttttatatcagcttgacacaagttagcatcatctgggaagagggaatctctactgagaaagtgtccctaccagatctggcctgtggacaagcctgttgagcatttgattaataaccaaaattggcgcactcatctcacagagggcagtgtcacccctgggtaggtaatcctgaattgtttttaaaaagcaggctgagaaagctatatgttcttttctccctgagttgcttttggtcataatgttttatcacagcaataggaattttaactaggactagcaatttcccagtggcagggtctattgggcctgcacattgcaggcattctggtggcagatactttccaggaggcacactgtggaagtggcattcttgtttgcaaaggctcacctttcctgttccttgtccctccagcctttccgctgtgctcactgtcattactcttgtaacatctctggatctctgaaaagacactacaacaggaagcaccccaatgaggagtacaccaacgtgggcagcggggagctcgcagctgaagccctcatccagcaaggtgagtgaggagcccaggccttctgagaagcaccgatgtctgctagcctctaagagctcagttgcatctgtggacttggcatggtgttagtctgtcctctttgttggccatgtcatccccatcccatcattcaccaagaagcatgaggcaatattgcagctgtcatgtgatgagctaaagggatggtggtcagaagttacctacagtctttgatacaactgccaatgctctcgtctactctttgtatgtgtttgcagagttctagaaattttaggcttttttcttcactcagtgtcattaacaggaacattttgttgtccttttgttcagtcttagtcttaattataacccccaagggcttttggtaatacagaattacatataggggcttaaagttctgttatagagtttctaagtatttttcctcttttaaattattattataatatatacatataaaagtataagcataaatacaacctttagagtcattctgtgtcatgaaagcatgtatatgtatacatttctagggttgaccacctggtattagataaccaatcataggggtcaattccatggaagattaattctccctctctcggtgatgttggtttagctcctcatccatgggtggggccctgtgaaatttctcccctctttcttgagatgtcaactggtgttggacttatacagatctcatataggcagccatgttgttgagtattcatgggtagcttaccctgtcataagtagcagaatgacctcatagaatacttccctggctctttggcttttgcagtctttctgccccctcttcactcatcttaaaaaggaccttaaaggagaacccaatacttcctagatacgggccatcaagaaagaggcaaaaagannnnnnnnnnnnnnnnnnnnnnnnnnnnnnnnnnnnnnnnnnnnnnnnnnnnnnnnnnnnnnnnnnnnnnnnnnnnnnnnnnnnnnnnnnnnnnnnnnnnnnnnnnnnnnnnnnnnnnnnnnnnnnnnnntcctaaaaaacattttaaacatttatttggctgggcagtggtggcacatgcctttaatcccagcacttgggaggcagaggcaggtggaattctaactttgaggccagcctggtctacagaatgagttccaggacagccaggcctgcacagaaaaaccctgtctttaaaaaaatagtaaaataaaacaaaacaaaacaacccatttatttgagaattaatgaaaacctgttagtcatgtaaagtttcagagtgtctgtctgtctgtctgtctgtctctccctccctcattcccctctcctcccctctcttcctccctccctccctcccctccctccgtgtgtgtgtgtgtgtgtgtgtgtgtgtgtgtgtgtgtgtgtgtgttttgttggtgttgttttgtctagacagagtttctctgtaatagccccggctgtcctggaactcatgctatataccagacaggcctcagaatcacagagatccacctgtttgtgcctcctgactgctgggattaagaggatgccaccactgtttgacttttcttcataatttttattgaaaataaataaccgcacaattaccactgaagagggcataatacatatgctcttaccacataagaaagtatagccatgtttatgtctccattccaataattcagctaagactgactgcagtgtgtagcttcagtcattactccgtattagctggctactatgtggaacagagagaggttttagaaacctgtccggttaccagctggaggactgtgagctgtgttacagccagggatgcttatttctctgattcagtatgaggcatcacttactgagttgcctagagatgaatctctgtgtaacaccaatggattgtctattcctggcggcatccagtgaaagagcagaacaggaatagatgagcagttaagactctcaggatcattttagagctgtccatcagaaaggtattgtgggcctttcgttctcttcagcaggagatttatggagctaggagcacaggatggtgcagcaaaaaggaaggatgttgtcccaaatctgttttctcttcttgaactgtgctgtcgtaggcaagtcacttagcctgtccttgctaggtccctcgctggcagagcagagtcagccacgctggtggagaggatgcagtacagagcatccggcacacgagactgattgattcctagatttactttgctcttctgaaagtaactaacacttgcagaataattgctaggtcttccttttgtgtgctggggatggaactcaaggccttgctcatgctaggtcgttgtcttaccatgagctgtaccactcacccccatggcattacattttaatgacagtcagctccaggaatcactggggagaatagattgacttagagtcaccataaatgatgagcgggaggctggggcttggttttcgcatccttcacactcttgggtttgattggcatcaaacagacattcagtgtggctggtgggacaggctcctggatctgattgatgaagctatcactgctttcagaccttcaacactgccttgccaacttgaactgatttctgccccaagttttctgttaactttttaaggctctctaatcaattggtatctctccaatcaactggcatttactgataggacatgggtttcatatttcagctttgaagatcagtcctttatcattttctttcaggtgcccccacctccctgccccctgcttctccctgtaccattttaggtacttgttgaaacagatacctaaatctgtcctcattattctggtactgtttggacattagacttctcagccttacacatgaagctgaaatctttgttgttttgaactactgaattagaagaatgtaaatctgtgtccacgggaaccctgtttgcaaatgcatatcatattattcatgctaatctcaggaaatagcttagcagagcaaaaatcctgtaacttgtaagtagtgcaaaactcatcagtttaatgtttggacatgtttaaaatgtctaaatcccagactcaatgagttattggtaggtgcttctagtggtgtgatgttatgccttttattgactattactattttatgggttaacttttcctctgcaattgtcctgtgagcttggtgtgctcattcagctgttttaaaatgagaggctgagggagcgcagtaaggaggtggccaggctaatccaccctcctgctttaggatttggtgatgctgaagaaggggatgaaggtgaggacagcacatggtctcactggcacagtgattaggttgtacctgcaaggtctcacaggaggtggtgaggacaggccatggtctgactggaacagtgattaggttgtacctgcaagctgctccttttatcctcttatccttattcctaaggctagtcactaatttggcccaaggttacctatgggacctatctatctcttttgctcagtccttcccaatggtctcaggtcccagagagaagcaaagaagaccttatttgagctctgtgtaccagggacaattcattaaagttcaggatattagcttggatatgataaaattatgcttgtttttctctgctgtggtttccctatactgcttttctcaaggatcctatgggaagcatttgacacaggatttaaataaccttgagttatatggcctggtgtgatctcatagcacttcaagtcactaagaataacactttgtcatttagtaggacatgagaatgtctgcaggaagtcctaatccacatttcgcttcctcaccttgtaaacacaaggttaggagccacacagactgagactggggtctctgcacagtgtggcctactcgctatccaagttccttaatgaaactgtttctgctctgatccctgactgcccgtttttgtttcctaaagccactatagcaaatgacttaaaactacacagatttgttatcttacaaaggtcagatatgcacatagaggctcactaagccaaaacagagatgttgccaagtctgcagatactaggcgttgtctgttttctgactttgtctagcttctagaggctaccccatgctttggcttgtggacccttcttgcacccccaaagtcaagaatggtcagtggaatctttttcgtatctcattatgatgatccccttttgtccgtgtaaggatccttttgattatattagatccactccgtgatgcagaatgatcttcaccacagagttcttagctgaatcacatgtacaaagtacctttctcatgcaaggcactgtgctggcatgttccaagcagaagtatatccatacatttggggcctctagtctgtctacaatgctgtagcttccatgacgctatgagaatttatatattaaccttagtagaagagaaaactcagacttaagtgtaaggaagtcgattaggctcatttcctgcctgcctcatattccgtgccattcctggacggatattattgaatatgaaatggaaccatccacaatattagggaccataatgaaggacaaatcttttaatacctggaaatccaattccagattctttaaagagcaaggttgccatggtgagctttttaaagttgcacctggatgtcctacctttcttttggttaatcagtccaggtgagaaaattgtgccttggccatttttgcaactttgctgagcacttaatgccagggctgtgagtagctcactaagtcttctgttgacctttactatgcatgctaagaaattaattaattgaagtagaaattatttctccctgatttgatgccaattaactagcatagttatacattcaggtgagattacatatttctgtttgttgtgctttaattaaagttgctatggcaaaggttgaagttttaattaatattgggcattatcatattaagctcaatttaaacataatacgaggatgtttttctccctgaattagtttccttaaaatactattccagcttcattgtgaagcttccatttgacctcagaaagtttattgttgattgctgctgtgtttaactctttcaaggaaaagcagtgttggaattactatgagcaaaggtggacagcctcattggaaaggttatggcctctcccagtcttcaaagatggtcttcagagagggtcatggggaaagagagcaggataggtgactagtacatagtaacagggagtgtgtataagttaccttcttgctgctgtgataaaacaccatgactaagagcaacttatagaagaaagagtttattttggcttatgttttagagggagagtccataatggtacgggaggcatagcatcaggtgactggagcaggaaactgagaaatctcaccttcaaatacaggcaggaaacagaagtgggagttgactgaggctttttatttgcaaagcctaccctcagtgatgtatgtcctccagcaaggctgcatatcctaaaagttatgtaacctccccaagaacaccatgaactggggacaaagtattcaaatacccaagtcttttgggtcatttctcattcaaaccaccatggacggttaaaaagaagttgacttatgctcttggctaagaacaattcatttgatcttatctataaaaacaatacaatatctttgagattcttaacataagcattcacttaagaagttgccttttttgtagaatgttttgtaacttgagaatcgggtgttcatattggactttctgatgatgactagtgtcatctggctttgtctctcctctattttgtttttctgcatgctcttgaacatgcccggatgagaagactgaagagcagtgagctgacttaggaagggaagtgctatcatcctccatgtctgcagtagacaagaaactccaatctagacaatgctgtgtgcagattccactgacatggagttggttcagaaggcatatactgtagctgcaagtgaaagaagatacaattgaatgattcgtgcccctgagattacctggcccataataaatttgtctaggcaaactcaaaatcaagacagacttcctcagaatgagtaataaataaatggatatgacagcctgaaacaggtttatcagctcaaccctgggctgcctaaatctaagcatctctgtgattcacttagcttagctcacaaaggcatgagagaattggtcaccttggacatcacttgatgtgcatgtcagggatgtagaaagaattttttgtgaggctttgtgattgagaataaagggaaggaactggtgcaggtgtctgagtcagggacgtgttgagaggagagtggcatgtcatactgtccaaggagaatttgatattgtttacttttcagaactcttaagttggttacagccttggcttaaagctaatactacttcattgtcccaagcctctgtttaaaatgaagtaatcattgttgaaacatgaacatagcttattgtccagcaagtagatagatatgcattattgttacttctgtattagccagggttctctagagactcatgacttagggaatgtctctctatattaagggaatttattcaaataacttagagtctgcagtttgactaaaccaacaatggctagctgtgaatgagaagtccaagaagctagtagttcctaagtctcaagagttgtgtttcagctagtcctttgtctaagctgcaatcctgaagtagtcggttccaacagatgtgctggcaagtacgtgcaagcaggtgaagaagaatgaacctttcatttgtctattgtccttgtgtaggtctccagcagaaggtatggtccagattaaatgtgcgtaccaccatgcctggacctaagcttttctttatttggaacttgttctgtccagtctggccttgaactcagagatctgcttgcctctgtctcttaggattaagggcatgtaccatctttcctaggactaaacttttcatgaaagctatgcctcaagatccagatcaaaagcatgtatcatcccatgccaagatctgggtcaaaagcctgtgtctttcaacctcaagatctggatcacaggtgtgccctgcatttctggattgtagttcattccagatatagtcaagttgacatccaaatagccatcaccccgtcgctgctatcattataggaatataatatacaatgcccattggcttactgactgatctggacatgtgctatggcagccgtggggactgagtatgggagaagcttgccgtggcaggaggcaggattaagagcaagcaagatagtattgacactgtgaatttccaagacaaacagaatgcagggcgagcgagttaaagaggaagcggggagcaagccctccttgtgaagtcaaggtagacttccattgttctcatgatattgtacaaggatgagattagggaggaaaggctatctgtaggaacacacgggcatgggaaggcgagacctgaaatctcacctttggatcatgagctgctggaactgcataggcagcaggctgcaaagtctcaggcaggggatcaatggtgagggtatccactgtctgcttccagcccctgtggaggcccaactctagcctagagagctgctcacctcacacctcagcggcaattgtctttctctggctagagcttgcttgcatctcctgctacaagattagtgttcagtactgcttctgatataattttagaaagacagtctcttctgtgaccttaggattggtttttcttgttgttgttgttgatctttttttttttttaccttgagttttactttcttccaattaaagcatctaaattcttcctggaacatgtgcaaaatttaattggttcaataaacagtaacacttcaggatgtgaccagagttttaatttattatttactgggaatctcacaggagaatttatccttgtgacttagcaaggggtttaagaattgagcatctgattttaaagcatttgggagcaaaggaagtagacaaatcagccactgctctttagtgactttaaaaatgttatctacagataacaacatgaaagattgattttagcctcaatccagttggtcaagaggattatgttgctcatttctctctggcatttaaaatatcaagcaggtattaggctctctgcaaaggcctattcagtaaataagaaaagtgtattaagttctagctgaagtgtggctgctgttgtattccaatactaaggtaagtgtgagtgactgtggatgccggagaaaaaacaatgtactttaccgatcccacacatttggacaggagacacagcagtgtgcttattgctataaacacttcttttttgcctctctgtgcttgcaggtggtctgaagtgtcctgtttgcagctttgtgtatggaaccaaatgggagttcaacagacacttgaagaacaaacatggcttgaaggtagtggagattgatggagaccccaaatgggaggtaacactttaagtgtggtatgagcttgacatgtggaaacacaggtgacaagtcaggtgagcccaggtgctgggcacagtcagccctcaagatcattacatgtgtttcttggaaatcctcggcagccatttcagatcatggctcccggtccctctgagtgacatctgagccaccaatgtgaatttattccgggttgaacttagacatttctgtgaatgttgtcttggcttctccagcccacaaaccctgtcttagatgttagttacacccagcagagttaaaggcaagtggtctgttgctatcctcacagagagaattggaaggagccctatttcctggttccaggtccttcccactagctgtttcccctaggaacttgaatctgtcgccattatgagtaccagcagccacccatcttcaagtaccagatgccactacaatgggcagattgcagtcattctaggcggggcttcttagactcagtactattggtgggtttttttgtttgtttgcttttttaaagttttttttattagatattttctttatttacatttcaactgttatcctcccctttcctgaatcccctttgaaggccccctattctcttccccctccccgactcccaattccctgttctcgaattcccctacactggggcattgagccttcacaggaccaagggcttctcctcccattgatgtctgacaaggccaacctctgtagcagatatgtggctggagcgtgagtccctccatggctctttcgttggtggtttagtctctgatagctctgggggtactggttgtttcgtgttttgatctgcatgattctttgttgtgagaggactattctggactttataggaagcttagctacatatctagccttttcctaccaggtacgtctagcatcaccctgcctctctggacctcactgagacaattacagttgtttccagacactgccaaggttcaccactctctggcaatcacagacacctccagctgatagtggatttagagagtacctggctataaccagtcaggagtaaggtctttgaaacaattcatagcacacaaaaataatgaaacaccatgactgtgcggagcttactttgcggtgttcggaaagcatgtctctatggaagaactgtatatgttgatatagctcaccatgaaccggggggagaaatggaacagtcatcttcatagatgccaaaaggctggtgacagacagcgtcgttcacctattacacactttcagtagactgtagtgggtgctccttaagaggacgaaagtgtgtgttttggccataagccagtgtcttgcttcatttggaagcactagagggttttcactaaagtcagaagcaagtaactatggaaacagtgtgttgctggatactctagggccaaagtcagagagccgatgagtgctgcagtctacccagagtgtctgctacagtactatgcttaatctctgaaactctttattgtgtattttataattgagcgaagttctcatgagaatgctctgtatataaacggaactgtgttttcaccatttgaagattttacaataagcagaggccaaagctacatggagccttagtgccaacttggaatcaaagaactcggaactcatgtggtttactgttattatttgccatcgtctacatgttgcaaatccctaattaaaacaaaacaaaacaaaacaaaacaaaattcagaatccacaatgctgtaaactccaaaagcttttgaatatcaatgtcacctcactagtggaaaattccacatctcccctcacttgaaatacttgtggaagaaacaatgaatctgatttacttcagagctatcaggggtggagacacagcaagacagcacaatgtgtgattcattccctgtgcctgcctggtggcctgggcttgacccctgggaacccatatactatggaggtaaagaaccaactccatatagttgtcctctgacctcaaactgtgggtgtggcatgcgcccaggcactccctcacacatccaagagcctgtcacggaggatgtgggaccatgggcgagaccactgattgggacttgataattgtgtccatcaggtgatgtgtgaccagtatgtggaagtttgtcattcctctctctttacttctatatgtattttataaattaagactaacaggttaggttaggggtgacagactttaaacttgtctgtgttatctataagctgtttgaccttgagcccttggtgactcagtttacccttagtgttgtcaaccgtgtagtgggctggtagattggaaagctgacagggagaatcctgtaacatgctggagttcctgtgtgacagacaagccctctgtactgtcggtgttgatcgcaggctcagtgtcacattaccataaacggtgccacaatcatttcgcagaactcttaagttcatgctacagaatttgttgtctgttaaagaaacagacatagggatactaattcatgatggaaagcttgctaagtcaggcccctccagccgattctagaactattagtagggctttaaccctcacaaaacagtacacacaaaaataagcacttgcctctcgaagtgaggcagctaaacatcaaggaagctggacacagtgggatgacacactggctgcctggcactttggattgtcacttatctcctaagaatgccttacagagagcaccactcttactgaatgttatcattacctgagtcccccaaaaggagagcagctctttcataagctaaggcactggcatccagaattggatagtatattacttgtcttagtcagggtttctatagctgcaacaaaacaccacggataaaaagcaagttgtggaggaaagggtttattctgcttatacctccatattgctgttcatcaccaaaagatgtcaggacaggaacttgaactgggcaggaacctagagaaggtgtaaagaatggagaggtgctacttcctggccttcttcacatggcttgctcaccatcttagggatatcaccatgatctcacattaaaaacataaataactaaaagtcctacattctttacaaagctggatacattaaaatgccagttcctttaaaatagccaacctcttttaaaatacacagtcttttaaaattccgtctctcggctgtgggttccagcaagatgctttattatttcaagagggaagagtcagcgtcgtcacaatcaagtcaaagcataagcaagttccaaccagccaatgtctgggatccactcatgatctcctggactcctccaaagggcttggatcacttctcaagctctgccctctgcaacacacacacagcctgtcttttaggctccatctggctccactccactgctgctgctgttcttagtggtcatcccatggtactggcatctccaaaactattggcacctgggcagcaccgtcaccaataacctcaataggctctcttcatggtgcctagcctcacttcactttatggccccttcactcctgggccttcaactgctattgaggttgcaccttcactagtggcccctcctggcctctcaccgtgccaagcctcagttgctcttcatagtccctcaaaccagtaccttcagaaccagtgccatgtgatgactcttactctgtcaagtttggttgccaactcaaggtccaaccacttagttgcctctggatcacagcttgtgtgtgttgactctcaggaaacattttccagaagatttcacctcagtgatgctggcctcatcttaattactgcgaaattcacagctccggccaaccagccttgagtatcccagtaaagcaaagttttgttttagaagttctggtgtcgtgttagtcccacctgattctttagtcccagctaaaccatactgacagagttctagctcaaagtttcaaagctcaaagtttcaaagttcttccacagttcttccaaaaccatggtgaggtctggtacagcaacatcatacaatcttggcaccaacttgtcttaattagggtttctattgctgtaacgaaacaccatgatcaaaaagcaagttggagaggaaaggatttatttagcttacacatttacattgctgttcattatttaagaaagtcaggacaggagctcaaacatggcaggatcctgtagtcaggagctgatgcggaagtcatgggtgctgcttactgaattgcttcacatggcttgctcatcctacatttttatagaactcaggaccaccaccaagcaatggcaccacccacaatgggctaggctcttcccccctcccctccatcgatcactgagaaaatgccttacagctggatctcatggagacatttcctcaactaaggctcctttctctctgatgacaataatttgtatcaagttgacatacaacaagccagtacgttgcttaatgctattctaaagagaaatgatctttctaatagtttctgcattcatttgatatttattgggtgatttctttatgtcaagcaagtatagctgaactggctgactgaccaaaaggacagttacatgctactctggaactctggtcagttactcacaggcatcaatagagcataatgttggctcctatacactttgtccaaagtgctgccttttgttttttattggtgagattcatagccctcaccttacaggattggttgtgtttcttctcagaaagagatctattaatattgttcctgtgactatctactttccttgcttctctccttgtggtataagatatctttgagtgacacttgggcccctcctgccatcacacatcctgacattgcagaatatgtccttccatatcctttgtatagcaatttgatgcatgtcagtagctaaggttcagtaagacctcactgtatggtagggcctgtgctttagtgctaagtaacaatgcattcttcctttcccattttcctccatgactgttcctttcctttgttagctttgtggctggaggcctcagtgtaagaggcacattacaaacagtgttggtagcagtgggaggagagagaagcctgtagaaaaacatactcaagtgtgttcattgagagcagcatgcttcactttttaccatgagcatggggagcaacaagcttctccacacagtggccataaggtcttgaccctcaagaggaaatgttatctttgggcaatgcatctgttagagcagatagctcttgggggagctatgccagtgaagtgttaaatgccactctcctgtatgggattctctcatcctggaattttcggttgctgttaatctcttggaaggatgctgagacatgatgtttttatttagccagcagcagagactcccgaggagccctccacccagtatctctacatcactgaagctgaagatgttcaggggacacaagcagctgtggctgcacttcaggacctgagatatacctccgagagtggtgaggacatacctggttttatttctcacttctgtgtttctctctctctctctctctctctctctctctcttttattaggtattttctttatttacatttcaaatgttatcccctttcctagtttcccatctgaaaatcccctaatctctccccctgctccccaacccacccactcacattcctggccctggcattcccatatcctggggcatagaaccttcaaaggacctaggacctctcctccgattgatgactgactaggccttcctctgctacatatacagctagagccacaagtcccaccatatgttttctttgattggtggtttagttccaaggagctctcggggggggggggggcgggggagggtactggttagttcatattgatgttcctcctatgggactgcaaaccccttcagctccttgagtactttctctagctccttcattggggaccctgtgctccgaccaatggatgattgtgagcatccacttctgtatttgccagacactggcagagcctctcaggagacagctatatcagggtcctgtcagctagctcttgttggcatctgccatagtgtctgggtttagtggttgtttatgggatggatccccaagtggagcagtctctggatggtcattcctcagtctctgctctgaactttgtctctgtaactccttccattgggtattttgttcccccttctaagaagtattctgagcttctgggctaataaccacttatcagtgagtgcatatcatatgtgttcttttgtgattgggttacctcacttagggtgatatcctcctctgtgtttttctttatgtaataaataaaccagcatgtcttgcttcagaatgaccctagccagagtggggcctacgtagctcagtcttatttccagtgcagccttaggtgtgggcagtcttaccattcttacttatttgcagtactatgaactatgttcactgaacatagttggttaagagtcctctaggtcacagaattggagtctggttctcctgacttacctcaaggcagccctacctatgacctcatgcagagtcagtccagagtgtccaggcaggtgataacagtgggtggcataggatgtaatgtaccaatggatcaccccaggcatacaaatatacacctgtgtgctcaggaccactcatctgtctccattttccccaaaaagccagatcatatttttaaatcaaatgtgatgactttgaatttattttatctgtttctaaactggacactgtacttagaaacagttttcccaaagctctaggagtgccagagcacatgcatattgggggctgagtcaagcaagcaagattaatgggaaagcattaggtaagaacaaatggtaatggaaaataagttctcaatcccgggtccttaagaaagctccatccaaacacctatgggcatctgtttctgagcaattaactgctgctgcctaccaggctagagcaaactggggcacagcaccttcatttctaccatagtcaaggctaagctgttaagcaagactctcatcactgaatccttgattgaatttgtgtttctgtctcagtggttagtgatgtctgcatctcccatgatcacatacctattttcccattagtgtcttcccatagagtgtctactagcccaaaaatgtctttctatagagcttctatgtacacatgtccatttgcccacccatgtcttttcttagagaatccatgactgtgtgcaattttcaaccagtgtgttttcttggagagtccatgagcatatggccattttcccaatagtgttttttcttggagaggtgatgtgcacatgcccacatgcccaccagtgtctgcccagggtgcctcagatgctgtctcctctttgtcgctcagcaggccaagcctcctccttcaactcctggctgcctgcttgtcttgcttcttgcctctaggctgtgttgtgcagaacaaactctgcagttattcgtgtaggttgcatttttttatatgtatatgcgctattttgtggtcccctcatggcacttttctgcctagcttaccctcatcttcagcacttagcttgcatgtcacctgctgggatcccactagacttttctatactgtcccctaactgtcctccaataccatgtgttgggctgatttgcttacacatgggtctctggagcctggcagcccgggaaggattaagggagggattatgccttatctgttttctttatctgtattcccagtgggaaccacagctcctggctcacctaaagcttgggctgggtaatgatcagtggggagggcagggtaggaagaattaaaatccaacctcattgactcaccaaagtaaacatttttgtatgtggaatttaaagtgtttagccacagggcacttctgaatcatcccccaggtctaggcaggtgtgctgcagaaggggttggggtggggggagtactatgtggtgtggtgtgagcatatgcagctcacctcctccatcttaggccagttctacctactgcactgatcatgtcagaattctctctctccagtctcttactggttgatctgtgttggctcaaggcccgcagaaagccgtgcatgggggtgtaaacattggcaatcatttcatggcattatgaagcacagagaccaagcagcaatttccatttgagtaaattaatgatctgggtgagggtgtgctcaggaggattacagatgggcagcagatggtgggagagcgcagggagggtgtgccaagttgctgccctggtgatgtgggcccctgccttttgacaagattaaaacaacagcaagctaaaattgttttatagttcagaaaccctggctgaatgaggaagacattcttgggtgtcctgcctatcactcggcatgcttccactgcccatctatgatgcccttagggaaaaccagctctgcatctgagcatgtcagctggtaatccttggttgtgacaacaaagggcggtttgtgtaaccacatcaagatctagttcatctgggctccagttccatgtttgtggtgccatcgcccccaatgacctggggcatatttctgctttttgtgatcaagtgatcatgccatcatgccatccccttatggtttcagtcagggcttgagcagttcttgtaagaaatatatagtaagctgtaaagtattctctgaataagtgatttctgagaatccatgaacactctggaatagttatacccccattgtcttcacgtctaggggccagttggcccttggatgccactcagtgcagagagcttaatggttctgttgcttctttcccataggtgatcgacttgaccccaccgctgtgaatatcctgcagcagatcattgaactaggttcggagacccacgatgctgctgctgtggcctctgtggttgccatggcgcccggcacagtgactgttgtaaagcaggtgaggtccctctgctcagtatttgtctgctcaagccactacccatgtttctcctttctttttcctcgtaacttcagcttgtgtagagtagaacttaacctgaaattggtcttcttcttgaattattagggattgtgtcttgagtggctgtgtgtgcagatgtgttagagaaagcacccaggtgttttagaagcaccgaggagactcttcatttcctttcagagaatcatagaatgcaaatgagcataatgagaacctaccaagaagtaaactagtaggaagcgtggggacagccagggatgcccaggaatatttgcccatggactgtccttttaaacaagaagcattatcactttatgtttgcacaggagaggaagaaaatgatgggttggaaagaagggtttttctatcacattgtcccagagctcctcatatccactccttctctcctgtgtctcctcagaagagaagccaccagtctgtcagaatacagcgcacggggtaatcagcgtcctccgattgctcatacctgcctctttactacattctcagttgttaagagtagtttacacagctactttaaaggtataaaacaaaaccagtaagcacatcagaaccaggaaaccatatacttaaaatgcataaagtacgtttctctatactttttagatttttgcctagctgtgtgtgtgtgtttttttttttttatgagtcactgcgtatttattgagtacttgctgttgtcagtcagagctgtggtgctggagttccaggaaggaaccaacgcctggcatcagggtggctactccctgtggaaagggatagagtaggaataaagtagtgcgccatgaaaaatgtaaactgctgaaccaatgcagagccagtgcacatatcacggctggagggggacgagcacgtgtgggctgaaggctgtgtgacaaacggttgttgggcaagatgtctctgaagtttgaggtgtgagctactagagctatccgatctttaatgtgaaattagtgtaggatttttttctgactgaaaataagaaggaaacgtgaaacgtttaacttaaagggtatgtgtgtgtgtgtgagtgtgtgtgtgtgtgtgtgtgtgtgtgtgtgtgtgtgtgtgtgtgtacacgctttttcttggcactaacaaagacacttctcacagtgggtctaatatatgctcttctgggtcatgtgtcctggctaacactaactgcctttgggattaagagtggctatctcactgttgtctctatgactatactcagtacatggtgcaacacatgaagtccatgccatacaatcctctggggcataggaacttctggtttaacactggatttcttgatccagagacaagacgtcctgtagaggagtatttgaattgggtgtcctggaacccttattccagaatgaagtttctctccaggtcttggatagaagtcagacaccagaaagataaatgcttaactctgcagtatcttgatgaaaaatacacattctagcctttttgtttttttcctggcatttgctacatttcaggcttcagattgtcttctgcatatcttctggaactcctcacgtatatcctggtatgtggaatcttaaagtcgatctggtttcactagagaagtattgggagtactttgcttggtttgtacacgtgaatgctaagacttcagaaggtgcagcttattgtcatctgtgtcttctttctgttaaaaatatttattgactgctgctcagggctgtgaattagtgagtgtcacgggcagtgctgccatccatgaggttgcagatttagagtcctgcttaaataggactctatccattggaatgtcagcccaacagaggagaaggcagatacgcatcaatacagctcatgtcaacaagtccaaatttgcacagtaggaaaggacagtggggccccagaaggatcttctttcttacttcaacctagagctgcaagtggaactgggaactcactcatgcggggcaacatatggaaatattcccaaggatgtgtgtatcatcatcactatctcctgtacctgaccgagcctccctttcacatgtggctcataatgcatagaaatagagggagagagggaggggggagggagggagggaggggtggatggccagagagacagatgttaacctgcccacacctgtagcagagggactgagaatatctcaaacttcggtaggtgaaggaatgtctgtcctctgattaaattatcccatcatttacgtttactttggctgcgtttattgggttgattgatcctttttcttttaattaagcactgacttaggatattttcagtcaggaaatcacgtgtgctaatgagactgctgactccctgatggagtcctgcccccctgctggattgcccagtgctgcctctcatcaagagcagagcaccgggcagcagtagtaagacttcctcttgctacaacccaagtcaggacacagagcaattgaccaacaaagactgactagttttgcttgtgctgttggcttcatgtgttgattttccaatcacctcctgttaatactgaagagaaaaaaagcttccttgtcataaaagcacatgaggacatataacaacaatgtttgaaattcctgttgcatgccatgattttatatcttttaaagcagaattgtctgtttcctgtacttattttacagggtccagatagattccaggttttgtatggatttacttttttatatgtgtgtgtggtatatgcatgtacatgtatgagaatttagtggatgggtgtgcccactcgtgtacctgtggaggccagaggtagatactgtgtatcctcctccgtctctctccacctcttctgagcctgaatctctcattgaacctgggattctgattgtctttactggttgaccagaaagtccctgggatcttcttgtgtctactttccagccctgggattacaagcatgcactaccacgccctgctctatatgtggtgcttatgaggtgatagctatatctattgaggctcgtgaggccaaaaatatatagtgaagcaaagcccccccaccttatggcactggaaccacaatgtgagagtgggaatggctggaaatctaagtattccattctaggagctgtccccgtaatctcactttcttctgcaaggccctacttccgaaagctcctgccttctcccaccagtattacccctgtggaccagctctttaaggaatgcatctttggggacattccaaaaataattagcaataattaaataatattaatataatcagcaataattaaaagtgatttgtccccaatttttaagctttccaagttcactgtcaccatcttagcacacatctggactatgtgctaagagaagctgctatacagaggaacctccaagtacagcccctggcctaaaagcctgtgtgccctgcaaggagagcccagcatggcctcttgccttagctcataaagctgagcatgacttgagactatagccagactatgggctgagccatatgggaaaggatttagatgaagtggctccagagtctattcccatgaccatttgaaagaaaccattctctttgattttattttaatcacacgccaagcagtctggtccaagaccgctacatagtgtagaggctatctggcagctgaagggccttacggtggctcaaggtgaggcttctcctctgtccttggcctcaggaaggttagctttctttttctttgttgcccctttaatgcaaatgacatgaaataatggaatttgaaagttttgtttgtgtgggggctggaatcagtttctcctgaggttcaagacaaccaggggctagagatgaaagtaggcctcaacaggcctggccccttctctacttttgtttcccatccctaggctggtgggacttcatgttggtctggtatgtgtaacacataccacaggtaacagctacttagtagtcttataccattaacaaaatgctagcttgtgttgtaccctctcaggtgcatttaagagagtctttataaaagattaaggaatatgcatgtgtgcgtgtgcgtgcgtgtgtgtgtgtgtgtgtgtgtgtgtgtgtgtgtgtgtgtgtgtatgtatgtatgtatgtatttgcggatactcagaccagtgcatgtcacacagacagaaagtaagcacttgctggggtctgggaatctaatgcttcaggattccagcagatgcctccaagccaggttttactcttattgtctaattcccagctcttctgtttgtatgtttgatttagtttggtttgttctttgggacagggtctcactagctaggaacttgttctgatccttctgcctcctgctcttttgagtgcttgtatttgccactctttgggtcctttgtgaaaatgactgttcttcctgctgccccatcacagtgctctctgtgaaagacttctcacctcatggtttgtttttggttggtcaatcctttttggctcctgcctcaggagctttgccataaaattgacttgatcacaagtccctgccatctttaattctatcatgatcctaacattcgcgtaggcaccctcctagggcacgctcacactgcgccttctttacagagcatttgttccattgttgctgaactggcattcggtatggagacgctgggacagaagggcagctgaccttctcttgttacttagtgccacctttgtcctctgtaggccctcgttagcactccccagcttttcaaacctcttctctttcttcttcctaaatggcattccttttcagagagttctgcccctggcataatgtctgatggctgacatgccaaatggctgcctctcaaagctcttttattacttgctgagccctcccatgcgttggtagttgctgcaaagtccatttctttgtgaaatcttagaagtaagcataagccccatgatataactctggacatatgagaaatggtctgcagaaactgaataaaggcgtctgtctgtctcattatggtgcccttccatgtatccctcctttagagctgaggatgccagtctcacccatacatcccactgtcagagctgaggatgccagtgtcccctgtacatcccactgtcagagctgaggatgccagtgtcccctgtacatcccactgtcagagctgaggatgccagtgtcccctgtacatcccactgtcagagctgaggatgccagtgtcccctgtacatcccactgtcagagctgaggctacccgtgctgagcattgcttctctctacctttctctgggctccacttttcctactgtggttccctacaagctgcagaatcccagcttgagggattgagttttgatacagtcattcattacagtttgcttggtaacttatcagcaggctacccctgctgataaattttctctagtcccatcccttctctctgcaactgtactctgggaaagtatgtggatagttaaactcactgagtctatttaaagtgtggagataaggcaagggcagttctcccctgagaggaggaaataggagatatgatgtgaagtgacctttcttagatttgtccctacacagtacacctctggcttagcccttgctgtgagctcccactgagccagtagcctccatcctgaccacaggaattcccctcagtgcaaactatccaattcttaccccttcctcctctttgttttccctaaccaatccaaacatgccacataggcattgattttggaaccttgctcctcttgccttctgtatgtcacctgcctaccagcatgttcttcaagtctcacctgtacaagatgccttaaaactccctttgtctatggctgctgctcttatctaggtttttcactcatcaaaatgtgttctccagtgctagtagtgctgacgttgggaagttttttaaatatataatcactggtcttgccacacacaccctgagttagactatgcacctctccatctcttataactcttctgataacctaggacgtgcccattaacttagattagaacctcctcactgtggtcccactaactccaaggcccttttgcttccagcctgcatcccttgcttagcatgcaccagcctatggctgccttttcttcctgtcctatagcactgattcccaccttgcgactttgcatcagatgtagatgtgccagtagcctccatcctggccacaggaattcccctcagtacaaactatccacttcttaccccttccttctcttctctgtttccctaaccaatccaaatgtaggcgtggcccaggatgagagctgccagtttgtatgacatggcttcttcttggtggtgagctttcagtaagctcttagtggaccttttaagccacagggaacagtcctttagagcctatgaaaataagtgaccctgcttctttgtggttaggtgacattgtagattctaaaggaggaagcttggttactgaagcctaataagatctatggtctgtaaaatagagagcatctccagttagtgatagccacctgtacaacttgggtcaggggagttagggttgttataagctactgcctttcagttaatttcttaggctagataatgggtatagccactgaatagtcaaatgagacccaaatactctatgttaacattagacctgtatgcagtaacctgccattatatggccctggtcagagaatagtctgcagacatatattgtcttcctgcttgcccagaaagggcttcatctggaagaacactccgtttgctctctgtccctatcccccatctctaagtagagagaagttgagtggcagtgactactccctgcaagaagctctcctccctttctgagcagcaatgaaatgtggaatggcagcaggaccctcttcttcatccagttcttagagactttgttcaaaccataacctagtatgagtctatctatggttagtgcttatcacactgaaggtctgtaacggtaggtggagggttagttagtctaggtgtccctcggctctcaagcacctgactcagggcctggcccatttcccaggcatcatgtgtgtttgtaataatgactgagctcagaaccaaggatgccttgctgactgggctgcagtgcatttactgagcagtctcatcatctccaggcaggctataggtgccttgctgtgtggaaatcacaaaggcatgccttctacaaagtctgtgacatgggtgtcaatctagggtgtgttgaagtggctgggtctccctgggcacaaccgtgaatattgagcttgttcaaataccagaatgggaggtaaagaatgcctggtttgaaccccagatctatctctttatagctcgtgaccttggaaaagcacttctcaatgaacttcagtttcattctctgtaatattttaaaataataaaatctccccagtggggctattgaatagattatgtaaatgaagcagttggccctgggcttggtacatgttaagactgcagtatcttagctcttggcactccagacacagcataactccttaactccttactatatgtgtagaattcaattatgaatgtttttcttttgatgattctgttcagcaggcagcaagcatttatctaggctccatactgggagtctcagcaaggtaaaatgaccctttttttcctttttatcttttgtgatgctaggtactgaactcagaactttgcccaggctaggccagtacactcttatagagctacctctctagacccacctgtttcttaggagagtctgctgtgcggctcatcctagagtaaaaacaatgacattaacctaagttaacacatgcctgtgggccccagtgtacacaacctcatgttgagtcaatttgagttattttcacaacggcagtcctccctgggagaggccattatggaatgatgtctgtatctccaaatgcatacgttacaagttaaccccaaatgcaatattagcattagaaagtagggctttggggagagagtaggccatagagatggaacactcatgaatgggactaattccattaaattaggcctcaaaactccttcacactccttaaaccataagattacaagaagtcataaagccgacatatgctgtggtaaacacggtcctttctagaccccagccacattgggactgtggtaccaggctttccttttctattctttctgagtgagaaaaatacaaaaatacactcctcctgttcataagccacttggtctaaggtgctctgctacagctgatttgatgggactgatgctgagggaccacagtgaaaaggtaggcgactgtgagcaagaaggcacactgatctgagagctagggctctcttctctataagaaatagccgagatgtgttgatttgtttatgtcttataaatcttattatatagaatattttgctcttttaaatgtgtaataatacttgataaaacctttactatctattatttccactttgataaactgaatgagattcttagatatctttataattaaatgtttgcatttttattaaaagaaaaaaagaaagaaagaaatagccaagagaggggagcccttgtgttccgtgaatgggagtcaaagcaaactctttcttctttttaagttgctcttggtcatggtgtttcaacacaacaacagaaaagtaaccagtacatctgctaacagagaagcatccctaggatgtccaacaaaaggcagggacagtcatggcgaaggccttgttctgcccttagctactaggctgagaaaatggtgggcaatgagcactgggagtacagtgctgtgcattgactgggtgggtagggtggggatcttttctcttgaggaattgtagagctgtataaaatggttatctgaccaggaggcttgctactagaggcaaagcctcacagggacatatgcctgaaatctttaacctggagaggccctgtgggaagatcctggcagtgataagcacttgcatgtactaagcataaaatacagcaaaataacatctccggtaagattgtctacatatggaaagatgttcagatagcaaaatgccacgtctccctccacctctcactgtgaccactctactgtctgtttcagtgggcctttaaaatacctctctgctgcccactaaacaagcacatgtcaatatttattgagcacccactgtaaagcaagtagcatgtatacatcctagggagaagcttgtgccaagtgtgcagggttggttcatgtgttggaaggccatcttttgggggtggagccaggtgtgagctcttgctcctgaaggaacagcacctcacagtaactgtgagtaccattcctcactcactccttctgagctaccatgctgctctccgcattgcttatagtttacaagacaaggatctacttctccctaccccgcaggcaagtgagggcaggttaaatgggacatagactcctaaggcatagagaactgtaaggtgtccagttaatgagacccctgtgcattgtgcagcaagttgatttgtccaatatggaaactttttgtccttctcctgtgatttagaggccaggaagaaagctacccaccattttcctcttccttttaccaaattctttctcaaagacagttggtccttcccattcatattaggtcagggagctcaagtggacaaacttgagtaaacacatgggttctgcatcagagcctgccctacgcttcatacacatgatacaattgtggttctatgcccatcatgaggcccagcatctcagatgccagagattgctattgagacaggggacagatattagcaagctgctatgaaatcttgactttgaattttatctgagccgtatgttcccagaaaagaaaaatatcagctctctgcctactactaagagaaaaatagtgaacagaggaggtaacccctgtgaaagatggttgcctggtgtggggagagtcacagctttcccccatcctttcattctgtccctttaaaagggctttcaatcttcaggaatggcttcttcctgtctgtgaatatttttgttatttgtacaagtttcttggagatagcatcaccccattttggtcttctatataaatatacatatttctaaagttagaaacttatgatgttttcccacaaagcacattcatttatcatttctctttcctcagtaaatttgggattgtgtttaaagtgtctctgtttccaatgcatggagctctactcctaagctagtttgtgacagggggtgtgcctgctgtgacccccatgagacagatctgcctctcttctgggagtgcaggggaagacatggcgtgttgatcacccacgcagcgtggagattctaactgctgggaggagtatgctcctctccagaaccaaaaggtccaggggataggccttggaagcgtggctgctttctcgtttggttctggctgagaagtaactctgaccgttctgggagtccgggcattttggatgaaaccattcattacatcctttgctcctatcttaaagagtgtatgtgggaacacctaagcacaatgacacaggccaggctgaagtgaagtgacagtaagatagtggctctgaggatatcagccccaggctagctagtaagtagcaaggttagctgctacgagggcagacggctgacagctcacagtcactagtccatgaacccagaagtttcattgaatagtagatactatgtcacattgattttactacccacgatacccatacacatgaccaaaagacaaaaacagtctagtgttctaaatatgctaaggcaaagtaaatagacttgtttatcgtaaaactgagagtactcagccacaaccacacacagattcagaggtcagcaggaagatagttcctctgtagatactgaacctgtgtatttgtggctgctcctccttgcaaaacagtgctaacttgactggacttaagatggccagctggctgtcttatcgttaatctgtttaggagagatagagaatgaagctagatccaaagaggtgacatcaggagcaagataccttcttccccactctgctaaatctcaaagtggaagaagtctttaagccaaagaggccagccaggtggccttgagaatctaaggaagtgttggtgtgtgggtgtcagctcactgagaccaacttcatacttctgagtcctggcacagaaggatagtagacccttttaagtttctctcttgtcattggagcagagtccaccatggttaccccagctaccagcaaggctgagagaaggcaggtttgggagcagtatacaccatgagcagtacactaataagagggagaacaattgtatttaggaaatgaatagtatagtgtatatactatactattctactctcatagcttggaagtgaagagttgacatctcagggctagctcaatcaatgctgtgacccactgggtgaaaacctgatcttactgcacaaagccatatggaaatataagttcaaggtgcctgtgagacttcttaggggagagagcacaaattagagctcccaagctgaagataggatcttcttctcagaaagggtgcgtgaggcaggacgaacaggacaggtggatgctcagggacaagagtatgtgcatgtacagggactagagttgagcgtggaggcagagcaggggagagtaccaggacagaaaggttcttgccagttctagaaggagcccaggctttatgatgtggttgcaggaagccatgactgagaaagatcatggcacaggacactgggtgctttaaatgatggatcacctgtggctagctgaggacctcaggaactcaagcagtgcagcaatctagaggcaggaactgatgcagaggccatggaggagtggtgcttactgacttgctcctcatggcttgtgcagactgctttattaaagaacccaggaccaccagcccaggagcggccctacccacaatgggctaggccttttgtcatcaatccctaataaataaaatgccctacacttttgtctacttacagctcaatcttctggagtcattttcttaattaaacttccctcctctcagaagactatagtctttgtctagttgacataaaactagcacagacagacacacatatacataattccctacacatagacatgtgcaaacccatctttccatgttttctcagagtctctctctctctctctctctctctctctcacacacacacacacacacacacacacacgcaagagtttggctcttggattctttaagaagtggcttcagccatttgctgggctgcagccccagatacttgcttaccatggacactaatgatatctagagaaagcattctccaaggcatgactcaagttatttgagatgtgaaggatgcctaagttatgcagtctcctggcatggcagcaacagtggcagagatgatggtggtcttgactttctgtctcttgaaaggcataaggatccctatcctgacaagacccttcaactaggatccgtgggttgaatccacttgtctgcttgcagtcctgcagtggccctcaggcttggtatgagggcagcatgtactagaagggtactgctagttgtatttattcagacatataaattaaatgataaaacaatgtctccccactctgtccttctggtttcttctcattattggccagctgaagtatttttcatcttcctttaaccatgtatttatgtgccatgctgggtccaactttcgctgtatgaagcctggcagttccaatgccccatggtgactgagctcaaacttatttaagtagatggtgctgataaggatgtggccattagccccagcacaggtgttcgggatctggtgccaaggagttatttgcacactgttttgagagctctgggtgaagggatgccgcagatgtgtcctgcttcttctgatccttggtggctttaaagagttcctatcaatgccagctagtgagaatgttttctcctttcctcattgctgctgggattcagccatgagttacagctccttcttccattaattatcttggtttgccatatgtctgcgtcattgaccgtgtctctgggctgttttggtgccccaggaggtagtagttagtgtcgtctcgaacagaagaacatgtgctcaggttgagactctgaaggtgctgagggctgtgagccgaaggccaagagctgccaagagggaagaagtactcactgcaggcttccagtggaccaccccttttctgtggtctttctgtaggacaaggcagctaactcctcatagttttctcttggccaatgttgggtgctgaggatacaatatagattgtgcccagtccagaggactatgctgttggtcctgctctctgttgtatgatcgtgagggatgactgagggcatggagtctttcggtgtactcttattaaagagataataaaatgagatccagcccaagaaactgataagagactaggggagaggctgtgtggtggtccaaccacctgctgcccttttggctcagttttgggttggagtaattaattacctgaagctcatgtccaccagaagcacaggaacctgggtgtggccttatcctctgcttggccatccatggctgtgttaagtgtagtaccttgcagacagctttccatctttcctgagccccacactccctgagacttgggtgctaagatccttcagatgctgtggggagtgatggctagggtaaataaacactgatgcttatctgcacaccaagtattgctgttctccccagatgctataagtctgcttagagaacttagaggtggactgtaacacaaaaccaatttggggtcataaaggcctggggagtgacgcaggctgcatcttccttgagggtctgtgagcaagagcaatatctgagactttcttgaaagttgggaaggagaggatttaagcttgtggggatggattttatatagacagtggagaggaagctgaagaagggtgagaaggaaggagaggtgaggaatatggaacgagtggagtgattggaagatcccagatgacatgacatatcaaaatatccatccatgctgcagagcggaccatgagatgaaggtgaagaaagagacagggtctccacaggaagctgctctccagcagcaatagatctgccaaggataggtcactagcatcattctggaacatctgaggtgagcagaagtactgaacataggacctgatgttgtgaataatttatgcagtcccatggattaaggttttctattagactctctgtgctgctaataatttagctgacagacatgttagatgcagcattgggagacatagaatatccatctcagggggtaatgacactgtgaaagccatattatttctgcgacagagaacaattttaagcctgtgctaatagattaaactgctggagtgatcattttgaacaaagagaatggttagagctgtacaagctaacctttgtctgcctcggatggctaaagagcaataattctaccctatcaatctggggcatgtgatatcgttagtcactgccacgctcgccagctgaggaagaacgagctctaggttccactcatgcacaccgggtccagcgtttgctctttgtgagctgcttgaccttagttgagtcactggaccctaggggcttcacgatgccatttgtgaagagggaacaggtagtatgtatgaggaactggagtgaggcttgagggagtgttcagtaaccacagcaggaaacagctgttgacttctgtgggagcagggtaggcagtgcatgcctacagaaatggcagaaaagcagaatgagcaggtcacacttagaatgcttgaggagcgcacatatcccaaaggctcataagcccctctgtaaagcagctccttgcctctggctcatcctcactgtggagctcctaagtatgtggagaaggtggacttggggagcaccaagttagcttgacctgcttaacctaacacgtgcttatgctaggacttcagtgaaatgcacagctagcatcgtctgtcacctttcctgatgatccattgtgatgttccatgcataagaatcaatagacagacgaatgtagtacaggttttggtgacaagaccaacctggggctagatattaaagacaaaaaacaaatgggaaaagggttctcttaaatggacttcagcacctagaaaaggtagcagacaaaatagaaatgttcagcaggatggtaagagagcgagcgtagatgggcggaggcctggacttctcagaaatgtctgccttgctttatgaaataaaggcttggtctgtgtgtgagctgctaaggcacttagatctgaagagctcattgcaaacatcgctttaaacctcatctgcccttccctgcagccttcaccctgccatactgagtacagccgggtatatcacatgagctcattgtggctctctccttctgctcaccacatggtaccaccacacttacctggcatgcactgtagtttgtggacatgtttcctgaggacctcaatgtttatcacccaccctccttccttcctcctcatagtttgctatcaggtgagggaggaggtttgcagcatcctattctcccgttaggtactgtctttcaacgaaagaaattaatatttacctccacagccttggttttggtgcatttttgcagataaatgaaatggaaataaatagtaaaaggaaataaatgtcttgggttgtcttggtttatacatacagaaatggctagataagttagcagttttctctcagaatagctttacagctactgaattctctctgtcataatcttcttttagcatctaacatcaagatgcccagattgcacccacagctgtctccccctctaatctctccccccacagtctctatgagctgaaccttccctacttagtctttctaaggtaggtatgctggtccttcttttactttgggcaagccaaagattgtagagcatcttgcccaggcttcctggaagtgctggaactgacattcatacctgctcagtgcatcccagagaatgtcacccttgtcactcaggccctgaaaggatagctactccaaatctcctagggaccagtggactgtccaccagccccttatctgtttttcagcccatccctttgttttacaatctatgttcttagttcttcctaaatttgtctcctattcctcttctctggttaaagatgattttattattacaaattgccaacagcccagagctgattgatagtcagggacatgatacgttggcattggtaggaatttggactctgcagtctccaagcaatcaaagtcctggctattgaaatcagctggttttctctactatcaatgttccctgaccttccctgccccagcactgtggcagcatggatctattggcaggcctccaaagaattgccaggcatctgcattgatggacagcccctggggactgtagcatttgaagtgcgactcccagagtagcaaaaacaaagaaaccaggaagaacctagccactttttcagtgtcaaatggaccaggtatatatctttaggagtctcctaatctatgctgcatgcttctgcatttcataaccccatggtacctttgtgactccacaccttggaggttccatttgcaacatgggaaagacctgaccttgtcactctgtgtcatggagtctcattctcctcttccatgaagaggggcgagacaatatagcatcgatgagaggactgcatgcggctcccaatgcccatttgtaatgttgacattattgttggacctatgtcacctttcactttccctcctaggtcaccgatgaggagcccagttccaaccacacagtcatgattcaggagactctccagcaggcctccgtggagctggccgagcagcaccatctggtggtgtcctctgacgacgtggagggcatagagacagtgacggtgtacacacagggtggggaggcctcagagttcatcgtatacgtgcaagaggctgtacagcccgtggaggagcaggttggggagcagccagccccagaactctag

SEQ ID NO: 381 - DNA, 3882 bp, Mus musculus
ccgccatgttggatgccgcagattcgccataacctctccggctctttccctaaaaaaatcaaaataaagagcgaagtttcctcagggtgtccgactttctcgctcagcccgggagggagccgggaagagcccgaggctttttttttcctccgccgtgggggcgttgccatggagacgcggacggcagaaaacacagccatcttcatgtgtaaatgctgtaatcttttctcaccaaatcagtcagaactcgtgacccacgtttctgagaagcatggggaagaaggggtcaatgtggatgacgtcatcattcccctccggcctctgaacactccagaaaaccccaacccaagcaagggtggagatgagtttttggttatgaagagaaagagagggaggcctaagggttccacaaagaagcccagcactgaagaggaggtggtagaaaacctcgtgagccccagtgaggacggtcccctggctacagaggaagggagcagactggcccccagcagcttggagtgtagcaagtgctgccggaagttctccaacacacgccagctgcgcaagcacatctgcatcattgtgctgaatctgggtgaggaggatggagatgcaggtaacgagtcagaccttgatctagaaaagacatacaaagaagatgatcgagaaaaggcttcaaaaagaccccgggctcagaaaacagagaaagtccagaagatctcaggaaaggaggcagggcagctttctggagcgaagaaacccatcatcagcgtggtcttaactgctcatgaagcaattccaggtgctaccaagattatcccagtggaggctgggcctcccgaaacaggagcaccccctccagagaccactgcagcagacctggtgccgcggagagggtaccaagaatacgccatccagcagaccccatatgagcagcccatgaagtcaagcaggttaggtcccacccagctgaagatcttcacttgtgagtactgcaacaaggtgttcaagttcaagcactctctgcaggcccacctgaggatccacacgaacgagaagccatacaagtgctcccagtgcagctatgccagcgccatcaaggccaacctcaacgttcacctgcgcaagcacaccggagagaaattcgcctgcgactactgctccttcacctgcctcagcaagggccacctcaaggtgcacatcgagcgggtacacaagaagatcaaacagcattgccgcttctgcaagaagaaatactcagatgtcaagaacctcatcaagcacatccgggacatgcatgacccgcaggacaagaaggtcaaggaggccttagacgagctccgcctcatgacaagggagggcaagcggcagctgctctacgactgccacatctgcgagcgcaagttcaagaatgagctagaccgagaccgccacatgctggttcatggtgacaagtggccctttgcctgcgagctctgtggccatggggccactaagtaccaggccctggaactgcatgtccgaaagcacccctttgtgtatgtctgtgctctatgtctcaagaagttcgtcagctccatcaggctgcgctcccatatccgagaggtgcatggggcggcccaggagaccttggtgtttaccagctccatcaaccagagtttctgcctcctggagccgggcggggacatccagcaggaagccttgggggaccagctacagctggcagctgaggaatttgtgtgtccagaaattgatgtacgcaaggaggaggcttgtcctggggaagctcagcctgaggtggggttgagggagttggtggtccctggagatgcacatgcccctccacctgggcccttggccaccccccagagtgaaagtagttccctgtccccctgcaaactagaaaccactgtggtctcctccgacctcaactctcttggagtggtttcagatgattttttactgaaaagcgatacctcctctgctgagcctcccgctgctgccgaggcaacctcggatacacagcatcgagactcagcccagactcagggtgaagaagtcacactgctgctggccaaggccaaaagtgctggaccagacccagagagctctccgggtggaaggcagaaggtgggtgctctgccagccagtgaatctgactctagcacatgtctcagggcaaacccaacagaagcctcagacctccttcctacagtgactgatggaggggaccttggtgtgtgccagcctgactcctgcacaccatcctctgagcaccaccctggcagcacagcattcatgaaggtcctggacagtctccagaagaagcagatgaacaccagtctttgtgagcggatccggaaggtttacggagacctggagtgtgaatactgcggcaaacttttttggtaccaggtgcattttgacatgcatgtccgcacccacacccgggaacatctgtattattgctcccagtgtcactattcttccatcaccaaaaactgccttaaacgccatgtaattcagaaacacagtaacatcttgctgaagtgccccactgacggctgtgactactcgactccagataaatataagctgcaggcccatcttaaagttcacacagagctggacaaaaggagttattcttgtcctgtatgtgaaaaatcattttcagaagaccgattgataaagtcacatatcaagactaatcatccagaggtctccatgaataccatttctgaggttcttgggagaagagtccagctcaaagggctaattggaaagcgagccatgaagtgtccatattgtgatttctatttcatgaagaatggctcagaccttcagcggcacatctgggctcatgagggtgtgaagcccttcaagtgttctctgtgtgaatatgcaactcgtagcaagagcaacctcaaagctcatatgaatcgtcacagcactgagaagacccacctctgtgacatgtgtggcaagaaattcaaatccaaagggacactgaaaagtcataagctccttcacacgtctgatgggaagcaattcaagtgcacggtgtgtgactacacagcagcccagaaaccccagctgctgcgacacatggagcagcatgcctccttcaagcctttccgctgtgctcactgtcattactcttgtaacatctctggatctctgaaaagacactacaacaggaagcaccccaatgaggagtacaccaacgtgggcagcggggagctcgcagctgaagccctcatccagcaaggtggtctgaagtgtcctgtttgcagctttgtgtatggaaccaaatgggagttcaacagacacttgaagaacaaacatggcttgaaggtagtggagattgatggagaccccaaatgggagccagcagcagagactcccgaggagccctccacccagtatctctacatcactgaagctgaagatgttcaggggacacaagcagctgtggctgcacttcaggacctgagatatacctccgagagtggtgatcgacttgaccccaccgctgtgaatatcctgcagcagatcattgaactaggttcggagacccacgatgctgctgctgtggcctctgtggttgccatggcgcccggcacagtgactgttgtaaagcaggtcaccgatgaggagcccagttccaaccacacagtcatgattcaggagactctccagcaggcctccgtggagctggccgagcagcaccatctggtggtgtcctctgacgacgtggagggcatagagacagtgacggtgtacacacagggtggggaggcctcagagttcatcgtatacgtgcaagaggctgtacagcccgtggaggagcaggttggggagcagccagccccagaactctag

SEQ ID NO: 382 - protein, 1287 aa, Mus musculus
MPQIRHNLSGSFPKKIKIKSEVSSGCPTFSLSPGGSREEPEAFFFLRRGGVAMRTAENTAIFMCKCCNLFSPNQSELVTHVSEKHGEEGVNVDDVIIPLRPLNTPENPNPSKGGDEFLVMKRKRGRPKGSTKKPSTEEEVVENLVSPSEDGPLATEEGSRLAPSSLECSKCCRKFSNTRQLRKHICIIVLNLGEEDGDAGNESDLDLEKTYKEDDREKASKRPRAQKTEKVQKISGKEAGQLSGAKKPIISVVLTAHEAIPGATKIIPVEAGPPETGAPPPETTAADLVPRRGYQEYAIQQTPYEQPMKSSRLGPTQLKIFTCEYCNKVFKFKHSLQAHLRIHTNEKPYKCSQCSYASAIKANLNVHLRKHTGEKFACDYCSFTCLSKGHLKVHIERVHKKIKQHCRFCKKKYSDVKNLIKHIRDMHDPQDKKVKEALDELRLMTREGKRQLLYDCHICERKFKNELDRDRHMLVHGDKWPFACELCGHGATKYQALELHVRKHPFVYVCALCLKKFVSSIRLRSHIREVHGAAQETLVFTSSINQSFCLLEPGGDIQQEALGDQLQLAAEEFVCPEIDVRKEEACPGEAQPEVGLRELVVPGDAHAPPPGPLATPQSESSSLSPCKLETTVVSSDLNSLGVVSDDFLLKSDTSSAEPPAAAEATSDTQHRDSAQTQGEEVTLLLAKAKSAGPDPESSPGGRQKVGALPASESDSSTCLRANPTEASDLLPTVTDGGDLGVCQPDSCTPSSEHHPGSTAFMKVLDSLQKKQMNTSLCERIRKVYGDLECEYCGKLFWYQVHFDMHVRTHTREHLYYCSQCHYSSITKNCLKRHVIQKHSNILLKCPTDGCDYSTPDKYKLQAHLKVHTELDKRSYSCPVCEKSFSEDRLIKSHIKTNHPEVSMNTISEVLGRRVQLKGLIGKRAMKCPYCDFYFMKNGSDLQRHIWAHEGVKPFKCSLCEYATRSKSNLKAHMNRHSTEKTHLCDMCGKKFKSKGTLKSHKLLHTSDGKQFKCTVCDYTAAQKPQLLRHMEQHASFKPFRCAHCHYSCNISGSLKRHYNRKHPNEEYTNVGSGELAAEALIQQGGLKCPVCSFVYGTKWEFNRHLKNKHGLKVVEIDGDPKWEPAAETPEEPSTQYLYITEAEDVQGTQAAVAALQDLRYTSESGDRLDPTAVNILQQIIELGSETHDAAAVASVVAMAPGTVTVVKQVTDEEPSSNHTVMIQETLQQASVELAEQHHLVVSSDDVEGIETVTVYTQGGEASEFIVYVQEAVQPVEEQVGEQPAPEL

SEQ ID NO: 383 - DNA, 186968 bp, Homo sapiens
gagtctgagaagaaagggtgtagatggagaggcggtggcctcacctctgcatgctccgtgggaagcggcggaggcgcccagcatccctcctactctgcccttggtggaggtttacgaggtaattctcccgatgcgagtttccactctgaactttcctgttgattcctgggtggtttcagaggtgtctcggctgttctccactcctggtcgcctatagcaactcctggcaggaacgctgtactgctttgcagggtggcctgggactcaggggctgccttggttggctagagatgcggcctgggtctggggagcctccttgcttagagatggcccgcgcctggcggtggcacctccttggttagagatggggccagggcctgggggtggcacctccttggttagagatggggccagggccttagggtggtgcctgtttggttagaaatgcgggcagggcttgggggcagctcctccttagttagagacgcaggcagggcctggggatggtgcctccttggttaaagacctgggtgtctagagggtggcaccttattcgttagagatgggacttgggcctgcggatgggctcctccttggttagagatgcgggtagggcctgggggcagcgcctccttggttagagatgccgcctgggcctgggggtggtggtacctccttgtttagagaggcaggcagggcctgggggtggcgcctccttgattagagacgcagtcagggcctggggggcggtgctgcctttgttagagatggccgaggcctagggggtggtgccaccttggttagagatgcgggcaaggcctgggggcagcgcctccttggttagagatgctgcctgggcctgggggggcggtgccacctttgttagagatgacccaggcttggggagtggcgccaccttggttagagatgcgggcagggcctgagggcagcgccttcctggttagagatgccgcctgggcctgggggtggtggtgcttccttggttagagatgcaggcagggcctgggggtgggggcggtgccgcctttgttagagatggcccaggcctgggggctggcgccatcttggttaagatggccgggcctggagggtgtcgcctccttggttggagatggccgggcctgggggcggcgcatccttagttacggacggagggcctgggcctggcagccggggagtggctcttgcctttcagagacaaagatggagagagcaaggggtgtgggatttgctcaagagcatggccaggggccctactgggagcagagccgaggcttctcacttctcagagcgtctgcgagggccttcctggccggggtgcctcccggggaggatgtggacgcaacccccttgccctgggtctggagtgagctcctccactgcagcctgggccatggttagttcgtcctcctctggccgctgccttcttctgggttctccctgcctggctccctcccctgaagccctgaggcccatcagtttgcggtgcgaccatcctgctgtgggcatgagaatcctccctttcccaggtgacttcattttcgtgttttttttccaatgtggagatgtcttttgagaactaattttccaactttaaaaaatgaagaccttagatatataatgaggcaacatttagggagttgtagttatagtgataactacggtaatggatttgattgctttttctatttaatactccgaatgtcttctagggagaaaggctttggttacatggacaccttttattctttgagccaacttgatttgaggattccaatggggagggggcacaggaacacacgagagctgaagtttctgcaagtaaaagaccatggatctggagcttctggagcctttagagaggcagggaagatccagcgatggggaggagaggcaaatgaactaggaggatggctaaatggagcctgttgtgtgttgacctctccttgagatgctcaaataccgaaggcatgttggatgtagggtttgttctcatttaacctgttattatgacataatttatacttacagaaaaatggagagagtagtacaaaaacttttcatatgcccttcactcagtctcctgagtgttagtattttactacattgctttgtcctctgtctcagccatttgggataaagttgcagagctgatgcccctttgcctattcctaagtatcttcggtgtttatttcctaaacacaaggacattctcccacataaccacatttcagttatcaaagtgagaaacagcatcagtgtagcgctcctcttgagatgtcactgattgtcccagcgacaccctttatggcggaaggacacctcagccacgtgcctcattccagcgtcttttttatggcggaaggacacctcagctgcgccccgcgttccagcgtcatgtctcttcactctgaatgtggagcgctgcctctggccttgtgttccaggacattgatatttttgtggagtatgggccagttattttgtagactctacctccctttggctgtgtgtaatgcttcctggtgagtggatttaaattctgcatttctgggcaggaattgcgcagaaataatgctgcgttctcagcacaccatagcaggagacacgtgatcatgatttgtcccattgctggtgatgctacatatttgagaaggtcaggtttcttcactgtaaagttactgtatttcccctttgtaatgaaatgccttgtggtgagctatttgagacagtgtgtttatcctgctactcctcactccaaggactttcttcattcagtagtttcagcacccattgatgattcttgccagacttggttagcatcaggatggctgctacgtgatgggtgtctaattccgtcatttcttccgcatttactagttgtcttctcccaccccccgcgccccgttttattgaggtataattaacaaaaattgtatgtaagtaaggtatacaatgtgatgctttgatacaggcatgcattgtgaaatgattattacagtcagctaattcacatagccgcacctcacattgttactattttgttttactagttgtctgtgtaaggaagaacgttctcttttcctttatttatatttgtgtagactcaggaatgcttattttagtcagtggtctgtaatcttttctcattgtttaatttggtgctcagattgccccatatttggccagttgtgttaaagtgggcctttgtattccttcagcgtgcccccgcttttgtgaggacttccttacttctggtacaagagattctgggctcattttctgctttccctgttccagctctggaatcaactatttctacaaggagacctggtttcttttagtggagagtggcatttagaaacggagatctgggaactaggtgagctgggtgtcattgcctctccaccctctcagaaacacagctaggaaacagaagtatgtatgtacatatacgagacatacatgtatctaaattcaagacacacctacacaatctgtatttccctcttaaaaatcattgagttcacatggatttttccagttgcaattcaacagcacagtgtattctatcctctctcctttccatattgataactcccttctctgacaaagaaaaatctggatctcactatccataatatagttacttatttgctcagtcctggactatactaaaaatagtttcagaatcaggaaaccatgtctttgtgaaaaagaagcctgctacctagagttcagtatttaattagagctcttcttctctttagcccgaggcatctggtgtaaacagcagcttccaaagttacttgggttgatcgtctcctatttcagtgcaattatggttattcatttaaagtatggttttgttcatttgtttgtttgtattttgttttaagatttcctcccatacttgtttattgtatttactttcatcctttgactaggtgaattttggaggtgagcgtatttcagtgaaaggactgagtttcgcttctttttgtttgtggggcatgaacagagaatggcagaggcctgagggtgtaagtttccaggaaggagtagaagtcctgggcggccatggccctgaagggacttgccccattgaggtagggctggggcgcacctgctgacacctggattctgaaacccttcagcgagagtctttcttccagtgctttgtcttggttctggtttctcttccttcaaatcaccattctgatttgcatttattcccattttatagatgaagagtcagagagtcagagaagttgtgttttctcctctgctggggattggactgggggctttcccaccctgagcctgatctttcttccttggcacaccatcttccttttctagaaaatgagcgttaagaatgacttagttcaggccgggcacggtggcttacgtctgtaatctcagcactttgggaggctgaggtgggagttcgagaccagcctgaccaacatggagaaaccctgtctctactaaaatacaaaattagccaggtgtggtggtgcatgcctgtaatcccagctacttgggaggctgaggcaggagaattgcttgaacccaggagggttcagttagttcagattattctcagggtttcttaagtgaacactctggaaatgttctggtcttcatgataaaggaaatgcaggtaaatatcttttatagctttaacatggatcttttaaagcactttactatattttgaattaaatgatattgatgattttggagcttacaatctattgagggagacaggttaaaccaataagcacagcattaaatacatgattacaaatcgtggtcatattacaaggcaaataagcaggagggagtaccagagacctcattaatattgaaggggatttacgaaaagtctctctgagaaagctaggatggagctgagacttgaagaatgaagttcctgaattaataaagtctgaaaaccagcgagcaggtgcttgcttacccgtcctcctcaccttgcaaaattgcaagcctgcaggccagaacaagctgccctgtggccagagttctcgtttgtcttttatcgccccctaggggacatgtgtgtgaatggacctgctacaggtggcttgggagacactgtgtccgtggaggcgcccgctgcagcggagactggcctcctggccaccaccacagtgcaggccccgcctgagcatggggctgaagggccaggatgccaggcctgcaggagagaagacccagggccactggatagcttgttcagatgcttacagcacttggctatgggagggactggccttgccagggtcaccctgaggctgtactagcctagcatggtgagggaaaaggggggcagcctttctgtggctcccagtgatgtaaacacaggtggcagctgaccacagtgatgcctctgcatcgaggggagggccaggtaggactttctgaccttgtttggatacaggctgggaagctggacttggacactctgtcctttccaacagcaagagtctacaaaactagattataaataacaccacagtcatgtaaaattattctcatgaacaaaatggaattgcttatttatgttcctggtggggagagtctgtgtcttcctcatttctgattgcacctagcatggtgagtgacagatgtcaggcattcatttagtgttgaattatgaggccaatgcacataaattcaaagaattctgcttttttctcctaataaaaactgaacagcccagatatttggagaatacattaaatatttattttgtattttggttaccaggaaaaatgggccagatcattttggtaggctggggatgggttgaggggatggtttggagaattcttcttttcccagtgtctctccttccttaaatttaaagctctactctggaatttggaaagaccctagacacatgtaaatactagggggaagttcattcttcaggatttaatttgaaaatcagaacattttatataactgagcccaatataactgaggccaatctcagactttcataaagcggacatttggaattgaagttgtatgttttccacatctgcctccagttcctgcccagcctgttattttatctccttgatcaagacctcaggatccctgagcacacagtcagcttttaaacctgtgacaataataaatgaaaatattcgtccgtcatctgcctctcctgtaacagtgcggacagggacttggtctgcaggttctaagtctgctaattctttgtctcgattttcctaactcttgaatctcaaagagtttgggggtggtggaagccttctcctaccccgctggaggtcagggagtagaacctgtgtattacatttctctcgtctgcagggaaaagttgcctggtattctggaaataatgtgaatactgggttcatgcctagtccaaactttgatgtgctgtaggtgaaaaataacacactggctgttgaagacttagtacacaaaatttaaaatttctcattgatctttgaaaatagattgtaagtgaaatgattctattttggatatactgggttaaagaaaacatcattaaaattattttttcttgattattttattttaatatggctactggaaaattttaaatgacatcagtggccatgctgtgtatctgttggacagcagtggcctggacaaagcatccagcctcttgccccgtgctttcacaggcctgggctggagtgtgtgtccttgtgcagagtcacgcatctgtccgtgtcctccagtctaggaggcgtccctggtgggggccatctccaggaatagtgcctagtaccttttaagaaaaaagtagctgttgactgaattcggccttctatattgttttcaagcctgtttcacctggtagattgaataccttgactgctggaaatgctacttgtttttctctttcatggctccctctgctctctatcgtagtatgcgaatcacatctttgttgaattaaaacatccctgaattaggggaaggaggctgggtagagtcagcatttctaaggacttgggttttgtctggcaggaattctcacccaccatggtgttgatgcagggcaggttcttggcttcgctcaggagggaattcaagagtgagctgccggtggtagtagaaaacagctttattgaggcagtgacagtgttaccgctcctgtggagcagggctaccccgtaggcagagcgccaagagtagcagtgctttgcggccaaatttatacccactttcaatgacgtgctaattaaggggcagattattcagaaatagctagaaagtgggtggtaacttccggcattgccatggcaaggcagtaacttttgggtgttgccattgcagtggtaaactgttacgctctggtgggcgtgtattatggtgatgggcagtgaggggtgctttaggcccctcttcccagttctggccagtcttcagtcaggtctggagttgaatcctgcctgccttctacctcagtgtgatgttagtaaactgcagaaacagggaaaagggcaggcagcaccttcatctgctgtgtgccaggcactgtgcttggtgcttcactggaataaactcctgcattttgaaaaccccaggaagcagagtggggaaaccatggctggacacgtctcatgaacaaatgggttgaatcccacctcctgcagctctcggttccctgaggctgcagcaagctcttatttggtctcttccttctcttgatgggttgaggatgcgatgggatagaaaatgcgggtagaatttgaggcccctgagggagagggtggaagtcgaaggtggcatgtgtgggaccctgaacgagtgttgtctttccagagctggaactgggtgacaattccctgctccctcccagggctcctgacagctcctccaagcacctgctgtggctcaaactctggaaacccaagtcctggctccttttcttccttttgtttcctccaccttccttctcccctttctcgtggctctttcttttctcagttcttgggatttggatccctgatttccactttctgtcattattgttgctgtgttgtttatattgtctctcaaaaagcttctgaattgcctgtgtctttggtttccctgaagaaagtgtatgtttgtgtgcgcatgtgtgctgtatgtgcatttgtgtatgtacacacgttttgcgggtgcatgtgtgcgcatgtgtatgttttatgtgtgtgtatgtgtatttgtatagatgtgtgttaaaggacagcagaagcaactagggacccagtaggtagctttagctgtctggctgaacgtttctggatttaaaaaattctctgttctcttcagcatcgacaccatctttagcagtctacaaagcccttttttcccagtattcccctacataacacccccaccacaagatcccccccaccgcccatcaatcttaccagggcagctgtggttatctccatttttgagctgagtccctacagattcaggaagggaaaggtggctccagtcacactgaagtggctgatgccatggggtttgaaccagggcttctgagccgagctcagcgctgaggctggctttcaggcagccctttacttcagaaacaagacgagaggcaggcctgccccacggaggaacagaaatacactaaagcaacgcagaccaacagctgtcaacccggatgtgcggtggtgatgggcattgctatttctccccagtactctagaaaatgggagaggattttgctccttttacttttgatgtggaaatgaccacagagacttggttacttagaggcatcacttgagagctgtgggtaggcggctcttcagggccacctcgtcagtttgcaaatggggagctgtcgtgtccagggtctgcagcgggacagggggtgttcctgtaccctcagcgcttcccacacatctgctctcggggtggggggctgttcctgtttatgtaaaatgatttgtggtgctttcctgagggccacattttaaagctatgattattgtgttaaatgtgaatgtattccattgcccaggggctctcattttgagagtgcttaaaaataacttaaaagaatttatgccaagtttcaacatggaagagatgtgtatgcataaaattataatgcaactgttggcccagccctaattatagctgatgctgagtatttctcattttattttgttaatccagcttcagcaaagaaacacccacgggatttctctcttgcctttaataaacacgttaactgtgtgagctatgggagttggcatgttcatcagcattttatgagatgcatgataatcatttcacaaattagtggtgtgcatttattggagcttcagcccactgagcatcagagctggaagggaggcaccttggagatgatttatgggcaggggagcagcaggaggcaggagggttggttcatattgtgtccctgcagggtggaggggaggtgggtgctggtgggtctgccccacacccttgctttggttgaagatgctgtctctgtctctctgcacgttagcctctgcatagggcttgaagactaggttccactttcaaacactccaaggccactattaatttgggctgctcttctttcagaagagacaatgagggataaagaaattcagagacgtatgcagaatccatccattggaagtgtgagagccacttaggagctgggaggcctgggcttctgacaaggtgggtacccctcatgatgcttcatgtagaatggtgcctctgaggggccaggcactaagctaggcacatcgtcttcgtgatgtcctgccgtcctctctgcagccctgtgcagaaggaaactgaagctcagagaggccaagtgtgtgtgcgcagggtcacacagctacgagggccaaaatagtgttccgatctatgttgttttaaatgagaggttcacttgtgaatcagaatatcgttttttttccctatatcttttcctttaaaatttgctgttcacattttcttagattaacgtgtaacatacatgtagagaaatatgcataggataaacagcttagtgaatgttcgcaaactgaactcactgcataaccagtgagtaaccagtatcacatctggaagcagaactcccctgcaccccagaagtctctggtcccagcccccaacccaggataaccaggactcagggcagggtggttgtgccttccttgtagccatgtcagtggaagcatgccacctggaccctgggttaggcttattcctctccgtgtcatttctgtcacatagaaatgtgggcatacacgggaaagccccataagagttgaaaataacttactcaggttgagaattggccaggtggcggccaatctgtggtcagagttggtctgagttacctgctggggctggccagggcacctgagctgtcagggcagctgcaccccctctggggaccagcagcagcagtgactccacctaggaagggcagcggggtctggtcctgggccaaggatgtgtgtttgggttgtagccctgctgtgtgcccacctgctgtatcaccttgtaatcccctacctggcccacttaactcgtcttaagatgggaacagcagcccctcacttactgggttaatgtgaaggttaagtggggtgacggggaaggcaccagccaagagttaggcaatcagtaaatactagccatgttttttaaaattatggcctagtcagatgtagtgccctggtgggccactggagggtgatgttagcacgtatatgtcgccctcccgttgatgaaggtctgtgctttctgcctgacagtaactcccggtgttgttttgctaaaagactgtctgcctcttacctggtggtctgctgttccctggttctggacctgctgccaacctgtgcagtgggcatgctcattaagtatgtggtttggggtgggttggtatcacttatatctggcatactgttattttccagctgttgctccccgaaatgaattgctgtagtaaattataacaaacacagcagagtccccttctccacgtagctacttttcttagttgtaattaatcatttgaaatgtccctctaaccatgacgctggctgtgggctggggagaccaagacttgcattcctcacagtattgctcactgtgagcattacaggaaataacaagcgatttcctgtagcagggctaggtaccaggtgggtgggcagatgtggtggtcgacttggtgggtcttggttaagttctggctttttaatttatctgactgggggctctttggcagctcactaacctgagccccaggtttctcctctgtaaaaaggggatggtgacggtggtggtggtgatggggatgacaccatgtactgggctgtttcacaggacagcagggagggtccagtgtggtcactaataggaacgtctgtgtgaccaacaggaggcagcgtaaacacctccttgcagctagtggctggggcaggggagggtgggggtgccactttgtgccatgaagtcttgatgtcttcctctccttcccatggctgacacgtggaaactcctagaacaccagctctgggagctcctgtgccttttcctggctggcctcctctaatcctggtgggctgtctgctcacctgggcactcctcgcacccagcccccacatttgcagttctggaatctggcactttgaggttaggctgcccacacctgccacacttaccaagtttctcgttgcaatgaatgaaacttttgtgccaagaatgccttttccccacgtaatctaaatctatcttgctactggttaaactagtttcctgtcttcttttattttttgggtcattttatcaatcaaacatacctttattacataaaggaagggagaagtgtaagacatatccctaccctgtccagtcaaacatctaatcaacgtcaaggagaaataccaggaacccagcagctgtgtctagagctggcgtgtccctatggtgtgggcagccctggccttgatctcggtcttgaatgagtgtttggtcctgaccaagacaagttgacgtgtctgaggcccaagctgtctggggatcagtaagtcttcctcctgtaagatggagatcttattattttgtcacttgctatcgctttatttctaacacccatgtaagtgtttttttaaatttaatttttcttggattacacatgtaattcctgttgtgtaagatgtgaaaaactcagagaaaatctccaaactggaaaaatcacactaattgtcatccacttacccaagccaggcactggtatggggtgttagggagctgggtggatgggcagaaggtgctgggtcgtctcctctgtccctttcaatgtccctgtactctctctttctcgtggtctgtgtgtctctgtttttttcagaccagtttccttggcttttcccctgtaagttaacagctttcccctagtcacccaagtggaaagctttttatcagaagttgcaaattggcaacccgtaggccagacctaacctgcagatttgcttagtttggtctgcaggggctgcagaggtttttttcttttcttttttttctttcccagaaaaatcttatttgatggccagtgcttaaaaatcaggggattccaactacaaattcaatatttgggcctccattgactagacctgggaggcagctaccccatcagacagagcaggctttctaagtgccccaccccctgtctccagacctccaggatgggcctcctgcttgcggggcaggagcttcttgcatccatttcctgtccaggtaccggtctgtggcggggggctcttggtggagccgccacagctctcagtgtgcctgccctgcctttaacctgtcctctttccacactcaaggctcttccaacaggcaaggctcttggttctgcccccactggctgtgtggcttccactcccttctcctttccttcctccagctgtctggccacctcctggagcagttcaacttccccttttctgacaaacctcttccaggtgctccagccacagggatctctgccttctccacacgtgcttctgtggcctgtggttagtatgttcatatgtagatgcgcacacatacaacctgctttcctacctaatttttaagctccttgcgattcatcaagtagctgtggaaccatacaggcctgtatttgattcttaggcaagttatagctttctcatctgtaacgtgggataatcatatctttgtgtctgacacattagcagagctactgtgtacagctgtgcaggttacacactgcacaaaggagccacttcttcttttgtttttgtatcctccatgcccccaagggagccacttctaagggggctcatttcacatagtgaatttgtatgtttattatgagttttctacaaatggctgcaaagcgtattattccaacaaactcaatatgttatgaccattttctgacagggggtgctagtgtcttaaggaagggtgcgtttgtccagttctcacagaggtgccttaagggctagcagcaacccagcttgtccagatcaaatgtgagagggagtacgaaagcctctggtactcaggaaatgtttatctcctctcccttgaaagtagggttgttgtgctgccatagaagtgagctcagaagccaggcttacagcctgagtgtgtacggtgtgcagagtggggaaaaagggccttacaggggagggagccgaggttgggagccaggctctctccccagctaacatccagcctgcccagttatatggaaatgtttctgaacttcattgattcaaagactttttaatttaatttaattttattttattttatttttgagatggagtttcactctgtcacccacaatggagtgcaatggcacaatctctgctcactgcaacctccgccttccaggctcaagcgatcctctcacctcagcctccccagtagctgtgaccacaggcaggcgccaccacacccggctaattttttgtatttttgatagagacaggtttcgccatgtcccttaggtggtctcgaactcctgagctcaagcgatctgcctgcctcagcctcccaaagtgctgggattataggcatgagccaccgtgcccggccagacttagattttagcatctctaagatcaggaggcagcttacagttggtgtggtgagaagctagtgtctctgagtttatttggcagcgtttttatcttttttagtggtatgtaaaatatccgtgctccctaaagtagatgctgtcttagatttgaggaaatacaataataaaacctatttcacaggattgttgtgagaattaaataagcctcgtatgagcctctgctggtgccagctcatggtgagggtttaatttaacctcccttctcatcggcttcttcctctttcaatgccattgttttggttacagcaagttttccctaagtataatgacggtaatgaagttgatgacatagtttattcacagctgattaaaagttctgcaagatgagctaaatggaaggaaaatgtttgttctaacctgagtctcttcctgaatatataaaaaagatattttaaactgtactcagctgcacatatgagactttattgattccgctggatgtgacagcaatctggctttatgttgttaaaatatttccattcctattgggaagctactggcccttattaaattaataacttaagggcaaatgaaaaacaagaaaacaaaagtataactcagaaagaatttgccaccctactcctctcctcataagatagataatttaataggatcttagttttggtggttgtactctctctaaagttaataaatacaagtaaaagatagttacaaagcagggaggatgatttatactaatcaaggagaagaagtaagagatgtttaatctagagcttttaaacagagtaatgtactagtctcataatgtagcattttgtcttcttgagggcattgataaatggttaatcattttgtaataatcagatcatctagcacttatggagtgcctactgtgtcagcagcatcatcgctaaggggaagctggcattgggctggtgaggctgtcactgcaggtaatgagtacaggtggtatgaaaggcagtgggcaaaggtgtggcagaagccagcccttcagaccctgcctctccccaccagctggtgtagagggtactgggcagaggtgtggggtccacagccagcccttcagaccccaaacctccccaccagctggtatagaaggtactgggcaaaggtgtggggtccatagccagcctttcagatcccaaacttccctcccagcagagatgggcacattcactgggctgcattctgtgtgtgcctctgggagctgcctccttctacctttctgagccttacatatcttccagggtagttgggactgactgggctcatggataagccacctagcagtgtacatgatcttctcaaaattattgtttgttccagaagatccagagtctttttgtttgccacagttatttttttaaatgtgtattttgaaataattatagattcacaggaagttgtaaagataatacagaagtctcacataccttttacccagtttacccaaaagtggtttacatttttaaaataaatataaaatatacacaacacaacacaaaatttaccattttaatcatttttcggtagatagtttagtggcatcaggtacgttagtattatgtaaccatcaccatccttgatctctagaactttttttttattatcccaacctaatagttacatcttatgtaactaactatcatacaatattaaaccaagaaattggtgccggtgcagtgtgttgtgtatagtttgaatccatttttattggtgtacgtttgtgtcattactcctgcagtcaagatgcagcactgtttgttgccatttgatctgtgtgagtgaagtgtagaaagcttcccaccatttacatccttttaccatccctcattttttttaaaaaaggtactcaaatatgttaattttattgtttctcaatacacacatttatttgtactgaaaattgtaaaagtagcacaaagtttctttttattacaatccaaatttttgaaagccagaaaatccaattattatgctctagccaaactatcatccagtgctttctttacattctttccccacaagtgactttgcttcaaattcttttttttttttttttttttgaggtggagtctggctctgtcacccaggctggagtacagtggtgcgatcatggctcactgcaatctccgcctccagggttcaagcgattctcctgcctcagcctcccaagtagctgggactgtaggcatgcaacaccttgcctggctaattttttctgtttttttttttaattatactttaagttcaggggtacatgtacagaacatgcaggtttgttacataggtatacatgtaccatggtggtttgctgcacccatcaacctgtcatctgcattaggtatttctcctaatgctatccctccccctccccaacccccaaccccccacaggccccagtgtgtaatgttcccttccctgtgtccatgtgttctcattgttcaactcccgtttatgagtgagaacatgcagtgtttggttttctgttcttgtgttagtttgctgagaatgatggtttccagcttcatccgtgtccctgcaaaggacatgaactcatcctttttttatggctgcatagtattccatggtgtatatgtgccacattttctttatccagtctatcactgatgggcatttgggttggttccaagtctttgctattgtgaacagtgctgtaataaacatatgtgtgaatgtgtctttatagtagaatgttttataatcctttggatatatacccagtaatgggattgctgggtcaaatggtatttctagttctagatccctgaggaatcgccacaccgtcttccgcaatggttgaactaatttactcccaccaacagtgtaaaagcgttagtatttctccacatcctctccactatctgttgtttcctgagtttttaatgatcgccattctaactggtgcgagatggtatctcattgtggttttgatttgcatttctctaataaccagtgatgatgagcattttttcatatgtttgttggctgcatgaatgtcttcttttgagaagtgtctattcatatccttcactcactttctgatggggttgtttgtttttttcttgtaaacttgtttaagttctttgtagattctggatattagcgctttttcggatggatagattgaaaaaattttctcctattcggtaggttgcctgttgactctgatgatagtttcttttgctgtgcagaaggtctttagtttaattagatcctatttgtcagtttcagcttttgttgccattgcttttggtgttttagtcatgaagtctttgctatgcctatgtcctgaatggtattgcctaggttttcttctagggtttttatggttttaggtcttatatttaagtctttaatttatcttgagttaatttttgtataaggtgtaaggaagggatccagtttcagctttctgcatatggctagccagttttcccagcaccatttattaaatagggaatcctttcctcattgcttgtttttgtcaggtttgtcaaagatcagatatctgtagatgtgtggtgttatttctgaggcctctgttctgttccattggtctatatatctgttttggtaccagtaacatgctgttttggttgctgtagccttgtagtatagtttgaaatcaggtagtgatttcaaagcctccagctttgttctttttgcttaggattgtcttggctatgtggtttctttatttggttccatatgaaatttaaagtagttttttacaattctgtgaagagtcaatggtagtttgatggggatagcattaaatctataaattactttgggcagtatggccattttcacaatattgattcttcctatccatgagcatttttccatttgtttgtgtcctctcttatttccttgagcagtggcttataattctccttgaagaggtccttcacatcccttgtaagttgtattcctaggtattttattctctttgtagcaattgtgaatgggagttcactcatgatttggctctctgtttgttactggtgtataggaatgcttgtgatttttgcacgttgattttatatcctgagactttgctgaagttgcttatcagcttaaggagattttgggctgagacaatggggttataaatatacaatcatgtcttctgcaaacagagacaatttgacttcctcttttcctaatcgaataccctttatttctttctcttgcctgattgccctggccagagcttccagtactgtgttgaataggagtggtgagagagggcatccttgtcttgtgccagttttcaaagggaatgcttccagtttttgcccattcaatacgatattggctgtgggtttgtcataaatagctgttattattttgagatacgttccatcaatacctagtttattgagagtttttagcatgaagggctgttgaattttgtcgaaggccttttcagcgtctattgagataatcgtggtttttgtcattggttctgtttacgtgatagattatgtttatttatttacgtatgttgaactagccttgcatcccagggatgaggccaacttaatcgtggtggacaagctttttgatgtgctgctggattcggtttgccagtattttattgagaattttcgtattgatgttcatcaggatattggcctaaatttttatttttttattttttattttgtctctgctaggttttggtatcaggatgatgctggcctcataaaatgagttagggaggattccctctttttctgttgtttggaatagtttcagaaggaatggtaccagctccttttcatacctctggtagaatttggctgtaaatccatctggtcctggactttttttggttggtaggctattcattactgcctcaatttcagaacttgttattggtgtattcagggattcaacttcttcctgatttagtcttgggagatgtatgtgtccaggaattagtccatttcttctagattttctagtttatttgcatagaggtgtttatagtattctctgatggtagtttgtatttctgtgggattggtagtgatggcccctttatcattttttattgcgtctatttgtttcttctctcttttcttctttattagtctggctagaagtctatctattttgttgatcttttcaaaaaaccagctactggattcattgatttttttgaagggtttttcgtatctctatctcctttagttctgctctgatcttagttatttcttgtcttctgctagctttcgaatttgtttgctcttctctagttcttttaattgtgatgttagggtgtcaattttagatctctcctactttttcttgtggtcatttagtgctataaatttccctctacacactgctttaaatgtgtcccagagattctggtatgttgtgtctttgttctcattggtttcaaagaacatctttatttctgccttcattttgtgatgtacccagtagtcattcaggagcaggttgttcagttcccatgtaattgagcggttttgagtgagtttcttaatcctgagttctaatttgattgcactgtggtctgagagactgtttgttatgatttccgttcttttgcatttgctgaggagtgttttacttccaattatgtggtcaattttagaataagtgtaatgtggtgctgagaagaatgtttattctgttgatttggggtggagagttctgtagatatctattaggtcagcttggcccagagctgagttcaagtcctggatatccttgttaattttccatctcattgatctgtctaatattgacagtgaggtgttaaagtttcccactattactgtgtgggagtctaagtctctttgtaggtctttaagaagttgttttatgaatctgggtgcacctgtatcgggtgcgtatatatttaggatagttagctcttcttgttgcatggatccctttaccattatgtaatgcacttctttgtatcttttgatctttgttggtttaaagtctgttttatcagagactaggattgcaacccctgggattttttttttttttttttttttgctttccatttgcttggtagatcttcctccatccctttattttgtgcctttgtgtgtttgcacatgaaatgggtctcctgaatacagcacactctttatctaatttgccagtctgtatcttttaattggggcatttagaccatttatatttaaggttgatattgttatgtgtgaatttgatcctgtcattatgatgctggctggttattttgcccattagttgatgcagtttcttcatagcattgatggtctttacaacttggtatgtttttgcagtggctggtgctggttgttcctttctatgtttagtgcttccttcaggaggtcttgtagggcaggcctggtggtgacaaaaatctctcagtgtttgcttgtctgtaaaggattttatttctccttcacttatgaagcttagtttggccggatatgaaattctgggttgaaatttcttttcttcaagaatgttgaatattggctcctactctcttctggcttgtagggtttctgccgagagatccgctgttagtcagataggcttccctttgtggctaacccgacctttctctctggctgttgccttcatttcaaccttggtgaatttgatgattatgtgtcttggggttgctcttctcgaggaatattcttagggtgttctctgcatttcttgaatttgaatgttggccggccttgctaggttggggaagttctcctggataatatcctgcagagtgttttccaacttggttccattctctctatcactttcaggtataccaatcaaacgtagatttgatcttttcacgtagtcccatatttcttggaggctttgtttgcttcttttcacccttttttctctaatcttgtcttctcactttatttcattgagttgatcttcaatttctgatatcctttcttctacttgatcgatttggctattgatacttgtatatgcttcatgaaattttcgtgctgtgtttttcagctccatcaggtcatttattttcttctctaagctggttgttctagttaggaatgtgtctaaccttttttccaggtttttagcttccttgcattgggttagaacatgctcctttagcttggaggaatttattacccaccttctgaagcctacttctgtcaatttgtcaaactcattctccgtccagctttgtcccctcgctggcgaggagttgtgatcctttggaggagaagaggctttctggtttttggaattttcagcctttttgcgctggtttctccacatcttcgttgatttacctacctttggtctttgatgttggtgatgctgatactattccattctgtttgtcagttttccttctaacagtcaggcccctctgctgcaggtctgctggagtttgctggaggtccgctccataccctgtttgcctgggtatcaccagtggaggctgcagaacaacaaagattgctgcctgttcctgcctctggaagcttcgtcccagaggggcacctgccagatgccagccagagctctcctgtatgaggtgtctgttggcccctactgggaggtgtctcccagtctggatacacggggtggggaggtcagggacccatttgaggaggcagtctgtcccttatcagagttcaaacgccattctgggagaaccgctgctctcttcagagctgtcaggcagggatgtttaagactgctgaggctccacccacagctgccccttcccacaggtgctccgtcccagggagctgtggtgggctccatgcagttcgaacttcctggcagcttttgttacactgtgagggtaaaaccgcctactcaggcctcagcaatgatggatgccccttcccccaccaagctccagcatcccaggttggcctcagactgctgtgctagcagtgagaatttcgagccagtggatcttagcttgctaggctctaggggtgggacctgccgagccaggcaccagagaaaatctcctggtctaccgattgtgaagaccataggaaaagcgcagtacctgggctggaatgcaccattcctcccggtacagcctctcacggcttcccttggctaggaaagggaaaatctcccgaccccttgtgcttcccaggtgaggcaatgccccaccttgctttggcttgccctctggggtacacccactgtccaaccagactgaatatgatgaactggctacctcagctggaaatgcaggaattacccaccttctgcttcgctctcactgggagctgcagaccaaagctgttcctattcggccatcttgccagctacctcagttttttctatttttagtagagacgggatttcaccattaggccaggctggtctcgaactcttgacctcaggtgatctgcccacctcggcctctcaaagtgctgggattataggcgtgagccactgtgcctggcctgcttcaaattcttgatgttgggtttcctgtcactgactttaggcttctaaaatacatgggaatacttatgtccttttggtgcttttttagatcaaatcagtaagtagagctaaaatatactgaggttattcaaatacattcaaactacacagatcacttataaataactggtatcatggtaggaaggaaaagatacaagcagacagaacacatcatagaattcattatcaaaattattcgtatatagtttattctagctatatatcctgctatgtaaaattaccagcaagaaagaaaagtacaagaataaggtttatggctgaagtgacttggtgtcataatccccaattctagcattctcagaaggatcctatctgttaaatatgcagaaactgcagcaacattggaatggtttacttcttcattcattctgaagtcctttaagttgagtgtttgttagttctctttcaagcctaggaactgtgctgagtaatgggtatctcaattttgccattctttctttctgcacagatagcagtgtttttactcctctactcttgtaaagcaagtcatctctgatttacttgaggatcattgctcttgtatgctattgttggagtgactattgttggggtgaacctgtggtagaagggaagggaattcagtacaagggttgagagtcaagttatgaaggttatcaacatctcagagcagaagtttgagaggactccctccctcattcatggtataattgttgtatttcttctacatacattgagaaccacttcccacagagataggctttttgtttcaaccgtcaaacgtaatttagaagacttaagaggaaaatctggtgtatttacccatatttttatactttcccttcttctttctttttgatgttctaagatttattgtttttatattttcttcctgtttagggaacttcctttatccattctattaggttatatctactggtgacaaattatgccagtttttcttcctttgaaaatatcttgatttcccctccattcctgaaggatattttcactggacatggaattttaggtggacagttcttttctttcaacatttgaaaaatgttgtgccatttccgtctgagttccattgtatatgatgataaatctgctgtcattcacataattttcctctacagactttttttcattacttttacattttttctttgtctttagttttcagagatttgattatgatgtgtcttggcatggatttctttttttttattattatactttaagttctagggtacatgtgcacaacgtgcaggtttgttacatatgtatacatgtgccatgttggtatgctgcacccattaacttgtcatttacattaggtatatctcctaatgctatccttccaccctgcccccaccctacaacaggccccggtgtgtgatgttccctttcctgtgtccaagtgttctcattgttcagttccacctccagctttatgcctccagctttgttcttttggcttaggattgtcttggcaatgtgggctcttttttggttccatatgaactttaaagtagttttttccaattctgtgaagaaagtcattggtagcttgatggggatggcattgaatctataaattaccttgggcagtatggccattttcacaatattgattcttcctatccatgaacatggaatgttcttccatttgtttgtatcctcttttatttccttgagcagtggtttgtagttctccttgaagaggtccttcacatcccttgtaagttgtattcctaggtattttattctctttgaagcaattgtgaatgggagttcactcatgatttggctctctgtttgtccgttattggtgtataagaatgcttgtgatctttgcacattgattttgtatcctgagactttgctgaagttgcttatcagcttaaggagattttgggctgagacaatggggttttctaaatatacaatcatgtcatctgcaaacagggacaatttgacttcctcttttcctaattgaatacactttatttctttgtcctgcctgattgccctggccagaacttccaacactgggttgaatagcagtggtgagagagggcatccctgtcttgtgccagtttttaaagggaatgcttccagtttttgcccattcagtatgatattggctgtgggttagtcataaatagctcttattattttgagatacgtcccatcaatacctaatttattgagagtttttaacatgaagggctgttgaattttgttgaaggccttttctgcatctattgagataatcatgtggtttttgtctttgtttctgtttatatgctggattacatttattgatttgtgtatgttgaaccagccttgcatcccagggatgaagcccacttgatcatggtggataagctttttgatgtgctgccggattcggtttgccagtattttattgaggatttttgcatcgatgttcatcagggatattggtctaaaattctctttttttgttgtgtctctgccaggctttggtatcaggacgatgctggcctcataaaatgagttagggaggattccctctttttctattgattggaacagtttcagaatgaatggtaccagctcctccttgtacctctggtagaatctggctgtgaatccatctggtcctggactttttttggttggtatgctattaattattgcctcaatttcagagcctgttattggtctattcagagattgaacttcttcctggtttactcttgggagggtgtatgtgtccaggaatttatccatttcttctagattttctagtttatttacatagaggtgtttatagtattctctgatggtagtttgtatttctgtgggatcggtggtgatatcccctttatcattttttattgtgtctatttgattcttctctgttttcttctttattagtatggctagtagtctatcaattttgttgatcttttcaaaaaaccagctcctggattcattgagtttttgaaggtttttttgtgtttctatctccttcagttcttctctgatcttagttatttcctgccttctgctggcttttgaatgtgtttgctcttgcttctttagttcttttaattgtgatgttagggtgtcaattttagttcttccctgctttctcttgtgggcatttagtgctataaatttccctctacacactgctttaaatgtgtcccagagattctggtatgttgtgtctttgttctcattggtttcaaagaacatctttatttctgctttcatttagttatgtactcagtagtcattcaggagcaggttgttcagtttccatgtagttgagcgattttgattgagtttcttaatcctgagttctagtttgattgcactgtggtctgagagacagtttgttataatttctgttcttttacatttgctgaggagtgctttacttccaactatgtggtcaattttggattaagtgtgatgtggtgctgagaagaatgtatattctgttgatttggggtggagagttctgtagatgtctactaggtccacttggtgcagagctgagttcaattcccggatatccttgttaactttctgtctcgttgatctgtctaatgttgacagtggggtgttacagtctcccattattattgtgtgggagtctaagtctctttgtagatctctaaggacttgctttatgaatctgggtactcctgtattgggtgcatatatatttaggatagttagctcttcttgttgaattggtccctttaccattatgtactggccttctttgtctcttttgatctttgttggtttaaagtctgttttatcagagactaggattgcaacctctgccttttttgttgtccatttgcttggtagatctttctccatccctttattttgagcctatgtgtgtctctgcacgtgagatgggtctcctgaatacagcacactgatgggtcttgactctttatccagtttgccagtttgtgtcttttaattggagcatttagcccatttatatttaaggttaatattgttatgtgtgaatttgatcctgtcataatgatgttagctggttattttgctcgttagttgatgcagtttcttcctagcagcgatggtctttacaatttgtcatgtttttgcagtggctggtaccggttgttcctttctatgtttagtgcttccttcaggaggtcttgtagggcaggcctagtggtgacaaaatctctcagcatttgcttgtctgtaaaggattttatttctccttcacttatgaagcttagtttggcaggatttgaaattctgggttgaaatttcttttcttcaagaatgttgaatattggcttccactctcttctggcttgtggagtttccgccgagagatccgttgttagtcagatgggcttccctttgtgggtaacccgacttttctgtctgggtgcccttaacattttttccttcatttcaactttggtgaatctgacaattgtttgtcttggagctgctcttcttgaggagtatctttgtggcattctctgtatttcctgaatttgaatgttggcctaccttgttaggctggggaagttctcctggataatatcctgcagagtgttttccaccttggttccattctccccgtcactttcaggtacagcgatcagacgtagatttggtcttttcacatagtcccatatttcttggaggctttgttcatttctttttcctcttttttctctaaatttctcttctcacttcatttcattcatttgatcttcaatcactgatactctttcttccagttgatcgaatcggctactgaaacttgtgcatttgtcatgtagttctcctgccatggttttcacctccatcaggtatttaaggacttctctacactcattattctagttaggcattcgtctaatcttttttcaaggtttttagcttctttgtgatgggtttgaacttcctcctttagcttggagaagttcaatcgtctgaagcctccttctctcaactcgtcaaagtcattctccgtccagctttgttcccttgctagtgaggagctgtgttcctttgaagggggagaagtgctctgatttttagaattttcagcttttctgctctgttttttccccatctttgtggttttatctacctttggtctttgatgatggtgacgtacagatggggttttggtgtggatgtcctttctgtttgttagttttccttctagcagtcaggaccctcagctgcaggtctgttggagtttgctggaggtccactccagaccctgtttgcctgggtattagcagcggaagctgcagaacagcggatattggtgaatggcaaatgttgctgcctgatcattcctctggaagttttgtctcagaggagtacccagctatgtgaggtgtcagtctgcccctacttgggggtgcctcccagttaggctactcaggggtcagggacccacttgagggtctgtccgttctcagatctcaaactccatgctgagagaaccactactgtcttcaaagctgtcagacagggacatttttaagtctgcagaggtttctgctgcttttgttcggctatgtcctgcccccagaggtggagtctgcagaggcaggcaggcctccttgagctgtggtgggctccacccagttcgagtttcctggctgctatgtttacctactcaagcctcagcaatggcgggcaccccttccccagcctcagtgccgccttgcagttcgatctcagactgccgtgctagcaatgagtgaggctctgtgggcatgggacccacggagccatgcgcgggatataatctcctggtgtgctgtttgctaagactgttggaaaagtgcagtattagggtgggagtgacccgattttccaggtgctgtctgtcaccccttcccttggctaggaaagtgaattccctgaccccttacttcccgggtgaggtgatgcctcgccctgcttcggctcacactcagtgggctgcacctactgtcctgtctccactatccgacgagccccagtgacatgaacccggtacctcagttggaaatccataaatcagtcgtcttctgtgtcgctcatgctgggagctgtagactggagctgttcctattcagctatcttggagctgcccccctctttttttttttattttacttttaagttcttggatacatgtgtagaacatgaaggtttgttacatatgtgccctggtggtttgctgcacctatcaacctgtcatctatgttttttttttttttttttttgagacttagtctcactctgtcgcccaggctggagtgcagtggtgcgatcccagctcactgcaacctccacctcccgggttcatgccattctcctgcctcagcctcccaagtagctgggactacaggtgcctgccaccacgcccggctaatttttctgcatttttagtagagacagagtttcactgtgttagccagggtggtctggatctcctgacctctgatccgcccatctcggcctcccaaagtgctgggattacaggtgtgagccactgcacccagccacctgtcatctatgttttaaaccctgcgtgcattacctttttgtcctaatgctctcctttccctttcctcccagcccctgacaggccccagtgtgtgatgttcccctccctatgtccatgagttctcattgttcaactcccacttatgagtgagaacgtggtatttggttttctgttcctgtgttagtttgctgagaatgatggtttccaccttcatccatgtcccttcaaaggacatgaactcactcttttttatggccgcacttggcgtggatttctttgggtttatcctgtcgggtttgctcagcttcttgaattagtggatttatatcttttgtcaaattttgaaagttttcagctataatttctttgaatactttcccacttctactctctttttctttttttgggactcatatcacaaatgttaatcttttgttacagtcccacaggtccttgggggcactgttcttttctttttcaatctctttttcatgttatttttctctccttttcattctgctttgagcccatcctttgaaggttttgttcttgctgtatttttctgttgtaaaatttttatttgggttttctcttatatctctgatttctttgctgagacacaatgttttttcgcttgttgtagacaggcttatccttaatcatgaagtcatttttgtgatggttactttaagcccttgccatctaattctgacatctgtgccacctagtattggtgtctgttaattgtcttttctcattacagttgatattttcctggttcttggaaaatcacgaggaatgatttttaattgaatcttgggcattttcagtattatgttatgagagtctggatctcatttaaatcttcggttttagcaggctccatctgacactgttgtggtgtggacaagggggtactgccttgttactgccaatggggggtagaagtttaggttccccactcagtctctttgatgcctggagaaaagtgcacctcattactggtggatgggggtgggagttcaggctcccaactgggcctctgctgctgataccagtcctagctaggaggggcaagggtgccttagtactaccctccatggggcctccagtgacacttcagtggacagtgatagcttcattactgctggatgctggtgaaagtcttggctctgtactaggccttctctgacactagcccagctgggaatgggaaggggtgctctgtcacctgttaggtagtgtattttgagtttttacttgaggcctctgagaccctccatgtcaacaataccagctccctcctctgccgtccttctgtgtcaagcccagcctgcaggacctcaggggaggcagaggggtatggaggggcacagggctctggagaccccagtggggaagggtttttacaaggttttgctgctgtgaaggtgatattcatcccccttctcctgtccatctctctctctctgtgatgcacagcaaaaggtctggaaggatacagacaccacactgtgctcagtgatgctgactctcagagggaatgctcgggggctgtctgtattctatagactgctgttttgtttactgttaccatgagcatgtacttctatgtacgttttgtaataaacaataatggaaatattaaaagccagtgtaagggctgggggaccccataaagcctgaaccctgtcttgttccactcatcctgcccttgagactcccaccaggtgggcgtacagaggacagcagcagcaggaggaggacactctgcctcatgtgcggggtaacagagcattctgtgagctggctggatgtgagctggctgtgagcatctgtgactccagctcaaggcccaactgaccctcatcaccccttcccttgagggcctgaaagttggggaggggtccctcagagtaggccaactccatctgatcatgtctgcagcccatggccagagaagtggccaccttctgctgcatcctggaaccctccctaagtgcaagggactcagtctccccctcagggcctatgaattcatattccagttcatagctgccttctggaaggagttgggtcaaaacaccttgcttgtcccaaggtcccagagcaggcagggaggtcagaggttgcagacaggacctggctgttcttggctgggaatgtttacaaatcagagatcagaaatgaggacttattagtacagttattttaggattttccattttaatactacagagtagctggctaaagcctggcaaacagttactaggaattgaatgctcaaaccccaaactttcgtgattttctttgtgctgaatatgtcattttccctttgaattcttttgataaggatgagtgcacagtaattggacctaaaaatgcatccaaattatagcatcttcatcaggattagctgacaacataattatgagaatatttcagggtgcaagatatatttttttcatattagtccactatagaaaacaaaagtggctcctttgttgttattttggcggattaacaattcttaatatttgggggatgcagcctgacccggcgccctctctgtgtgctttggcattttgccgtttatacgctgctttatgaacgtacccagtgattgcagctgccctccccgtgggaggcctgggaggcactcataggttctgttgaaaagggagcaccatgctctctgctctgggcttttggaacaggctgcttttaaatatgagattgcaatggtaggagcagcatagagcgcccctggggagtctgactgtcagggccagccctgtgtccaagacccctgctcccttggggagttttgtggtctcgtgggctctgtgtggctgtatgttctttactggcgctgaccctggacaggccatgtggcactgtggagccctgggcctgggtcagggagatccgggttctgcttgcccctgcacttccctggctgaggggaggtcagcctctctgaccctccgtcctgtactgtagagtggggatcatgggctggccagcagagaggtgggggattgaatgagggagtgttcataggggtggagtggggggtagagcccatgcctgatgcattctggagtctgggagccccttccatgacctcctgtgcaggtctggctgcctttcaagatcctttcaagtgcctcctcccgtaacttcccaggcacttcagccaaggctttcccctttcctctgctcacggtcttcatgatttgcagcgtgcgactcagcttcctcattagttgaacacctatcatgtgccaggctggggacatggacttgaataagacaccattcttgcctgagcagcttagagtggatcctgctgaaccatgttgggtctgctgtgttatcctttaccgtgcctagcagtgtttccgatttttaaatgttatttagactcattgtagaaaatacagatgttatgatttttatcactattttaagacagagtcttgctctgtcaccgaggctagagtacagtggcacgatctcagctcactgtatcctccacctcccaggttcaagcaattctccttcctcagcctctcgagtagctgggattgtaggtgtatgcccccacccccggctaattttttgtatttttagtggagacggggtttcaccatgttggccaggctggtttcacactcctgacctcgtgatccacccaccttgccctcccgaagtgctgggattacaggcagaagttattttttaaaaaagtttcacagtgaaaattttggtatattttctttaatcctggccagctctccttccttccatctattcataaataatatctatccattaataacaaaattgtattcataccaaatagctgagtattccattctttaaaacttagtgttcattaggagcgtttccctgtgccattcagtgttctttgaaatatgattttcagtggctgtatcataatttgttttgtaagtgtcaggatttgtccactgctgagcacttcggttgcttctgggaacttgcttgtgtgttgaatatcttagtgcacaatcccagttctagttttggacgatcacgaaggcaggatctcaaggaggaaaaccactggtcagaagttatgagcgagtgtctttggcgctcttggcccctttgccatggcagtattcgttcatgagagcagcagactccaccacccttgtgcgtgtctgtgcgtgcatgtctgcgctgcagagcaactttgtagggagaagtggtcttgggcatagggctggtcccgaaaaccagactccctggaaacctctgagccgtcctctgtgggcggatgacccagaagaggctgccttgcaggctagagagatgtggaggctcaggacacactgggctgcctcccctctggcctttttacatgctgtctgcacagtctttctgtacgcttgcctccctgctgaccagacctcttattattttgtaattttaatatagatgctggccttttactcaaaggcttgaaagtcttggaaagctggtaaaagtcatttgtccagtgtagccagtgcttggcggtggccattgtcacccagccggccaaaggatgcttccttttattagagcaaaccttccccaggcctgatgagggtgcctgctttctgaatatccctgccttgatctcagccaccttgtgcgactctgtggccatgttagggaaatctcactttttgaggttaccagtgtcttcctcatggctggatccagtgcctgccctccccattcttgctgcatttttcaggagcaacccctcttctcttccaccttctccctaagggccttctctgtcactaaggactgggtcttctgtttcttgcttgctatgagctgaatgtttgtttcctcctaaaattcatagatcaaaacctaccccctaatgtgatggcctagcaggtggggcctttgggaggtggtcaggtcgtgagggtggggccttcatgaatggaattattgctgttataaaagaaaccccaaagagctaccttgccccttccaccatgtgaggacacagcaagaaggcaccagctatgaaccaggaagcagccctcaccaagcattgattctgccaatgcctctatctcagacttcccagcctccagaactgtcagaaataaagttctgttaataagccacccagttgtggcattttgtgatagctactcagatggactgggacagggcctttggaaggatttggcttcttgacactttccatctttaggcttgatgttcctccttgcgtgctgaccccatttctctgccctactgtagctgaaccccaccccgtcttgcgctgcctgctcctagtaggcatctgcatcctgatgtcctgcccacaaccacctgatcctgcccatcagacctgtccttgctcccttgggggcacatctgcctcccctgtctctgttgttggccatgtctagtcagtgatggtgtcatgcctgcttggcctgactcctctgcagatctgtgtctcaggccatcatctctgctctcatccctggacaggctctttggtgtcagtcccacccgtcttgggccaatgtactccttccttctccctccctcattccgccatggccacttgctgtcctccaggtgcaccgaggtgtccaaggctagccagatgctgtttccaatgacctcacattctagggggagccatgtgatggggccattgcagaatccagggtgtggacacgcaggggagctggcacagctcaggcacgtggggcctctccttcagggccagccccttcagacagtttctccttgcctttgctctgctggtggactgctggctctctcaggagctgccagtgcctgcccagtgactgtgctggggatctctgtccctgtgggcgcaggtccctgtgttgtcagcagatccactcatttccctccctcctgcctccacgacactctgtgtgtttcctccctgagcctgcatgtctcctgcccacgcgcccttcctggagtttcactgccctgcagcactgagctctggttgtctctcggctgagaagcctctcctgtccatggcagcctgtccagatcggtatccaccccactctcatggcccacgtcacgtggcggagccttctgtgatgtgagaatcgttccaggttcctgtgtttgtctctgcctccacctcgggagctccaggtccagtttccctgcctgagagagctgagtacacagacacatgtgttaatgcaaattcataacagatggccaaggccaggtgccacccagggtcctcaggccttcaggtggtgtggaatagctgagcagtagtttatttccagtagtctccaacactttgtcatatacaaatgcaaaatagttttatttatgtaatctctgggcagtgctttgtgtacctttgaactaggagacccattgtaatagccctgtggtccccagaagttcagctctgttacatgtcacagaattcccattttcctgagagcatcctaggaaccaagaatacttacaggtattgggaaataatttcagtaaaaacattacatgagattgttctgtgacatgtctataaaataatttcagtaaaaaccattacatgggattgttctgtgacatgtctatctgttcagtgatgtggtggcctcctcttgtggcagggcctggacctcatgcctgattcatctctgtctccagtgtctggggtggggcccacctgtggttactgctcaatggacactgaaatgaacacagttgaagttgatatgtgctttggggattacgctctttgctgtaatgagttttatttcagatgctgctgggtgtagagtcttaagtattttagctataacttggaggaactcagctcatgggctgtagccaaacataactcctgtcaaatgcaggtaggagagaatctggtccctgcctcttgcccataatgacttgagcaagttgcttttcctctctcggcctcagtttcctacctttggactggggattacaaaccctttctgcctaaatcattggattattgtaggattagcaagaagcacattggaaacaacttggcctcctataaagaaaaatgtattactctaatctcttcttgttcgggaagcattttgggttccttaggaatagaacgtttcctggaaaaaaataatatcgattggcagtatctgtgagagattttcattggcgaagcaatgttctgctttgttaaattttgatttcatgtgttgttggtaggaaagaattctctcaggtcgttacctccctgctaattcacggagaaagtctttctgtgaacccagggaggggcttgctcctgggactccagtgccttccaagagctccaccttcatgccagcaaggctgggttggcctattgcctttcctcatttcctctttctggtaggagagttttactgtaaagaggagagaaatgggttgggggagtggggatcaggagttgttttcattttaagatgggagaataagagtatgcttataggccaatggaaagatctagtacagagggaagaattgatgacctggagaacaatcatcagagagggtgagttctgcacgcacaagccatcatgcaccctttgtctagtagccttctcacacagggatgtgggagcatcttcctgggtgcaggcaatcaggcatgcgctatctttagagaatttgaaagtaatgatcacacaagtgaagtgttggtctgcttttagtatctccatgaaccagcaattccagacaatatcagagatatgatagccctgctctggggtgggccactgctctcacccgcacaccttgtgtccccctcactatgcccaccttcaaaccagcaggagcgaggtggggagacagctgaagacgcaggcgggctggaaggggtggcagaggcagttgttttctggctgcttgcagtgagatatgaagcaaggtcagctgttgagagtgaggagcgaggaggatgagatacttgctcaccatcaccagagagcgcagagcttgtatgattgccatgtatttgtccagcatcaccaggcagtaaatggcgtagaagttgcatgtgacttccaggcagcgttgagcctccccaggaggctggtgagggggatgccgaagggagccaggtgtggattgccagccgtccagctgctgggcgagggcacaccatgggtgcagagttgcgccgagtcagtgttgtgctttctgagtgtctgctgggttcttgctgctgaataggcaagttccatccccaaagttcctatggattccagcaactgacagatgactgcttctctgaggtcctcagctttccagcatttagggacgagttgggaatttaacctgggccttttggctccaaagccattgtccttttcagtggacaaagccacttcctttcagtctgaatgtaaaaataataatacaaagatctggcttttaattgttattgaatcctgaatttaatattttgtatatacctataattattttatcagtctaaaaagtgagtgttttatttcccttattatgtcttcctgcctagtataatgagatgaacataatgaactattggtaaattttttgaacaatgagagtgctttaaataggaattcagtggctttaaaaaggcaacaaattcctgccgtttcattgaaaggtgctgggctgttgagaaatgctattgtggtcaacttttccttgtgcgtaatttgagagaatctagcaagactgcttaattgccatcagtgtgcagttcagtcatttgaggggtaggatttagttttttaagttgcaaatttttttttttttttttttttttggagacagaatctcgctctgtcgcccaggctggagtgcagtggcgtgatctcggctcactgcaagcttcacctcccgggttcacgccatcctcctgcctcagcctcccgagtagctgggcctacaggtgcacgctgccatgcctggctaattttttgtatttttagtagagacgagatttcaccatgttagccaggatggtctcgatctcctgaccttgtgctccgcccgcctcggcctcccaaagtgctgggattacaggcgtgcgccaccgcgcccggccgcatatttattttttacttggctgtacttatcccagaatctgggctgatgagtagatttgggtaacaaggaggtttgtattagacactatccagaaggactgagggttgagatactgaataaagaactttctggcccctggatctccctgaagatgaaagtgagtggcctgccatggaggtgactgccagagagacacaatctggtagaggctggtgatggctcagaagggcagctttcggtattgtctttggcaattggaagtaataattgtttatgtggagatgaaataacatattttccttttttttccttacagaaaacacggccatctttatgtgtaaatgttgtaacctcttctcaccaaatcagtcggaactcctctcccacgtttcagagaagcacatggaagaaggggttaatgttgatgagattattattccccttaggcctctgagtacacctgaaccccccaactcaagcaaaaccggagatggtaagggggctggggggtggggcaggataccttctgacacacctgttgatgttgatttgctccgtgggcatagcagaagcctagaaaatccacatttccaaatcagaagtcacaataagtctccaattgtagatatgctcaaataagattgtgcctttgaaatcccatacctagccccctgtaggttggcaaatgaatgaatgaaagaatgaatggaagtggcagtattcaatagtgtgaaaaacatgagcttgttgtcagacaagtgtgggtttaacccagccctagtacctactggctgcattacctgaagccaatgatgttacttctccaagcctcactttgcttatctggacaaatgatgagaaatatgctggttacaagggggtctgtgaggatgaagttaaagaatatgcctacaggacctaagatgatgcctggcacacagaacatgataaaaggaagctgttgttctaacgtacatgattaataaataagtctatataatcttacagcattttccaactgttcctataaacctggaacaaggattcacattgcaaagctttgatttgcacagaatcctttgggttcacagtcagcgtgcaaagtgagatgcatcttgtctgtagtgtctggacatctatcactgtgtggttatccgatgcagcaggtgcacggatcagagaaaccatccaggcactgtaattaggtccccacagacagagaaaacatatagcacatgaggaaccgctgcaaagatcctcacaaaacactaagataaaggacagcagctgggcacctgtgcagaagcccaatgcatagcagtcagtgtcccattgcagagttcatcagccacactaataatccactggctctttcctgggaatattcaggctggcatttctaaataggctggctattcatcatctgtcggacaccattaacaaggagagattccagacaaaaaatgttttggttaataagtccctctggtcattcccagggttctcagagaaacatgcctgacagaagattaagtttttgggaagttaggaagttctgagagttactgttagtggcataaagtgaaaaatgaaaaagatgcagcacccgaagctagtggtgggtgaataaggagcagcagttagtatttcttacttctgtcatcaccgtcagctaatagggtgtgtgtccatggcgtgctcagcccctcacaggccttgtgagcagacctgtcctctccccatttagaggaagcaggagtgaggaggaaagttatgtgtaattgcgtctcaaccagtagcgcacacttgagaccctttgctttggggtagaggaggaaagtttgcatgggacagtgagagtcagaacctccttggtgccaggggccttgcagttcagcgccctccctctgcccacccagcctgtgtgagtcctgacccctggccagaagctttgtgacacccacactctccatggcccacttccctgctgagcagtcagtgacttgctttctgaagagtatagcttcacagagagggctttagtcaagaactgtgtttagtcacctccgccttttgggctcaagcattcctctcacctcagccacctgagcagctgtgactacaggtgcccgccaccacacccagctaagttttgtattttttgtagagacagggtttcatctgggtacctgcctctggggttgaatgtatatggactcagaaaaatggataatgtctcttgtccaattcatatggcagatcgaagccatgtggatcaaggtggaaagaacttctagactggctcttgcaaagcttttagttctttgcttattaagattctcttctttctaaatgagttgtagataagagagaaattttaatttttatttttttcattttctttttgagactgagtctcactctgttgcccaggctcgaatgcagtggcgtgatcttggctcactgccacctccaccttttgggctcaagcgttcctctcacctcagccacctgagtagctgtgactacaggcacccgccaccacacccacctaatttttgtattttttgtatagacagggtttcactatgttgctcaggctggtctcaaactcctagactcaagcaatccacccacctaggcctcccagaatgctgggattacaggtgtgagccaccgtaccccgcctttcatttcttttataaataggaaatgaataaatgctaaaaaagcagaattcacatagaattatgagtgtcagtgttgtaaggtgcattttccgacttccacccttccacgcctaaccagcattagtgagagacagtgccattcatgtaggagctggccctgagctcctgccccttcccggagattcacctccctctcaaccgtcccccatgcccctctcctccctctcatcactgatctacagccacggttccccgactgctggcggaggagcaactgaatgcaaaggccacccctgcctgggaagccccttgcaggtgttcttgctggttcactcctgtatgtggctgggactcactcagcttggggtcaccctgaggaacactttttggtcccaagtggggctgcaggacctttctctgggctcccagaaccccacaactagacttgtttcagttctgtctcacctgggtgtgctttcatttgtctctatgtttctcttgcttgtcaggaaatgtcccaaagaagggatttgggctgttcagctcttagcctcaggtcctggcatggggcctgacacagggtacagccccttccgtgtgtgtccagtgaatgaattacattttgttgtccttgctttcttgccttgggccttgctgccctccctccgtcccagctgtcaccctttgctcaagaaacttcagtggcttttgccacccaaagcagggctcctcaaactcatctgacctggggatccttctgacgagtataagacccctgacttctgtggagtgcccttggcagcatggattcactggtggggcccttctcttggtactgtaggctccttctatagccgaacagctggaggtcctctaggcccctggctcctttttccctccgtggtgttgcaggtgaacccacacttgtaaaacttcccttatctcctccagactgactttggtgcttctactgggcgaatatactatgtgggtaaacccatcaaagcaattacacttttactttgtacttttttttccaattataagagtaatttttttttttgactttgacaagtttgctcttgtcacctagctagctggagtgcaatggcgtgatcttggctcactgcaacgtccgtctcccgggttcaagtgattctcctgcctcagcctcccaagtagctgggattacaggtgtccatcaccacacccagctaatttttgtatttttagtagagatggatttgccatgttggccaggctggtcttgaacttctgacttcaggtgatccacttgcctcagcctcccaaagtactgagattacaggcatgagcccccgtgcctggccctgaaatcttgctgtaaaagaaaattaaagcaatataatatggggaaagcacgtttttctaactgctctccaagttctagaaataatggtgctaacaagtgttcttccagactttttgtctgcatatgtaaacataaatacactgttagttgctttgttatttaataagaaacaaaaatgggatcataatatgtgttctgcagccttaaaaaaatgtcagcagtatgtactggatatttcttcatttcagtaccgacatgtctcctaatttctttttttagttttattgaggtataattgacaaaaattgtatgtatttacggtgtatatgtgatattttgatatacatatacattgtgaagtcacagccaagctaactcatttatctatcaccccatgtagttaacttttatgtgtgtgtgtgtattgtgagaagatctgttctttttcggctgtgtgtgatggcttatgcctgtaatcctagcattttgagaagttgagggaggaggatcacttgagcccaggagtttgagaccagcctgtgcaacataatgggactctgtctctaaaaaaaaaaaaaaaaaaaaaaaaaaaacagataaaacggcttgtgcctgtagtcccaggtactcaggaggctgagccaggatgttgaggctacagtgagctgtgattgcaccactgcactccagcctgggtgatagagtgagaccctgttttttgtttttttttttttttttttttaaaaaagacatttgggttggttccaagtctttgctatttgtagcaaacctgcacgttgtgcacatgtaccctaaaacttaaagtattataataataataataatgaaaaaaaaaaccccaccaaaaacccgaccttctcttttagcaaatgttaagtacacaatactgtattatttgtatgtcctaattttttttagtgtctgtatggtatttacttctatggataatgcataatttactcaacctttttttgatgacatatgttttctctctaattttgtgctattataaataatgttacaataaatgttgtcatgaatatcattgtacattgtgcattcacgttggctatattcctaggagaattgctgtgtagagggtatgcttattgaaaagtttgctaggttttatcagaatgctctctggaaaggttttatccatttatattctcactaggatctaagatcttctgtttttccatatccacatcaacccaaggatattatcttattttaaagagtttttgccaatttgatagacaaaaaatggtgtatcattttaatttgcattttgctggtcactagtgaggttgaccatgtttactgtttaatggctatttacacatctgtgaattactgttcatatcagttgtctatgtttttgtttgctctttattgatttgtaggagctctttgtatagaaaatattaacacttgtctttagagaatctgtgtgtactcattttaaacctcacaatgcatgataatgattattttatacagtaagtgttcatttagatttagctacatatttatgactttccggctcttcagtccttggatctgcatccattccatctccatccatggatgagtttttttctgctatagaatacactttagatttctttgtaaagaaatctgaatggagctgctcatcatgaactctcctggttattgtttatctgatgtggtcctaattattgcctttattattattattttgagacagagtctcgctcatttgcccaggctggagtgcagtggcacgatctgggctcactgctacctccacctcctgggttcaagccatttctggctaatttttatatttttactagggatggggttttgccattttggccaggctggtcttgaactcctgacatcacgtgatctgcctgcctcaggctcccgaagtgctgggattagaggcgtgagccaccatgcccagcctattgtctttatttttaatatatatttttcttggggataggattgtaggttggcttttttttttcatttcagcacattgaaaatattatttcattgaatcctggcttttattgttgttaggatgccagctgtcaatctgactttaagtgctttaattccctagtctctttgtttttggttttctaaagttttactgtgatgcatccaggtaggattaagtacatttttacatcgatgttagttggtcttcttaaacctatagatttatgatttttataaattttagaagaatataaactgttctgccttttggtattgcctctgcttcattatctttctgtgacttaaatatttgctagtccttctctatacctttaccctaacttttatgttttctttgcttttatcttgtgctgcattctgcgtatttacttctgatccattttccagttcactattttttacctgttatttttagataaaattcatatgagataaaattagccattttaagaattttaaaatacaaaattcaatggtgttagtgtgtttacaagattgtacaacttctacaactacctaattccagaacattttcattactccaaaaatagctctgtacccattaagcagtcattcaagattcatccatattgtagcatgtatcagtgcttcattccttttttatggctgagtgatatttcattgtatgcatatgctacatattgtgtatccattcctcttttgatagacatttgagttgttttcacttttaggctactgaataatgcttctatcagcatttgtttacaagttttcacatgaatatttgttttcatttctcttggatatataccaaggagtgggattgctgggtcatatgtcaattctatatttaagtttttcaaggactgtcaaacttttttcaatgggaggtgcaccatttaaaaacatttcagtcaacagcatataaaggatccaatttctccacatcgttgccaacacttgttaattttcacattttggtttgtacccatcccagtgaatgtgaactggtatttcattgtggttttggtttgcatttttgatgattaatgatgttaagcatttaagtctttgatccattttaagttaatttttgcatatgatgtgaggtagggttccaaatttgttcttttacatgtggttattcagttgtcccaacatcatttgttgacaagactgttcttttcccattgagaggttttggcacccttgtcaaaaatcaattgagtacaaatgtatgagtttaattctggactcttaattctatttcattgatcaatacgtctcttctaatgtcagtagtatgctgtttagatggctgtaactgtagtaagttttgaaatggggaagtttgaatcttccaactttgttcttctttatcaagattgttttgacttttcagggtcctttgcagttccatatgaattttaggatcagcttgtctatttcttcaaaaaagacagttggatttttgataaagattgcattagatctgtattagtccattctcaaactgctgtgaagaaatacctgagactgggtaatttataaagaaaagaggtttaggccgggcgcagtggctcacgactgtaatcccagcactttgggaagctgaggtgggcggatcatgaggtcaggagttcgagaccagcctggccattatggtgacaccccgtctctactaaaaatacaaaaattagctgggtgtggtggcacgtgggcctgtagtcccagcttctcgggaggctgaggcagcagaagaatcacttgaacccaggaggcagaggttgcagtgagccaagatggcaccactacactccagcctgggtgacagagcgagactctgtctcaaaaaaaaaaaaagaaaaaaaataaaaaagaaaagaggtttaattgactcatagttcctcattgctgaggaggcctcaggaaacttacagtcatggtagaaggcaaaggagaagcaggaaccttcttcacagggcagcaggacagagtgagtgcaaacaaggggaaatgccagacgattataaacccatcagatcttatgagaactcacttatcacgagaacggcatgggggaaactgccccagtgatccattacatccacctggtcccacccttgacatgttgagattatgggggttataattcgaggtgagatttgggtggggacacagagccaagctgtatcaagatccatttagagactactgccatcttaacaattttaaaccttccaatccatgaacatggaatatctttccatttaaatttaggtcttgtttaatgtctttcaacaatgtgttgtatttttcaatgttcaagtcttactcctccttgattactttaattcctaagtattctattcttttcgatgctactgtaaatggaactattttcataatttattttcagattgctcattgctagtttataaatacaactgttatttgtatatagatattttatcctgcaattttgctggacttgtttattagatcttgtgaacttgtttattagttttttaaaaaaacttctaaaaacttgtttattagttttctagtgtattcctcaggagtctttacatataatcttgtcatctgtgactagagataattttactttttcctttctaatctggattctttgtattttattttcttgcccaatttccctggcaagaaactccagtacagggttgagtggaaatgatgagtggacattcttgttctgatactatcttagaaagaaagtatccagtcttttaccattaagtatgatggggtgtgtgtgtgtgtgtgtgtgtgtgtgtgtgtgtgtgagagatagatgttcttcattaggttaaggaagctctttttattcttggtttgttgagtgttgtttattttttaaatcataaaatggtgttggattttgtcagatgttttttctgagtttgttgagatgaccatgtggttttttttcttatttgttgtattaatatggtatattacactgatgtttttacatgccaggatgcatcacccttgtaacttttggatagatctcatttggtcatgttgcataatccttttgctgtgctgctggattcagtttcctagtattttgttaaacatatttgcatttatattcataagagatattggtctagagtctttgatgtctttggttttggtttcagggtaatagtggcctcatagcatgacttgagaagtgttccctcctcttctattttttggaaaaatttttaagtattggtgttaattcttctttaaacatttggtagaattcaccagtgagactatttggtcctgggctttttattttttcactgattcaatctcttgttataggtgtatgcatctttgctatttttgaattaggttcagtagtttgtctttctagggaattttccattttgtctagattgtctaatttgttgacatataattgttcttaatattctctaataattattttgatttttgtaagattaaatggtaatgttctccctttcattattgattttaacaaattaggtcttgctattttttcttggtaagtttagctgaaggtttggcattttcttaatctttgaaaaacattggttttgttgattttctcttttctttttctatattttatataatctctttccattctaggcattattatttctgtccttctgcttgtattggatttagcttgcttctgtttttttttcttaggttggaaagggtaggctattgatttgagatagttcttttatctttcagatccttctctctctttctttctccagctttattaaggtatacttgacaaaattgtgtaagtttacagtgatgatttgttatacatatatattgtgaaatgataccacaatcaggttagttaacacatctattacctcacatagctaccattatttttgtatgtacgtggtgaaaacatttaagatatgtcttagcaaattttaagtatataatacagtgttgttagttatagtcatcatgctttaccttagattcccaggatgcattgaatctataggttgcttttgttagtatgaacattttaacaatattaattcttctgatccataaatgtgggatatctttccatttatttgtgtcgtcttcaatgtctttcattgatatggtttttagtatacggatctttcaccttgattatatttatgcctaagtatttttttcgacgctattataaatgggatcgttttctttttcagttgtttttgtgtagaaacacaacagatctttgtatgttgattttgtatcttgtaacatttgtaactttatacattatccaaaagctattagaagtataatctttagggctttctatatctaagattatgtcatctacaaacagagacagttctactccttccattttactttgcatgctttgtatttttgcttacctaactactctggctaggacttccaatgccaggaagcatataagtggtgagagtaggcacccttgtcctattcctgatcttagaggagagctttcagcttttcacgttgattattatgttagctctgggtctgtcgtttgttgaagcacattcctttattatgttgtggtacattccttgttatctagttttttgagagtttttatcatgaagggttgttgaattttgtcaaacttttccccatacttattgagatgatcatgtatgatttttgtccttaattctataaatgttatatatcacatttatttatacacatatgttgaaccagccttgcatcttagagataacaccctcgttatcatggcgtgtaatttttttaatgtgctgttgaatttggtttgttagtattttttgagtatttttgtttatcaggaatattggcctgtaattttctttttttgtagtgtctgtctagctttggccttacaaaatgagttgggaggtattccctcctctttaatttttttgaagagcttgagtaaaactggaattaattcctttttaaatgtttggtagagttcaccagtgaaaccacctggtcctgggcttttctttgttgggagattttgattactgattcagtctcctaacttgttattgatctattcagattttctatttccttatgatccagtcttggtagattgtgtgattctaggaatttatcagtttcttctaggttatctagttggttggcatataattgttgatagtagtcttttatgatcacttgtctttctgtggtgccagttataatgtgtccttttttattcaaaatttaattcatttgtggcctctctttttttctcggttagtctagctaagggtttctcaactgtgtttatcttttcaaacaacaagctcttagtttgttgatcttttttattctttttctattttgtttatttctgctctattctattatttccttccatctgctcactttgggcttatttattcttctttgtctaattccttgagttgtaaaattatgttgtttatttgagatttttctttttttctaatgtaggcaataaactttctttttagaactgcctttgctacatcctataagttttggtatgttgtgtttttgttttgttcatctcaaagtatttctaatttcccttatgatttcctttttggcccaatggctatttaagagtaccatttaattttcataaatttttgaatttcccaaatttcttcctttttatttctaatttaattccacatacttgaatgatttccattcttttttctttgagatggggtttcgctctttcgcccaggctggagtgcagtggcgtgatctcggctcactgcaacctccgccttccagtttcaagcgattctcctgcctcagcctcctgagtagctaggactacaggcgcccgccaccacgcccggctaatttttctatttttttttttaagtagagacggtgtttcactgtgttggccaggatggttctcaaactcctgaccttgtgatccacccgcctcggcctcccaaagtgctgggattacaggcgtgagccactgcgcctggctcagttcttttaaatttatagagacttaacttatggcctaaaatgttgtctgttttggagaatttttcatgtggacttgagaatactttgtattctgctgttgctgggtggcatgttcggtatatgtattagaatttgttggtttatagggttattcacatctatttcctggctgatgcccagattttataattgaggaatatgtggcttagagactcagaggagttaaaacagcatgttcaagattacctatatagtaagtgagagggagggatttaggcccagctgatttgatgttatttgcatgttatggtggtagtccaggaataatcaaattcttatcattgagcctacttttataaattattttcttttattaaataatttacttttgacaaattcttcttccgtatgttttcttttttgtgtgtgtgtgtatactaaactacttttgtctgtgtagtttaattttaaaaagcatgaattccttagttaaactcagcctcttaacatgacaaaaaattttaaaaagtctttcattatgaacttcaagtctttctttttctctttgtgaaagttcataaaatttgaggcttgtagaggcttagtttctctctaatgattttcattcaggtttaaccttcacaattcattttaaattgagagctacttgaaatggtttaattaaacctttaactgagtagtaattgatttattattttggtctctcgttataacgtgaagccactgaaatcctctggtttattttatagccttttaatcttttttgctcatgtaggaagtggtctgcagaaagacctttcattttccttctcttttcctcatcaaacctctggctgtgatccaagaagaaatttcctaatggaccaagctcattctcgtgtgtgtgatcccatgtgcgtgtgtgtgatcatatctctgtgtgtatgtgtatgggtgtgtttgtgagtacacaggtatgtgtgtatatgggtgtgtttgtgtgtgtgcatgtgattgtgtatataggcacgtttgagtgtgcacgttgtgtgattgtgtatatagatggtgtgtgagtgtgcacgtgtgtgatactgtatatgtgcgcatgcgagtgtgcatgtgtgtgattgcatatctgggcacattgtgagtatacatgtgtgtgtgattgtgaatatgggcacgtttgtgagtgtgctgtgtgtcgtgggcatatgtgtaagtgcacgtgtgtgtggttgtgggcacatgtgtaagtgcacgtttgtgtgtgagattgtgtatacggtacatttgggagtgtgcacatgtgtatgtggttgtgtacatgggttgtgtatgtggttgtgtacgtgtgtgagtgtgcatgtgtgtgtggttgtataggtgcttgtgtatgtgtgtatgattgtgtatatggatatgtgtgtgcacgtgtatgattttgtatatgggtgtgtatgagcatgtgtgtgtgagagtgtgtgtgcacacgcatgcattcatttatcctgatggaggctggggcaattgaggaagaatgtacatgggtctcccgagagcctcgttttggctctcccattttctctctgatttcagaccctctgcaggaattcttcctttcttatctttcctctcctctcccctccccctttccatctctttagtcattaactgtttgttgggtgcctgctgtatgtctgggtgctgtgctaggtgctggggctgcaggaggggcccacaggctgttgactctggccccctagctggtgaatggcaaataggcaaaaaggcagtttcagtgcagcagggcgagtgcctctgcgcggttaagttcaggctgctaaagacgtcctctaatgtgagggtaaaaggaggcttcccaggggaagttgatgtctatgtttaaatctgtatgttgtctcttctgggcatttaccacaaatccagtcattctgagtgcatgtacgaatgttgagcactctgatctgccctggtcagcagcgcagtgtagtggaaagggcacacgtcttggaatcagacttaggctccattcctggagctttcatgtgattgctggagccttggctggcacatagggacctttgtgcagattacaaaaggcgcccccattctgaggggatgagctagtaacaggagctgtttctgggtgaacaaacataaaacgtgctcagggctgatgcagccagtgccggagcacacagcttggctagtggaatttggccctggtaagtcttcaatcaccgcctcacacagggtacagcctgcaccacagccttgaggctctgctggggacttagacaagtggcatggctgtgacttttgtcacctgtcaaagagagataagatactgacctttttcataggttctgagacaagtgcatgttcatacatgatgccttagtccatagtgactgcctgttagacattgtaccctcctgtaccttacatccgtgtactttccagcccagggagtgggatcacactgaagcttgtcactgcatgagactatcgtcattttcctgcagaacttagtgaagaggtcaaagtatattatttctgtgcttagatattaattgaactgtccaaaggacttgctatgacatgggtatgaagttcactgactttgaggcaaacaggtctgtattcaattcctgattctgccatttattaattccctgaccttggagcaaataagttaatcttcttaagcctcagtgacctctactatatgatggggatcatactaatgcctcccttggggattaaatgaggacgtgcatgtgaagtgcttagcatggtgcctgagatatatgtgcttaataatgattagttatcaccattatttacgtggcatttccacgatatggctggtaaaagtacaaggagcaagcttgggatgccttcagcctccctggtgcctggcattgtggaacaggatgcagtctgtccctgcaaaggggatgttgcattcctcataaacctaagaggcttgtgttcccctatttatgataaataattcattgtctcccctattgcttcctgagctttggaaataaacgtcagggagattgactgtcagggccttaaaatgttagtctttcaggattttccaaaattcttgagttggtgtgattagagattgagctgccctgtgcgagtgctgggaagctggccgtatccagggttttaggcataataaaatttgtgtgcctttaattctacattggatttcctggtgtgagagctattttaaaatgaagaactcaaggaaaaaatgcgtattgagtcagaatgaatgagaatgcatgtacatcaagaaatcacattatctaactgtggaccaggtgggaggataatagtttcttaaaagagatattctaagtcagaatcttaatgactatggccataatattaaacagttgccatttatcaatcatctcctgagttctgtgcccagcattgtaatggattgcttttatcagtagtgactctataaaatagaggcagttttgtgtttatttttcgcattggaaacggaggctcaggggagatttgaacccaggtcggtccagctccaagccagcattctctgcacagcacagattgtctctattaaagtgtgtagtgctgaccttttcttacccatgcttcaggggtatgtgattctgcagatacatttttgactgggaataaggaaacccaaattccagttctgcgtgctcagcagctggttctggaagatgcgccaagccacttgaaccgttgtgtcccttgtttcttctcccattgaggacgttgtgtttgctgcatccatctcttaagatttttataaggctaaaatgagataatagctgggaaagtgccttgcaaacttgagtgatgcacaaataaagggcttacgttattaaattgttgataatgttgggctattttttcatagtgttcacgttgtgttttgattgagttagaagtaatcctttggccgattctctgccccttgccagtttttggccttggatctgcaaggatgattttctgactaagaggaagttgtccccaaactgtggatttagagcagagttaagaggcactgtggctcagccctttcttccttttggaaactggggacacaggaaatggcttcttttccagatatttctttttctatcatcaaacagtggatcagtgtgtacttattaattgtatctactccacatccagctccgttcgagaccctgtgggacccaggaattaaaaggccagctcagacctcagggtttgtcataaaaggtggggaaaaatcgaaacaatcagggagtggtgtgggcgcatacacaccctacgtgtgtgtggctcacactgtaattcacatcaagctgtgggggtagtcatcctgctcacttagctggggacacctcatggaggaggcactgaggtcttaactggaccggacatgttaggatttgaactggggcttggtctctgattggtagtgaaggaggtggtcacagcttgggagaatagtacaagtaagtgaaaagagacggggattctctgtgtatatttggggaggtctagaaaattgccctgagcagttaagggggaggaagaaggaagtggggtcactgaatgtgtgtgtgtgtgcaggtgtgtgtgtctgtgtgtgcatatgtgcagggttggatcacgtgctaaaggaccttgaaggccaggcctgagagttgtgggcaaaatcatccagaacaatggaaggttctagagtgagggaatgacagatgagggatggaggcagagaaagcccagagcaggaggctggaatctggacaccgtgtgcaggcatctgggtggtgaggttgctgtgtgaacagagaggggatttactggagagacatctttagggcaaagtccatagagtttagtgacagattaaataaaggaattcagagggaggaagaggaattaaagctaactccattgaaatgttttgatttagaggttacatgattttccttgcccagtcccaagattctcagctctgccataaaatgcgagtagttgacagcagcaactcattttcagagcttaaattattcaagttcattcatgaatatttcatttttagctagctaattggtcttgaggatctgaattatggatgcagcaagctggaagattagttttgtcaccatcgtgtttgaggttttccaaagctttcaggccgattttattttttccttgccttggaattaattgtgcattgctcatcagtttaattcacccagatttgctggctgcctgctgctcagggcaccaggttaggtgcgagggggataaaaagtaatcaggacagggactctgccttcgaggagtctccagtctgggggagtggagactcacgatgtctgctgtaccacacgctgtgctgtgctccagcaagtgcaaacactgtggctgtctgtgctccattgagtctgtgtggagaaaacactggctaccccgcaatagtaagtttgccaaactcaagcttaagggcacagttctccgcaagacgaccaagtctgcccaagactcctgataccagccacaagtttggagggtctcctggaccacctttacttctttcttactactacagatttggaaggtccctgcggcctctctcagctttgataatttgctagaataactcacacaactcaggaaagccctgtcctcatgattataatttgattatactcaaaggatgcaaatcagagagccagttaaagggagagaggtgtgtgggtaaagttgcagactgggaaggttctagacgtggagcttttggtccacccatggagtcctgagcaaagttacctctctcccaactacaacataggacatcaggagggacatccgggggcctagaaatcacctccctgtagccaagggcaaaggccagacttctctttgggtaaagttaattcttcactcacaatcacatcctcatagagtgtttcaggggagtggcttgtgtctgcgggatggcagagtctgtcactgggtttagacctgggccgcaggcttcagtaaactcttaggcaccctgtttctggaactcagctgacatgacacgaggtgggtgttttgtagcctctctgctaattctgcttctctgatatgaattgctgcttcagtagattgtgcaagtacacgttgttgtgaagaagaataaggagaaaagttttaaagactccaagggaaatggtttcttactctgtaccttgtatttctttcctcccatctcccttgcacacaggctggttctcctgtaaacacaggcttttttctccttgtttaaatctagggagggctcccagggccttctgtcccttgttttatctggtttgccttcctatcattaagtaccttcttcttctttgtgctcccctgcccaccatgccccagggagatagagtgaaggcaggaatctcgctggttgccttagtgcaggactctggtttggatctttcagccaaggctgacccactcaccagtggcgttgcagtttggttgaagctctgttccagcaagggccctcctttcccaggaaatctcttgcttcattctggtgccaggtttccctgaggtcttgggtaccccgtaccaaggcaggcttctttgttcagattccctgtggtcaggctgttgtgtccctgcagactctgccccagactgttctgcccatctctgctcccctttgcccctgtggcctccctctctgatttgtgagcacaagtgacttacttaacgggtcctcatggtaatagcagtagataaagtggctggtgtcctactgtgcagagcaacagctttagagagagcaggaagggacctgagagacattctacagatgcacgtgtacccaagatggtgccagaatctagtactccttcctctaccccaatgttcaggttcaaagagggttgctgaagtgccactcctctgccagacagatgactggcattggggatgtcagccaggctgctggcggctctctgcttggtctcgctcagggacatctcctaagtctcatcgttgaagaccacacccctccaccttcacacaactggatgagatgctctgctccctgccctgctcacccatctttttttttttttatttgagatggagtctcgctctgttgcccaggctggagtgcagtagtgtgatctcagcttactacaagctctgcctcccagttcacgccattctcctgcctcagcctcctgagtagctgggactacaggtgcccgccaccacgcctggttaatgttttttttttttgttttgttttttttttgtatttttagtagagacagagtttcaccatgttagccaggatagtctcgatctcctgacctcgtgatccgcccacctcggcctcccaaagtgctgggattacaggcgtgagccaccgcgcctggcccccgctcacccctcttaattcccaccttcattccggagatgaatgccttaaaaattaacactaattgagaagaaacacaagttgtaaaatgattttaaacttgctctaaagcagctgtgatcatgccattgaaaatcactaggtcgctaggaaactggaaaaatattgttattgtctttagtgctataatttgtggctttagattgtaattattttttctttttcttgccaggacaatttgactctaataattatgactccttgaaataatctgaatagttttgtaactcattaagggcatgacaagctcagcagcctttgagaacgctttgcaaaggagtccctaagcagtttctgagaactggatttcagtggaaatggtgcttaacaaggggcaggatttgtgaacggggggttgacagccgcaacttaaaatcctgtcagcattgctggagaaagatgtacagcgatgctgataaactgatggtcttgaatcagaacattagaaaattgattacccattagtacacagatgcaatgatattagcaccaacgataattgtttgcagctgttaatgtctggaatcactttagacttttcatttttaatgaaacgtgaaacctgaacatatcctcacacttggagggtgattgtgaaccctgcactgccgtctcacgtgattccattgtgccctcttgtttcctctgtagagtttttggtcatgaagaggaagagaggcaggcctaaggggtccacgaagaagtccagcacagaagaggagctggcagaaaacatcgtgagtccgactgaggacagcccgctggctccggaggaagggaacagcctgcctccaagcagcttggagtgtagcaagtgctgtcggaagttctccaacacgcgccagctgcggaagcacatctgcattatcgtgctgaatttgggtgaggaggaaggagaagcaggtaaatgctgccaaagggctgaacatgtcaatttcttatgaagaggtgtatctgctaatatcaggtttcactgggtcagtttttacttggaaatagcacatatttattcagctctcacccatctggaaaagtgcttattttcctaatgatgactattaccgtaagtagtctttgaagtgaatgtgtcatctgggagttgatgcccatggcatgcaggtcaggggactgctttgctagatgctttgagagttgcagggatggtaaaacacagcctctctctttgctgagcttatgttctgggaaagaagacaaggttttaaatgcatcatgttaatcgataacaaattgtcagcaggagaaagcattctgatggaaagtcaggagtgaatctggtgtcacagtttgggtggcattgaattgaaggaaggacgtcttagtggatggatggggccatgtgggccaaagtgcagagattaggatcctcaaggctcctatgagggacctcgatgggccagcattggctgaggactagatttcagtgggcattcttgaagaaaataaagactatcgggtgcctccttcagatacattcttgactaggcttcagctctgaagcagcttctaaaagaggctgaaaggcggatagatgtggtcagggaatgaagttgctgtggggtagtgtgtctgcagatggccttcgtcggaggaatgaaatagcaaggctacgctggagcagttagggcctctgctgtgggttctgttgttgttgagtccttgcaccatttttgaagccttcaaactgtaccccatgtttaagttctttctgttttgtattgtgctaaccatgttatgtgggaagcagttctcattaagaacataggctctgggttacggctgtctgggtttgcattccagcttcagcacttattaacttaattttgcctcagtttcctcatccgtaaaattggaataaaagcagtcctgtctcctatggttgctttgacaattaagtaagataggacttagaaagtgcttccagtagtacctgctatatcaaaagcaccaagtgaatgccagctattacagtgagccgttcataaccacatggatacagtattgttgtcatccttcctgcttcctggataagggcgtttagactctgagagatgaagtaatttgtttagggtcctttagttagtaaggggacctggcctttgaacccaggccatcctactctgacccctgttcttaaattcctcaccataaatgcctccctacaataagcaagactcttggtttgcaaaaccctatcatagtttgggtgaattattgagtaactcatcaactaatatttatggagcatctaggttggtggccaaggctcattgccaacatctgtacaagttgtagaaaataccagacactgttccctctcataaagaactctcaaggcaatgatgtaaaaccttgtggggctgcacgggctcatgaaaataacccatgaggatcaaaggaggtggagctgtccctaaatggagcctgagtaattgccgtgtgagagctgtaggcccggagtgctgtcatttcagaagaatctgcatcgtgtttcagaacctaaagtccttttgggaaataaagataattttagaaatgagatggttgaaagaggaaggattaggatagacctcccctgaacccgaagctctgatttccagtgatttgttaatcactggatttgggttacagagtctttcccccaccctcttgtgcgtgcatgcacactctctctctccctgtctctctctctctctccctctctccctgactctctctctctctccctgtctctctttctgtctcacatgcatacatatgcatgccccctgctccggcacagctaggtaacgacgttgcattttaatcagtgctagccatcgaggcagctctgctgtctgtagtttctgcactgcctgagcccttcagagaatctagttctctccgatcattttctgctgtcttctcgagaatcccttttgtttgtaccttcacagggtttttcctgtcaggttccttctgagacactcctggactttctgcacaattgtggctagaaatcagagactttgctctttggcaacactaaatttttctgctttccattcttccagacctcaggtcaagctctgggtttgaggctcaaagtcaacagcacagaccctggaggcccagaagttcagctgggtctgtggccgttccccagtctgcactgcccttagggtcaactctctaaaacaggggtccccaatccctgggccgcaggtttgtacgggtctgtggcctgttaggaaccaggctgcacagcaggtgagtggttggtgagcgagcattaccacctgagctctgcctcctgacagatcagctgcgacactcgcttctcataggaacatgagccctattgtaaactgcacatgccagggatctacgttgcgtgctccttattgagaatctaatgcttgagatctgaggtggaacagtttcatccccaaaccaccccaccccgccatctgtggaaaaattatcttccatgaaaccagtccctggtgccaaaaaagttggggactgctgctctaaaacagagtgccttagtgtctccccatcacagcagagtacagagtctttctccccgcatgttcaagaccctcaccaaaaccatctttccgtgtggctctgtggcatcatttgtcagtgacataaagtattctgttttttgtaccaaccagggtacacttgatgaaaacttaggtttttatcaatttttcactgttgtaaatactgctttaataactattcctaaatgtgtgtgtgtgtgtgtcaatatgtatacatatttgtagacttgtgttatgatttttgtaggataaattcctagaaccagattgctgggttggaaagtgtgttaatattgcgcccccagaaagctcacatcaacttatattccagaagtgtctgagaatgcctattggatattattacttttgtttgttttagtttttaatacctgtaatgaaacagaaaatactaagaaagtgaaaatattccaaaatttcactgcctggggtcaatgactgttacactgaaaaagagaaggccctcctccattctttgtacacccatatgtatttttcagaactgagattattcataatattctgtgatcttttttcactcactaatgtggcagataaatttttcatgacaatattttttatttaacaagctgttttctagcgcttttttatgctacagttgctgttctcagtgttttacaactaatagtcattttaattctcatggtagcttaagagataggcactatttttgttgttgttgttgtttgttttgttttgttttgtttttttgagatggagttttgctcttgttgcctaggctggagtgcagtggcgcaatctcagctcactgcaacctctgcctcccaggttcaagtgattctcctgcctcagcctcccaagtagctgcaattacaggcatctgccaccacgcccggctaattttttgtatttttagtagagatggagtttcaccatgttgaccaggctggtcttgaactcttgacctcaggtgatccacctcacttggcctcccaaagtgttgggattataggtatgagccactgtgcctggccaaggtatgcactattgttattcccattttatagaagaacaaactaaggcacagatgtttcagccgttggctttggtcacacagcccatatgtggtggagctggttgtgagcgaggtgggctggctccagggtctgtgcttttgaccgctttgctgtgtgtccttacccaaaacagtgttacttgttgtcatttttaaaggctgtacagcatttcttcatatgcatgggcatacctcattttgcttcattggtctctagttgatgggcatttagaattgttttaaaattttctctctgatcaaaaagcactactcaggtgaacagtcctgagcatgcatttcagatttattattattattttttgcacttatgccattatcttaaatgactaataatgaaatgcttgttaagttgttatttaacgagctgttttttagtgctttttattttgcagttgctgtttctcagtgttttacagctaatagctcttttaattctcatagcagctaagaggtaggcactattgttattcccattttatagaagaggaaacagagacacagatagtttcagcagttcgcttggatagatcacacagtctgtaagtgtatcttttagtttcctttgtagcattgcttttttttttcttttgcattaggaaaatgcaaatagggcatattttacattttgacgcgcatacgtattgtcaaactgccctgtagaatgtgcgtatcaattatttttccgtcatgggccatgtcctcagatagcctttatccttttcatcctgggttgtgtcagcctctgtccttgccagtctcttttgtgaacagtttgctttaattgttttaatttgttgccccttggtcactagtgagctatctctgttacagtttttagttatttgtgtttttttgtgtgattgggggcattctgtgttcatgcactttacttatacctttgaatgatcatatatgctgaaaatattttctgcaatttgtcatttgtcttttaattttctttgtagcattgctttttttccttttgcattttgctggagttttaaatttctgtattgtcaccactgtttgtatcgtattgtcaaatgtatcttttacattttttgcccttttatcatagtttacaaaatttacctcatatcccctccaatttaaaaaaaatgcttctgtttctctgttatctgtatggttttatgtatatctttgattcatttggacattgcatttttgttttctgtaagttgtgaagtaaggcagttatatagttgactttttaacaaggtggggattaagggcaccatcccactgtcaacagttattttcaagtataacttttgactctcctcaaacttaactagtaataatctactgttggccagaagccttaccaatagtcaattaacacatatttggtatgttatatgtattatatactatttccttataataaagtaagctagagaaacaaaaatgttactaagaaagtcataaggaagagagaatatgtttactgttcattaagtggaagtggatcatcataaagatcttcatcttcattctcctcatgttgagtaggctgaggagaaagaggaggggttggtctttctggagaggtcagagagatggaagaaatttcagtataagtttccccttgcagttcaaacccatgttgttcaagggtcaactgtatatatttgaccaataaatctagggaaaggaattatcttaataaatataattcagtagataaaatatttgaagtcatagatagggtccacggagaaaatacagatctggcagttcaaagtctcaaaaaccccttaaaaaataaaactttgtgttttgaaataattatgaattcacaggaagctacaaagataatacagaagagtcccatgtgttcctcatctggtctcccccagtggctacaccctacacaactctagcgcagtatcagaatcaggactttggcctttgagtgcgcgtggcttgctgccaatttgccactcacaagtatggcctgtgctcaccaccaggaggcagaactgctctgttgtcacagggccaggcaccctgtccctcaattgtcaccctcgcctagcagctgccagcctgttctccaactgtgtgattttgtcattttgggaacactgtgtaaatggactcacacagtatgtgaccttttgtggttggcttaaagaactccccttttagacctaagttctaattttatgactgaagaatttgagatgcagaagcgatgatgatcaggtcacatgactcatttggggctggttggggcccgtgtctcccgactcctgccccgttaccagtttgctctatcacgtctgtgccttaagaccactctcatttctacctcatggatggagattttctccagttcagcatgtctctgtcatatttttgtctaaccttataagcgatggaagtggcaccctgtgtggattcctgatgcttattttctactctgtaataattaggcagtctcttcagcaatggcagacagacagggtcctttctaatcagattatcggcttcctccaggaatagcagtagagaaaatggcctcctattccattgatttgaatgacctaaattgactttaatttaacaaataccaaatggaaagatagacgctctgggtgttttttcctttccagccacggttgaagctctaaaatatgcagaaatgaccttatgcccagctgccttgtggctggcatccatgtgattgcaccgtgttctctagtttgccaagcacaatatcacaatttggaaaattctcgagtaattgttttaatatgtgctctgtcaagagcagtctagtgacatttcaaacaactgaccttggctctatagcttgttaaaacaattagaagaaaacaaaataaactttttcttaccctgaaccatggcaagttaaaataactcttttgatatgttttcaacatttatttattttattctgcatttgaatggtagcagaaaccaggaaaagagatttttttttcctgtagttatgtagaacagctggtgttttgaaaatgttttgcagcctacagaaatcaatatgtcaaatttataaaagtgacttctgaacttttctaagcttgttatttctggggtcatcttaggcaaggagagttgtgaaaatttcctcttattctcattaaattcttcctgtcaaagacaaggcattcattttatggtcttaagatccacctgtaatcttcatgatgattttttattacagtgtttcaagtctctgccttctactgtatttgtgttagcaaaacagatggcttgataaatacctgccatgactgaaaatgtttttgagtgagtcatgtttgaaaatttgcaggtgaaaatgtgtttctgaacatcccacatttgtctgtggaaagatggatagtggtaatgtctgtttctttttgctgcctgtaaaccctcattttttcctctgtactaactaggtgagtggaaacccagtggtctccagccgtgcttggtcttgggcgtacttgtgagtgtggcttctgcatggcccagttcatgccactgctcctgcctgcctgctctgtgagtggcccctcttctgcctatcatgtcactgtccctgattaaggggagacctggttacacctgatagcagagctaccctgagtgacagtggctctatattcctgtgtttgctttcttgtcggtgttgcaggtcctcagggactctgcttactcagggacccagctggagtgagcagccaccatcttgaaggtagctggtcatggtacaggagggaagagagcctgggtggtttcaccttggctcagaagagcatctgtcatttcttctctccacagttcacttgccagtgtattagtccgttttcacactgctataaagaactacctgagactggataagttatgaagaaaggtttaattgattcacagttccacaggcttaacaggaagcatgactgggaggcctcaggaaacttacaatcattgcagaagttgaaggggaagcaaggaccgtctttatatggtggcaggagagagagtgaatgaagggggaagtgcctcacacttttaaaccatcatatctcatgagaacatcagatctcactattatgagaacagtaaggaggaaatccacccccatgatccaatcaccttccaccaggcctctcctccaattcaacatgagatttgggtggagacacaaatccaaactatatcagccagcagggaatcacatggccccacctgagttcaagggcccaagaagtgcagttctgccctattctcggggtaggggagccctggaaatgcttggtgaccgtcactagtgacggccgcatggttcttatccatttgcctgatttcaccaccagctgtgttctcatgtcttgcaaatatcttccttgcccatgtttcagtttgggtgtcccccaggcagtttaagttatgcagtgtgttcaatccgaaactcatccagctcccaactgatgatcctcctctatttcatcctgctgactggcccccaccattcagccagaaacatccccgtcacatcccgacacttaccgtggtcgattgactacctgctgaatatcacttcaatccttcccctatccctgctgttgtcctcgtgggtccatcatcttttctgtggactctgtgacagctccagtctgcctatttaccccaattcatgctctgtgtacaccagtggtttgcagatattttgggggatttatccccattaaatatttatttagtaataagctgcatttttaaaattcaataagcatctgtagagttcttactatgggcctgcctctcttctgagtgtcttacaaatattaattcatttcctcttcataaaagccctatgaggtagttactgtttttattcccatttcatggatgaggaaactggggcaagcatcctatccagtgtcaccctgtagtaagcaatggaccagggatgtagactcaggccttttggctcagatacatagactgctgtattaatatgctataggtgttataatacacacatggtattataatggtaagtttcaaaaggatgagttaagaaaggtaaagaagaattcttttttattcccgaatttcagtggattttcctaggcatcccctggctgtatgcctttcaccttccaccttgtctccctagcgttaagcatctttatgacatatgaacccatcttatccttactctgaacgcacccctttgtgacacccactgctgttcagggacagcctaagcgccttaagaacctgctatgttacttaggacctagccgctgcctgctctgcaccctgacttcttaccctctcccactttgcccacctctagatctgcagtgaacctctgaaagcctccagtgtcctgtgccctcaccatctcttgtacatgtcattctttttgcttgtgatgtccgtttgcccttttacctctgaatatgcttgaccttcaatgatcctggcatatgcagaagccccctgagccagcggggccccatcctgtcatctgtcccttctctatggaatgccacaaccctctcctgtgccagtgattcctgctggtcttcaagtcacagctttatttcccctttccaggcccagctccagagtccccctcccttgtgctcagcttcccagcagatctgggcttctcattgtgccgcgcacgtgcctcggtgtgttggaattgctggtgtgtgtatttgtctccaaactgagaaggcaggaatccacacttgcaccacggcctggttccctgtggacagaatagggacacatctctcttttctttaccaaagtccagggccagactctagtccttggtggattcggcacaaacagaccaagtaactttttctgtgtgggtgtatcacttcctggctctgtctgtagcattcagaacagtgccgggcacacagcaagtgctcagtgaatatcttttgagtgaaaatatggattctcatacagcagacacaagaactgtacaatatctaatgggtgggaaacccaaagttaattattttataccttgcatttgtatttctctgtggtgtggcccagtgactcagatgaggccctgggtaggtacatgttgtggctgactggctgccatctatacttgctcccatgcatttctgaatctgcagatgctttagttctttttcctcctgctctcctgcttttcacatttcggcttcagctatcagttttttcactggtacttaagggttatgtatggaagttacctcttgtttgccgtctaatgcagccatttgaattggaaaccttggagccatctcgaattcctccttttgtctcatctgcaaatctctcagtccccagtcctgccaacatttcttccttcctctcattgccccaggtccactgtcatcacctctaatgcagacagttttgcaacagtcttcagactggccgctctccttctgagtctgctccctataagcccgcactcccagaatggtgtaaaatacatggggtcaggctgcttcctgccggtgggcctcccgtggctttccctcccctgctcttgctggacatggatggatctcaccctgtcctgagactgctttgtcttaggccactgtctctgtatgccattggcccccactggtcttatggattcttttgtgcaggcagagctttcttcctgggaagccccctgtaccctcaaagctagctaatgaattctgtctcattctttatggcatgcacaatccctcaatgtaggcagtcccggcaaacatctgcctggtgaaagtacctgtgtatgacctttattactccagcagcttcttatactttacatagttcagataaaaagctcagataaatgacagtaagctacattatcagagttgtttagagaaggaagaaagtgtgggccccagagccttgagcccatggggagctccagcatgcccagaggtgggcctggatgagcaaactgcagtgttaaccaggctgctgagttttacatacttgtgtttacacacttccaaacttccctgagccatcccctccagaacttcccagagatccgtggaatcccagttcttggctcagcagggattgtgaagctcacctgccccagctgggctccccagtgacgctgcctcttcttctgtgtgaccatctgcctctgctgctgtgtggggcactgtgtctctgctctgattcgaccactggggcagggcaccattctcttttttagatgaagaagctgaggctctgctaggtgaaggaagttgcctaagcccagctagagagtacctgttggaacagggattctggtctaggacccttggactttccagctcaagctcttgccacgtggatccatcagtcttcagggatgctgctgctgattgggtggtcctccgattctccacgctcccctgcttcagagtcgtgtgaattcaaacctccagtcctgttggcagtgatgtcttcctgagagacatgtcagatagaaacagggctgacactgcagcccccctctcccactgctgcttattgtgactcttaatgaccaaagggtactcagggccttttgcaggggcagaatcccaccccagcagaactgtgaaaggaagactttcttcctcagcatcttggaggtcaccctgcggctgctggctctcagggactatgtggtaggctggtgtctggaggcaaagggagtggcctcatcctacagttgctctctgaagtgcagcgattttcagtgtggagggtccacgattgatccagtgtgatgtagcccatggcacagggggcctttgctctaattaacggtctcacggtgaccatgcctgagaccggagaagtactgaacgcgtggctcacggctcgtgcccagcagcctgtacatctggacatactgctggggctgaggcttcccatcacagggagattggctaaagtcaagggctgagtgagactcctgcagcaggcagaatctcttctctttttttctcccacttcctgaacttgtgctattgttgggcaccaagtcagactttggggatcaaagttgagtaagacaagtctattcccttgagcagctgagtgcctggggaggaggacagtgatgtaaatagacaaccaaatgtggtgaggtgaaccacctgcagagggagcagggcaggaccacttgctggagcgtttcctggaaggcttcttgaaggaggaggtagccctgaactccatctctgaggatgacttgggactgggggagaaggtggagaaggagatggaataggcatttctctcgtgatggttcatacaaaagcctgcagataggggaatgcaggcacatttgaggtctgggacaatcactgcagttagtatgtaaggccgccatgggtgacctgtgagacaatggcctcgtgcccttcacaggtttattttcctggcagtttctctttattgggaagagcacatgctggaagcaggtgcctgcctgttcttcccctgtagtaagagatataggaggatgcgagaaagcctaagggaagagggcgaggaagagcacattcagcaggttcgaatcagtgtgggtgtaatcaataattaaaactgctttattagcagtgtggagtgaattggtggcagagtcccagaatataatcccttatcagtctgctgttctgacaactgttgtgggctttttattaatgtggctgataacactttactctctggggcattctgagatttaattagttcttgggcaatttagaataggtactttagaatattagtgcagtgttaattataaatgaatgcatatgaactaatttctacaaatgtgtgattgcatttacattaaactctttagttgcctgcttccaattcaacatactttgaattacgagttacatgtgagatactctgttctgtggggaattcaagggtaagaaattcggacgcaaatcctgcactaagagtgtagggctggaaaacaaagcaggacccctcctatttttttgagacagagttttgctcttgttgcccaaactggaatgcaatggtgcgacctcggctcattgcaacctccacctcctgggttcaagcgattctcctgcctcagcttcccgagtagctgggaatataggtgtgcgcccccatgcccggctaattttttgtatttttggtagaagcagggtttcaccatgttagccacgctggtctcaaactcctgacctcaggtgatctgctcgccttggcctcccaaagtgctgggattacaggtgtgaaccaccatgcccggccacaggacccctcctaaagaagcacttctagaagaggtgggatggtaaacaaagaacaggaagattttgaggtaaaaggaacttacttgagagattttgtatcaaatgggctttgtttttcttagtaaggtgtgggaagctcatcagagttaagggtgtgtgtgtgtgtgtgtgtgtgtgtgtgtgtgtgtgcatgtgcacatgtgcctgcacgttaggggctgagaagaatgggaactttttgagccctcctgtgggtcattcatgagtgcatcagaggcaccgagcgcctactctttgtgtaccaggcatggagtggttgctgactacaggatgtcgcatgaatggaggtctgtatagtagtttcttagagtgtagtgggctgggcagaaatgactctgacactctgagataagtgtggggaacagctggtgggtgctccacaaggtattgggagagcttgtggaaggggcttctctagcagcctggagagcaggtgaggtgggtgctctctggtggctcgctggggcagagagttgaaggctacagagacgtcgagcactgaagagtggggctgggggtagaggagggcagggagaagaggggaggagaggaggggagtactacccttgcaagaggaaatagcatttgctcagacacagaggaggctgatgcagtgatcctgggaagtgttctgtggcatctgaatccagcagtgggagttgaaataaggggacatattgtggagatgtcaaggaagtgcagttcacaggacctggcagagttcgcagaggggagctgccttggttttggctggggaccagggtgaatggtggcatccctgccaaccttgagagcccagaggagatgcagatttggaggaaaaagggtgagttagttgtggccacacattgatctggggactgcaggatatccaagagggcatgccgccccacgtggagtctagcatgaggtcctcagtggaggaggggcatgagtagagactgggtggaagcagaaggataaaccaccaagggcagcctcctgaggcccccacaggggagtgtccagggatggagagcagggaaggctaccttgaaggaggaagcggatgggttgaggatgatgagtgatgcagggagttcagtgagaggaagctggggtgaagactccattgattgggggtgtgcctcgttgctgacttgagccggagcagtatcagtggaaggaggtcagtgggagatgcttgtagtgggagggaatgaaaatgggaatggagcgaggagtcatccagagatgactaagaggatggcctgggggagccatcagggtaccaacaggaggcaggtggcatgctcaaatgtgtgactagagaagctaaggaagagaccctttgtaaaagtatgttctggtctaggtacagcatcaagtcatggtgtacctgtgggaccgagggcagctgggaaaagcagggtaaacacacaagaggggagagaagtcaccagaacaccgagggagagagctgtggcctttggtagaggatgaggtcagcctgtgataacctggcagggagggagcctggagaataaatactgctccccatccccgactttccccatttcctttcatctcctgctggtgcctccactggtcaaacccagttggaagccagagagcagtagggcccattgtgtggtccttactggtcagccttgggagctgggtggagaggggggaggggcgacgtggaagggcaagcaggacctcaccagaacttcaggggactctggatgcttgcttattatctgcccttaaaagggacacgctcgggtctctgttccttaagtaatggtcccctccagtttgcatcagaacatctcactccctgcaggggcactagaccctgtcgtcatagaaagggcttcagccccgcggggcatgcacaccatttgccaacatctgcttccctctttaaggtttgcattccacgttgtgcgatgtcatcactttttcaaatgctgtcttttccaaaggaaatgaaatataaagaagtatgctaatgtgctagggttgaagagcagtgctgcacagtgaaagttacagttcttggagcatcagcacctggggaaaacgcacaaagctaggtggtagggggagaaaggggctctgtcgcagctcatgattaatacaaaccgaaagaaaccagaaagaagtcatcatcccaacctcaggcctgagtaggactttcatgtatataattgggcgtgaagtcgacagactggcatgcagccagtgtttcctgaaagcctactgtgtgtgctcaccatgtgagaaggttctgcatctgttccctcatgtgaaccttacagtgactcattctgcagatgcagataagtttagagtgttccaaattcatccagctgaaaggcagagcctggatcttagctgagatgcctttaactccaaatcttgtgtttttcatcatgcgttctcaaaacagtgactttttgttaaagccgtatttcacgtagtacactgtacctcttaattcagtagttttaatgctgtttccagggctcttcagagttgcttagtggctgggactagaaggatactgaggacaggtgtgggaggctggcagggagctcattcactttaatctgagagattgtactttttttagattatttatattgagattgcctaaaaagcaggaaaaagctcctgccagttaaaaaaatttgaaaattaccatcccagtatgctgacaatgacagctgaattcagacagtggtgctgcatgatgtaaaacttgatggacaaggggacttcagctaagggccttgttttctggaagagcacatttataagagccttggaaaaaaagtgaacccttaaaagactggttaaaaacacatgccatgtacataatagtagagatacaggtgctagttaatgctcaagacagtgctttgtaaactgtcatgtgccactcagaagataaggtattgttattataatagtattaatagtatagttgatctcccttctgtgatattgactaaagggaaaatactagacaggcatagactactgttagaaatttccatttacacccactgttgctgatggaattaatgctggcctcccttcctgtgatctggcttacccagggtagggccataaagagctcactggggtttgatgtcatctagtgtgctcttcctcttaagcatctcagacagatttcagctattgatctcactaaaattacattctgttttctcttggctaaagagtcttttctagagctcagtgaagatatttttaaacattcaatacaatgaaaacaaaatactaccttagaattaactgtgtaattagcacatgtacatgaagaagcaggatatttgaagagggttcattttgaaaatggcatctagaggacttggagtttgacctgggtcaccccagcaagcccagaaacccctggggctcccttcggtgtccttattttccacattaggatgtgtttgttaaaagacatctgcttgtcagctgttctttgtcaagcaccctgcctaggcccagggactcaaccgggttttctctgaaacaagtgttagtaaattatccaaaattccccgtcagcatcagctagggggcttggatttcagctgggggtctttggccctgcgctgtatcctaccatctcggaagagtgacttttagcagccgtgcttattaccagaaggttcattgtatctcagtgcaagggagataggcatttatttgttgaacagaactctggctttcttcaatccccaagaattgcctcttcatagcacagagaatcactgcagagctggaagagctgggcacaccattgacaagccaataggggactttaaatgcctgggcctggatgccaggccagagcagcagcctgttgcacccgggagccaactgtgcagttgactgtgcagcgtgccttctcgggctggagtggggccgttcatctgcatggagtgattaggagcaaatggcctcttgctgtgtatgggcgcttggctgaggatgcacagagcaaatgccagccttacttcgtctacctcagcctttagcacagctgggcccaagcccctgctcagagagaggtgggtgagaaggaaaggagcagtgtttgcatgctgtggtgcctgagcttcctgtaagcctttcacacctctgcctgtggtgaaagcaaaaatgccttttattgaaaccacttatagtccactagccaggcccctctgttctctccagcaccttaacacagtattacactttgccatttgactatcacctcatctcattgtggagccagctgttcggctggttcctctctgcactctttctaaacttctgctcctgcagagcatcagaggcaggaggggttgtgggaagcgctcaccttgcaggctgctggacttcaatgtgatgctgggtgtaccactcatggagacagtgtccaggctcagtcacctcttctcctcaccgagcttcggactccttatctttataaggggcttgggagcagtcctgcctcaccaggatggtggagactgagggagaccgtggcatgtgcagcgtcctgagtggctgcaagaggccttcccttgctatttgtttaatgactggatgactttcccactgtgtgaggttggaggcccttcctgtctttccccactttactatctatgatgttttgggcacggtggaagacttccagtgaaataggctaaatcctgccaggccttactgaacttacatccatctaggggagacaaacaagaaataagtaaacaaatagacaggcaagccactcacaataactgtccttatcagtagggactgtttgtgtgagatgtgtttgtgagatgtgtttgttagatcagacagagcttagggcactagaccacagttgctggtggtccgcaactgcaatgggtggacttacggtttttcaactttactatggtgtgaaagtgacatgcatttagtagaaactgtacttcgaattagaaattttgatcttttatttttgtttctattttttattactataaaatttatattattattattataaaataggctttgtgtgaaatggttttgcccaactctaggctaatgtaagtgttctgagcacatttaagataggataggctaagctatgatatttggcaggttaggtgttttaagtgcatttttgacaatgatatttttgacttaggatgggtttattggaatgtaactcatcataagttgaggagcatctgtatttaacaacacaaacttttcctacttcccaaaggcctgcactctaccagactcaggtaaaatgattaccttctaacgtgctgtgtggtttagttatttattatgttttaaactgattgtctctttcctcactagcatgtaaactccagagggcagggctctctctctgttttgtacactaaggtattacaaatgctagaacagtgctgactactccataagtatctgctgaacagactgtggctagtaaagagaaaataaatgctatagtgtgtacataatttccaagtaattatttatttcttttgtgcagaaatgatattttgtttgaatatggacacttaagaaaatttgaaaataggaaagtgagaaaggaaaatcatctcataaagagaatattttatttagtagtaggggataattgttaaactttgtattggagacagaaattctgttttcagaggagacacgcttggtatgaatatttaaccaaattgaggagggggtaaccagcaagcaggcacagaaactgaagaggcagacttgaaatcagacccaacgttgacctggccctccctagtcacaagcagccactctttttcaaataaaaatgcacagagactggaaaccaggggtgtgactccccgcctcattctgcagcaaacaccacacataccaggacagcctggggtaggaagctggcagacactcagacaaccccagtgctgcacctctcttctgttgccacgattgcacaagatgacgaatggctctggagcaggagtatgggtgtcgcaaagtgtccttctctgttcgtgtttcctgaaaactcatagcaatgaatttgctcatagtaactgtattagtctgttttcacactgctgataaagacatttttcttcccgagactgggaagaaaaagaggttcaattggacttatagttccacttggctggggaggcctcagaatcatggcgggaggtgaaaggcacttcttacatggtggtggcaagagaaaaatgaggaagaagcaaaagcggaaacccctgatgaacccatcagatctcatgagacttattcactatcatgagaatagcacaagaaaggccaggccccatgattcagttacctccccctgggcccctcccacaattcgtgggaattctgggagatacaattcaagttgagatttggatggggacacagccaaactatgtcagtaatcacggtcgagactatctgcaatttagtgaatcaagcctgtggtttacggcagctcagagggcttttgtgcatgtgcaaggtgggttgggcagcgcagcttatttctaagcaggtcaccatacaaactgtctgttttgtagtggtgaagtctctgttcccagagtggttcacaggtagtgtagacagcattcctttgagatggtcgcgtgataactgcctgatgattggaaattgtgcagaatgaccttctaccatcccatctgcccctaaaggcttggggtccctgagtctacattagaacccagactttctgtcgtggttcttagtgtgttgtcatatcattgtccaagaaatatctaatcttaattgttgttattaatactagctgggacattatgttgtatatttatttaatttgcatggtagaggtgataaaagtcttaaaaacaaagctgaatctaaaacaagatattttggattgaacaaactgaagcatttccaacataggaggagggctttgttcattgggagaatgtggaggtaggggttttcttgagtgactgtgcagagccatagtccctgctccaggtgtgtgggtgcatgggacgctctcatggctgtctagaaccaccagatgctgagagcagaggtgggaagctctcctcaagattgcctctgacgactaacttaatttcatctggttcttaggatttctaaatttggtgcccatcagggtggctgccaagacaggggaatgagagtagctgtggtgtgtggttgagagagtctttggggtggtgtcccagatatgttttcaaaaggcagagaaggcgaacattgatgagatatttaatatgtgtctggggttttccccgtaattgtgttcttccaccttacagccatcttttgaggtccttatttatattttattttttatgagtgattttagggagattcatcaattgtccagagttcctttgcaagtggttaagttgtgtcctaacccagcctctctgactccggagtgctgcatgcccactacctctctgcagtggttccattaaccagcccctgtgctgctcaggccagctggtttgtagcaagctcacggcatgactgaatgcagcagccatgcgcaagagggagaagcaaaacccatcgacagctatggaatttttaaaaggaagaaaggaagctggaggggagcatagacaggaaagagtagaaaagttgaaaaagtcagcaattcagaggaagcaggagactattgaaaaacacctattgaaaggccatgatacatgtgaactgaagatgggacatgccaagccctcagaaaagcatcatcagcatgacttctaggtcgggtcctcgaggcatttcaggggacaaaacgcaactttgaaaagtacaaaggtgggtcaagtgaggatatagggaaattggtgagcaaccaggtcaaatgggaacgaggactttggtgtccaaaagggagtgggcagaaaattactaacaaggctgttgttaaagtgtctttctcttttaccctgtaccctccttgctttccacgaagaagtattgagcatctacgacacaccagacctaatgctggggatgagaaacacacagtcatgtggctgttgagagagctgggttcagggctgtgaggagcatggcttgtacaggagtgcggtggagaacctgatatttctctccatgaaacacctgcttttgtaggccagagtctctgggtggcgtctgggtctccatgccagttcttctcctgcctcacctcccaccccccacatactgggtgttttacctggagttatttgatactccctaaatgcacctggcatttgcctctgagcgagcatgcgtgttcttttttgtgggagccttgttcttttcacagtgctccagggctcaagggatcagttaagatcatctccaagaaccattttcaaggctgttcagtgcggtgcctggcaccatggtgcctgaatcggttggaaagtttagtgttgaagcttctgaagctttcaagaatagaatgtaatgtccgtggactgtggatccacgttgcatgaggccacagagaattgatgaaggatgtgggggcttggaggtgtgtatttggggcagtcttgagtgggcagagtcttagcttaggttccccactggaagcagctttggctgcaggtagtttacctgagtggtattcccaggaagcaggagtggggagtgagaagagtgagacagggaaggagcaatgccaagggcttgttagtggggtccctgctctaggtagtggggatttgactctcaagatgttgccatgggccaggcacagtagctcacgcatgtaatcttagcactttgggaggccgaggtgcatggatcacttgcggtcaggagtttgagaccagtctggctaacatggcgaaaccccgtctctactaaaaaaatacaaaaatcagctggatgggatggtgcgcacctgtaatcctagctacttgggaggctgaggcacgagaatcacttgaactccggaggtggaggttgcagtcagccaagatcgcaccactccagccatggtgactcccagaattgtctgcctggacagtgtccagagcactggttccaccttagccgctgccagagtcacgtttgggccatgggatacaaggagaaccccactgtccctggctgaggggaggaccagagcctgcactcagcgcagatttgaggctggtgtggtccagtgggttgaaggtgcgtggtgttctgtcccctgctcttttgtctcttccaggtttttcttttactatctctcatatttttcactctttctccttcttttctccctgcaacttcctttctcctaccttcttccttatgtaatagttccacctatttgtatgtgagggccttagaatttagagatttagacgttgtttggtctgacttcccatgtggttcagagtcttttccatagcatttccaatggtatctgtgacttcctggaaaaccctcctcataaacgtgtctgaaaaacaccctttccttggacagctctaactgttgcaagttcctttctctgctctgagatctattgcaggagactctacccattggtcctagcttcatctttttgaacacaacagagcaggtcttcttcattgtctggctctagccctctggaggcctacgttaggcttcataaaatcccaagaagtcatggacccaacctccaagaggtcacaatatggataaggcatgtcaacagataattgtaagcagtgtgggaaagtccaaccgttggttcggtgctctgtgtgtgtgtaaggagaatggaggaggtaagaaggtgaagggtacagagtatcacagaggaggggaaatctgagctgccttttggcttgtcactcagacaagcagaggtgtgtggatcaggacgttgtgcaatgcatgtctgtgtgccaaggtccaggggctgtaaacaggaccgggtgtcagtcaacttgtggttcagcattgttggagcccaaaggggtaggagataagtacatgagggtgtgtgcttgcaagtcatggccttgatggtacagggatagtgggagaggatttatggcaattcttggaggactttacctagcactttctcctaatggagatgggaaggaagcctgatgaagggttttaagcaggcaagtgacaggattagatttggatttttaaaacagttcctctagggtctaggtggaggaggatggttcggagagtgtgttagtcaagatactgttagcagagacactggttaaaaacgagtttaacaatgagaatgttctctcgtgtaacaagaagtccaggcacaatggttcaagggctggttcagaggcatatctatgccgtggaaaccccaggatccacctctctctttgtgatgcccaaggcattatcatggtctttcacttggcctctcctagctgctgggtggatgcctcagttctggcagtggacatagcaatacccagctgaggaagagaggcggtacttttctcatgaggaaggaaaaccacttctggaagtccctggacccttctcctcagagcccattggccaggcttgggtcctgtagccctagctgttcagacggagcagctttccaagttcctggagtgggaggtggcatcacactccaggagggacgggtattgggaacgggtagggtggataccaacaatgcacaccccaaagcagccgtggggaaggaaactcaaattggagctgtaggaatggtgaggggagagatgagattcttgtgcagtcttctcttctccaccaacgccagctcaggtctccattggcttttaaaacggcatggcgccagaccttcacccacgtccagccccccggttctgcagtgtgttcctaacatacaatgcctaaagcagagtccggacgcggtttatccagacacagtttatccgttgcagagcgtggtgatctcttcagctgcttcttattagtgtaggtgaatgtcgtttggtttttgttgattcatgctgttaacctgggttgagcttctggcaagttctaattctcaggtcttttttttaaatgtgaacaaatctgttcctggcatatcacccacatattgaattgtatcccatggtgaattccggtataaagcaaggcatcattttaaaagcaaaaaattctgtaaaatgttgtttctacctttttatagcatccaatatattctgctatagttatttatgcgtgtgtatcacccagtatgtaggccacaaaaagaacttctgtgactcagacaatttgtagaccttttgaaatgtttttattataggcactaaaaagtaaaataaaatgaaaactgctgttaggcatgatgcaaatcaagcctacaaaatgtaggcactgccagtgactttgagatcacttgttttcctcattctccggctttataggagtcatcatgctcttcaaaggagggacacgtctgatggtcttgactttttccgtttagccttggagagtgatgcagttctgtctgattcatgatctcatctattcgttctttttagctcaatgttaccatatttagtgctgatactagttatatgattaaggaccttttccagtgaatgaaagaacttctataaaactgtttcactaggtctaaaaatggtccaagcacctggattgtgggacgaacaccaaaaaaactttatagaacatagaaaattagaatgtttgttttgatcaatctgccattagccgagtttttttcttgcctcttgagtgagctttcctcgaaccagcctgcctccctaagaaagaatactcctccattttatcttttcccttcaggcattccttggtacaattacttggggtactggctttaggcagagttgaatcactggaaacagacggaccaaatggactctggctatctccctttggtttctcctgttcctgccatattactgcatggttccgatctcacctccctatgacccgaccttgcagcactttctggacccccaccttgcgcttgcgcaccctgcttcccttcatccgtttccacactcatggctgagaaaggcttatgtggaattgttccctgtgcatttgtcatatgttctgaggaagtgaattttgggcaggttatttgaggttttgtggctctatttctaagaaagagaaaactccttttcctcccttccctatatttcctcctcacttagggatctcaaatactgtacattcaagagatggctctcaaatagtgtgcattcaagaggtggctcctttgttcttcacttggatatcgaagcttttcttacccctcaggctaatgccaagggtagccatgtggaattagctgttgttctttctgtggctgacacgttccctcttcagtgtatttcaacattttttgaacccgttgactttgctgtctgcagcagcggcacaaatataatccagcccttcccggcttagacacctgtggctctccatggccttccagaggcagcaggcaggccccaggcattgtttccctttgctcttccattgttttaagaaattttagactagagtcagccttgaaaaatcagaagatttcatgtaaatctcgatttccagtctctctgtgagccatcagaagacccagcaggctggtcctctgtgggaacttgagcctcctttccttccagcttctccccctccccaggcctgactggtctccatgtacattgatgtttcacccccgattccccaaaggaaggttccagtcttctcatggccattcagggccctctagggcccagctctgacgccctcccctggttttatttctgtctccctgcttcctatggagttgtcaccacacgggatacttgggcactggtttatacttaggctctgccatctgtccctagattggaacaccattgtttccaccacacccactcctcctttgccctataccccttgcctgtatttcctgaccattgcttcgcacatgcttgctttttatgtgaaccaagggtttacctccccacgaagtggagaatctaccatcctttcctgtaaccatctcagacccttgctcatttcattcggtgtgcagcagactgccctggactgcctgtgctgtttgcatgtctgcctctccccctgcacggtggggccctcaagagcagggtctgtaccttatcactccttttgtccaccatgcctggcaccagacagtagctgataagtgtaagttgaataagtgaatgatttatttcttagaatataaatcttggagaccttatcttctgtgcagtgttgtttattaatgattctgaagtctgctaggcctcatgaagacaagacaagacaagaaactatgtctgcttcacccaacagtgtacgcccagggcctaggtgatggcctgtggcggggagcagtgaacatgtactgaatcgagtgaagcagtgaagagccaccgtggtacctacagtgattccgtggtctgcgtggcactgcagaccaaagagctgtgtttcctttactgtcccgtgaaagagtagtgtttaccctccaactctgccactgatataaaaggataccttatgcatcttggtatttgctccttaggtaacgagtctgaccttgaactagaaaagaagtgtaaggaagatgatcgggaaaaagcctcgaaaagaccacggtcacagaaaacagagaaagtccagaagatctcaggaaaggaggccagacagctttctggggcgaagaaacccatcataagtgtggttttaactgcacacgaagcaattccaggtgactgcaccaagcgggaaaggaaaaggcaagacccttggcaagtctgtgccaagggcagcctgatgtcacagtctgagtcagaacacagagctggtgcattggtggggctctccatttaatcacccactaatttgagaggatgagacttacttactgcccaggtgttgtggttaatggatggaggagaagctgtgagggctgctgtgagggccgctgctcttgctgtagtcccacagctccgccgtgctgctcctgctggagtagtggttccgggagcagttagttttcttcgtcccctcacccagctcttctcctgggtgtgtgccttcccctcctgctctcagccatgctgtcctgcatgtgaggccagcccattcagccagacgcatgcaggctgctgctccaaaacccatgctaactctgcccaccatctgttttgtatttttttcctctctgcacatagaaaagatgtaaactgacatagatacccactgtttccatctctcaaaggttagagttctattctcatttttcttttcttttaagatcaagacagtgggaaatgtcctaaggtggtatcctggggtgcctctgatctttttttgtatttttagaagggttcaccaaatataatactagaaatttccatctctgtattcttttacatgaaatagctggtggatatgtgacactatatttttaaaaaagatctctaggataggacccttaatttaaaaagcagtttataatagtgtttcaaagtataatattttttctctatgcgcttgaggtgattgctgtcaaataaaatttaaaaattaagtttaggattttaaggacagctacagccttttaagtacctattttcaatgctaagagtaactcattatttaaaatgaaaaatctgaataaattctccttctgtacgtcactgcagaccaaggtgatcggtagagaacagaccatataaaattgtgtggctagaagaactttctggaaagtcactttgtctgccctactcacttcagaatagtattattctggaaaataagaagcccagaagagaatttcctattttcaattgttgctagagaaagtttctatgatttttctaaaaattagtggtagtattttgatatttctttaagcaagggtgaaaagtataaataattcctttgcaattccagaaacaaggggtaaattggatctttttctttaatgcagtttgacacgggtgatcctatataaaaccttgcaagtaacatatatatgtatatgtatatacatatatatgtatatgtgtgtgtgtgtatatgtgtactttttaatataagtagatcaagtgaaaatatatctcaagaggacatttagacagattattgaaaaacttgtcctttctcaaacacatgcacacactcacacacactcacccaaaaaatgtaaatgtgcgagctgagtgaaaactatcttgcgtgggtatcagacagtatagaaatagacttcccagcaccatcccctctgctgcgatggggtcagtgcccactttcgatgcctctcaataagcaatgccttttgcatcaatctcaggtgctaccaagattgtgccagtggaggctgggccccctgaaacaggagctacaaattctgagaccacttcagcagacctggtgcctcggagaggctaccaggaatacgccattcagcagacaccttatgagcaaccaatgaagtcaagcaggtaaagtgttttgttctgtgtaacttcagccagaggttgcatgtgagtgaactccacagagtgcaggaaggatcagcatgcttgttcgtttggattctgcttataaacttgtttataagagatactgactccttgattcagcagtagaattacccctccatggcagccctcggtgtgctcgctgagcctccagtgtgttgcagagtagcatgtttttagaactgagcaccaactggcttaatgaagccagagcattttatttaaagaaaaactattttttaccttaataaaaagaaatagaaacatagcttaagtaaagttttagacatttatagcttcacttactaccgtttagaaaaatatttatttccttcccactttcaaaagtaacacaagtgtgttgcagaaggctcacatgtcccatatgatgtggcattaaagtaacctagagttactgtttctggaggtagtttagttcatgtgcttctacaagttttttgaaatatactaacatatattggtttaattttgttgttttttgcaaatactaaataccaaaagtactgttttcaacttttttttaaaagcttactacaccttgaaagtctttcatttttagtacacagtttaaaaagctgtgtttgctattatgtggatgtattttagtttatatagccagtttttactattacggacaatgcagtgattaatgttttggtgtatacatctttccatacttcaagacctcctgtggaatccattgctagagttgaaattgctacagcaaaggatatgagtgcctagtgcttaactgacattaaaaactgtcctccagatacactggatcagttgaccacccatagcaaaccagtgtgtttctctacagtctccccaaattgtctgtctttagcctgtacctgctgaagtcagttaacaaactctgatccccagaggtctgaaaacatttctcccagctagaaggaaagacaaagaaaatgccagttgccagtggttttcctctgtttctggaagaagagaaatggggtgtttttgagtagaacataagcttcagaatgaaatagacctaggttggctctagactactctgtatgagttcagctcaacaaattgaacacctcttatgtgctgggcactggtgatatgacaaagaatcagacagttgcagcccctgccctgatgaagcttacactccattgtaacttgacacacgttactttgcatctaacatttgttgcacaattttaagactgtctaatagaattttagtttagtagtgagaataagagataaaatatgcaaagtgcctggcacatgtagtgctctcattaaattatattattatatcatgtggtatgcttcattaatttgtagcttcaatcctctattcttgtaaatgtgaacaattgaatttattgatgaagttgtaaaaatactcattcctttggtgaattcataatagaattaagtctctaaaatcattctgtgtttcaagtcaggttgatttgtagaccttaattaattatcttcacaatatttcaaggtctgttggcggggaggttcagctaaatgttaatctagttacaggtaaatacactgaatatttaatcaacagatctaggctatatttttgttgtcatgcattctattaatattttattgtgcaaattataagataactataaaagagatgtttttgcgtaaggattttactttgtaaaatacagataaaaacttttaggttatataattcttctctcataacaaatgatacagagttattatataaaaaattttggaagtccagaaaactgagggaaaaaaagtcatttatgatcttattgcccaaagataaccacttattattttaaatgtgttttctcccagcctttttttcagcatgtgtattttataaaattgagtttatattttatagcgattttgtatctcactttttaaaactttttttttttttttttttctgagacagagtctcactctgttacccaggctggagtgcagtggcacaatcttggctcactgcagcctctgcctcccaggttcaagctattctcttgcctattctcttgcctcagcctcctgagtagctgggaatacaggtgtgcaccaccacggccagctttttttttggattttcagtagagttggggtttcactatgttggccaggctgttcttgaactcttgacctcaagttatccaccagccttggcctcccaaaatgctggaattacaggcgtgagccactgtgcccggctgtcactttttaaaacttaatcacattacatttatatgcctttgtactcaaatgaatcacaaacattttgctttatagcaacaaggcataacttcatgaggatatagtgttatcaactcaactcttgacattggagccaacaagatcttttaaaaatgctcatctgattgttacccttttaggctttgtcttgctcttaggggtgcagggggcttccaagactagccctgccacctctgaggcttgtccacctgctgtggttccccagtactcttgctgctgccatctgttccagccatctgggcctcttttcacttccttagtctcttattgcaggcaccgcttccttttcctggatgcctttcctccctcttgcttagttaatgcttatctgtccttcagctttctgctcaaatgtcttgtcctcagggaggccttccctgtccctagaccaagtcaatctaccctgactggactctcagagtgtccggccgttatccttctcacagggagcctgatggtccttgtctgcttacttttatatttagtacgtaggctggcctatggcactttctggaaggtgagctccagagggcagggctgtgcttgttttcattcccttttgtatcctgagtacctggaacacttttttaagggaatgaataagtgaagaaagataaacgtgcaaacaaactagttccctatgttggtaccttcgaacagcttcccattcttaactattgtggaaaatgagccatgagcaccatcatctgaattttgtattctttcttttggataaattcccataagtggaataactggattaaggagtaggacctcttaaagttctgctggatttctttcttttttttttttttttgagatggggtctggctctgtggctctgtctcccgggctggagtgcagtggcgcgatctgggctcactgcaagctccaccccctgggttcacgccattctcccgcctcagcctcccgagtagctgggactgcaggcgcccaccaccacacccagctaattttttgtatttttagtagagacggggtttcaccgtgttagccaggatggtctcgatctcctgaccttgtgatccgccctcctcagcctcccaaagtgctgggattacaggcgtgagccactgcgcctggccggattcctttgtaaaagcagtggtgagagtacctctctgaggaggcagcatttggaataaagtgacttcatagaactcgcatggacatcgaagctctggcatcagttcactgtcacagtcaatgacttggacttaagggtcagatggaggctgtgtagcatcctcatcagactcactatcctcgaggggaacctgggcactaagggctttaccaggtatttgcctaataatacaaaaagtcagagcaaaagattctcctaagaccatttagatcttgcagtagaggagaaaatatgcaaagtcttgatttatttatttaattaatgttatgaatccagggtttctttctttggcattctttgtgccaataatatgtatcaccttctggatatctttgtcatttgagaaagatccaaattactttccttaaattagccttgggcttagcatgcaggcatactagtaacttccaaatttaaatattgtaattacatcatgtggattgtaccctctggtatttatggactgcaatccatttaaatattttaaatttaaagacaaggccacctgtgttgtggatagttttataactatagactttacagtgagagtgggtacagttgaatggtatctggttaatagcacaacctgattattagtatgtttgaggtcctttttggataacctggacacattgtccagagaaagcagttacggctggagaagaagcctcatttgcctccttagactcatctgtcagtgcctgtccctggtgcctattgtggtactttggtgactgtcatttgctggtttcagaaacaaggcttggccattccaacagcaatggaaaccccacacagggagacttctttgcagtacagtcactctggggcagggtcgctgcgtgtcagtgatttcaggtggtagagaggataagcatgcacgtgtaggctctagagtcagagagtcttcctagattcaagtcctgacttcaccacttactaactgtacaacatggggcaaatactcagttttctcatctgtaaaatgagtataacaatacagttgggattaaatacttagcatagagcttatcatactacacatactcaataattattagctgttattattaccatctcattcagcacacacattagtgaaagagacagaattcatgaggcaggcagaccatgcttttgttcttcaccacatacgtaaaatctaacgtggtgtctgaaacacattggcaggtgttaacaaatggtggccatttatgaataaatggaatacaaagttaataaacagcaaccctattttccccatctgtgttctaaaccaaccatgatagaggaggaggaagatggagagccacatgccagctctattactgacagagctgtggaggagaacagtgtggtacaagtcagcagtagcctcctgttactgcctgcagagtgagacagactttctctcccacccgcagtcctggattgctccagccaggctcacagaggcccagttggctaagtgcccgctgtatcccatgctcaccccaggcaggcacatcctcaacagaaataggcagagctcagctcgtgacttaggtcctgctctgaagtcaccaatcaaacacattggttctcttttcttgggaagaagtaaggatgtgaagaaaggccaggggtcattccctagtggttggccctcacatggaaacttgcagaaaggaaaagagtcacccccaacagttggttgaatgaataggaagtctggcttaaccaagctattgaaaagatggttgcatccagtcttatgcagcagactgaattcattccattaagactagtcctgttaaaatatcacagaatccacctagatcagcttggaacacagctcattattattgtgcgagttgtggatggcacacctgtccttcctcttccttcttccttctcttgcctccctctttccttttcttgaagcccagtccagacagacatctcttcctcaagttttctcagctatcctaatccaggttagaggtctctttccttttttgtggtgtgcatattcctatcaatacataccacgctgtcatgcaaatatttgccaacctgtcctccctcccccaagactgtgagctcctgaaggaccatggcacacacgagccctctgatcctgtttgttgagtgagtgactgcacccatccagcgtctgtccagttttgttcacttttcagcctttagtgtttggttcatgaaaaggatgtagagttcatgaggaacattcaaggtctccagatgtaaccatgctgtcatctgtttctaggctaggtcccactcagctcaaaatcttcacttgtgaatactgcaacaaggtcttcaagttcaagcactcgctgcaggcccacctgaggatccacaccaatgaaaagccatacaagtgcccccagtgcagctatgccagtgccatcaaggccaacctcaatgtgcacctgcgcaagcacactggagagaagttcgcctgcgactattgctcgttcacctgcctgagcaagggccacctcaaggtgcacatcgagcgagtgcacaagaagatcaagcagcactgccgcttctgcaagaagaagtactctgacgtcaagaacctcatcaagcacatccgagacgcgcatgacccacaggacaagaaggtcaaagaggccttggacgagctctgcctgatgacgagggagggcaagcggcagctgctctatgactgccacatctgtgagcgcaagttcaagaacgagctggaccgtgaccgccatatgctggtccacggagacaagtggccttttgcctgtgagctctgtggccatggggccaccaagtaccaggcgctggaactgcatgtcaggaagcaccccttcgtgtacgtctgtgccgtctgccgcaagaagttcgtcagctccatcaggctgcgcacccacatcaaagaggtgcacggggctgcccaggaggccttggtcttcaccagttccatcaaccagagcttctgcctcctggaacctggtggggacatccagcaagaagctctgggggaccagctacagctggtggaagaggagtttgccctccagggcgtgaatgcactcaaggaagaggcctgtcctggggacactcagctggaggagggccggaaggagccggaggcccctggggaaatgcctgccccagctgtgcacctggcctccccgcaggccgaaagcacagccctgccaccctgtgagctggaaaccaccgtggtctcctcctcagacctgcattctcaagaggtggtttcagatgattttttgttgaaaaatgatacctcctccgcagaggctcatgctgctcctgagaagcccccagacatgcagcacagaagctcagtccagacgcaaggtgaagtgatcacactactgctgtccaaggcccagagtgctgggtcagatcaggaaagccatggcgcccagagccccctaggggaagggcagaacatggctgtgctttcagctggtgacccagatcccagcaggtgtctcaggtcaaacccagctgaggcctcagacctcctccctccagtagctggtggtggggacaccatcacacatcagcctgactcttgcaaagctgcccctgagcaccggtcaggcatcaccgctttcatgaaggtcctgaacagtttacagaagaagcaaatgaacaccagcttgtgtgagcggatccggaaggtttatggagacctggagtgtgaatactgtggtaaggaaaggcagcgccggtgcgtggccctgtccacaaccatcatgctgtggtcacctcgcatttgatttgagctcatgtctgtttgcaaagaataccttctaagtgagccatcctcctccattgtagataggaacggtgaccctgtgtggccgttagcgcttggagtcttgtggaggtggccgggatggctgcacagttgactgtgttggcctggtcaggtgtgtgtgctgagggttacccatgacctctaccagaactctaaccaagaagaatctttcttctggcacatgacaagtttaaagttgagctttaaattgtggccaactactatatcagccaagagaggttatgaaagtggctgcagctctctgtagggaggtcccaaatagcaccctgcaactcacaatgaaagcatggctcctggaactcctggggagctggtggtcaggatatagaaaatccagctccagacctgctgtcccaggagggccggtagaacttagagatttgtagatttatgcatgtgcatcatggtatttggagccataactggttctcagtaaacactggcttcctcctctctgggccctaacatcatgcaaaaaatagtagcacccttaatatttgcaacctcccacctttgaagagtaattttcagacagaaatgtggtgaaaagtatgaagggtgacccggacaagcgcaagagggagatagatattgtagataaaaaataataataatttaaaaaattcaaaatcagtcaaaatgaaacttccttgttctcatgtgaaaatatttttttaggcaaacttttttggtaccaagtgcattttgatatgcatgtccgcacccacacccgggaacatctgtattattgctctcagtgtcattattcttccatcaccaaaaactgccttaaacgccacgtaattcagaaacacagtaacatcttgctgaagtgtcccaccgatggctgtgactactcaactccagataaatataagctacaggcacatcttaaagttcacacagcactggtaagtagcaagcccaagcggcagccccgtctcccctgggtgctcattgctttctcaagtttatgcttatatgtaggtgtctctgctgcaggtcagccctgaaaacatagagagatccttctccttacacagctgtgcacgtggcagaggcttcccaggttcctttcacagcaagagtctctaatacgttgaaaaaagagattagatggaataaattgtttcctgtgcaaatttttttagcatcagataaagtctacagaagagatatctatagagtagaagtaaagtcagaatttctcaaatgacattttaaagaataattaatagcagagataacagtaatagctcctactgaacgtggttgagaggttgaattagataatgctgtacagtgatgagaacagtatttggttcagagtaagagcatagtagatgttgatgaccactgttgtcacagttttgtgttatttattttagtctctgggagagaatgtctttgaagcacgtttattttaaaaaagtgaaatgttaattcaatatgctgttaatattcacaaaggtaaatttctttaggtctttggtggaggatcttgtaacacaatgaatgaatgcttatttttgcaaattctaatctaactcaagaggctgacacctgagagtgatttgagacttcttcaagttataaaggaagcacatctggccccaggtgtggttctgttttaattgaatgcctttttatgctacagacagcaaaaagtgaagcttcagacatttgatgtgctaccatggtttcctggcataaaaatcataacagtttgtcactaagggtaaagtcaggtgtttgggtgtggtgagtaggtcagagcatgggctttggggttggatacctggattcaaacactgtctccaacactctcacaggccctgtggccttgggcaagtcacttgtcttccctgagacctgtatgaaatagccttctgtataagatacatatttttaaaaaatctattttatatacatccacacacatatgcatatacacacatatacagatgtgtatatacatgtatttatacacgtgcttatacacacctacacacatacacttatatgcatgcgcgcgcacacacacacacatatgtacagtactctaaagaacttggcacagtccttgtcatgtaattgactgtgtaccggctatcgcatgtcatttggcacttctcattacacattctctgtccttccttttctttctgtctctctctctttgagtagcatgtgaaggcatgttgtttgtaattcttcatggaaccgctgttacatagatactgattccagtacgctattatggccgggaaaagtgaggtggcagaattcattaaagtgattttgctggaaactcatatgaagtcgggagggagtgaagccaatatgagaacaagttcttgggagaagcctttgaatatggcaataaaaactaggaagcagactgctgggttttcaccctggctccctatttaccacgtgtttagccttgggaaaagtcatgtgacctatttgcctcagtttacccatccttggatgaggatgaagtgagagaatagatgtaaatgtcttagaacagtgcctggcatggagcaagcactgtgtgtcatggactattatcattattgattctacttctccttttggaacttgctgctctggatttagagattttgaaacataggctgaaaaaatgacaagaaaagggaagttgtaattgagctttaccacctgggactgtatgtatttttccatgcccaaatcttgcctgcctgttgtgagggacccatggttcagcccagtgattttcttaccccagctgctgatgctcggcctcctggccacatccttgggcctcatgatcagtgggggagtgtcaggaatgtgcactgagatctttggccccagtcacatctgccttcattcttcttaataaaccagcatctaaagaggtttctcttttcaactttctatggttatcttccttctgagaggcttatctcttcaatgtgaacatgtaggatggcatctggggaaatacatgttgggggaaagggaaggaacagctgctgtctttatcctgtgggtcagctccttgtgcagtcttaattctcatattacttctaggagttggagtatttcctccactgggcagattaggggcctggcattacagagtcgtttggtaacttgctcatggttgtgccattggtaagggacagagacagaattcaagcccacattctcaccactgcctggggttgcccattttgttgtagttggtcattaacagcaaccacatggttcttggtaggtctcttggacacttgtccgtcatctgaaggaatgtggttgaggcagatgttgtgccgtgagggcagggattgtgctgattctttctgtgctgttaagtggcagttgtgctttatgctacgataataaaatttctgtgcaactaactgcaggagaagagcagtgtgctgaataagggggtgtgactcagttgaccttacaaaagagatatgctagcctgcttctcattagctctcacgttttcttagaagttgtaagtttaacttcaatcttttcccttactgatatttgcagttcttccagcagaaacgcttttaaaggtgaatgtgttgccgctgcttccaaagccagccagcgctggctggaggccccctcctctacgtgtcgggcattgagattttcaagtaggatctggtccctgccttcagggtgctcttggttttgtgaagggggagctaaacaataaacagtaatggcaaaatggcaacgtgagagggacagtgacgtcaatacaacaatgtactctccgcccaaaaaaaattttcctggaaagggcctgggaggaagggttctgagggctgtctggaggaaggggttctgaggttatgagtagatttgggccaggaaagagagtgaggaggaaattcccagcagagtcaacagcacaaaccaaggggaagctatttgtatttactccaggttattgaattactgaacattttccatgaagcaggtggaccatattgccaacatagtaagatagcatgatttatgaaaacaggttccaggatttttagtttagacatttgtcttttgagcctgcaaattatttttgtaatgaagccaagggtaccaagaaaatgttgacgcagtacaaaaaaaaaaaagatctgctttcccttaatgaagactcttttgatctgataataaagttgctattgcaaagtgttttaaatagaattccgtattttcaaggacagttaacgtggattttttttggtaacagctttactttatcaagatatattttacatagcatacaatttgctcattaaagtgtgaaatcaaatttttttttttttttagtatatccacggagttgtgcaattatcatcaccacagctaatttcagagctttttcatcatcccataaaggaacctggtacccatcagctgccatccctcgttcccctccctgagccctaggcagccactaatctactctctatatctgtggatttgcctgttctttctttcatatgaaatttctttcatttcatatgaaagaaatcataaaatgtgtatattcaatacagtcttttgtgactcatttctgtcacttaattcatccatggtttcctttttacagctgaataatattccattgcatggatacactgcatttcatcagttgatggcatttttttagtggtaatttcaccaagacagtacctcccaactacagagtgttttaaatccacaggattcaatctaattctttgtgaaatcacctaagaaagcatggaggttaattctaggaggttaagtattaacctttccttaaagggttttcaaaaattatgaagcatctaagaaaaattctgaagcatctaagaaaaattattttattcaccacccaccagtatttagctgtgtcattgtcactgttttgacacttgtaccattattgctgccatgaaatggataaaactgggaatttgaagttacaggacagggttctggctctacgtctgtggactgtgcagactgcttggtctttatttccctttacctgaaagtggagtgaaaaatacttccctgctttctctggatggtggcaatgctccagtgggatagcgtgattgtgctttgtgatgtgaaagtgccttatggatgtccatgtggttgatcttaggactgtgatcatggcagggtctagctaggtcaggagaatggtgctgttctgatcaggaaaggcatgggacctggggcgagaccttgcaccagcgtggggcttggtttccttacctgtgaccctggagatggaagcaggtattataattctggctgcctggccttctgcattagtttcagtgtttactgctttcagcacagattcccatgaagagcagaaacaaaggagattaaaagtagccatctctcccacctgcccttcaaatgggcccatatccaagttctttccagttgcatcaggactgtaggataatctggctgagtgcctgtttctgtgactcttagagccatttattagccaaggataaacctaatgattggaaagaatgtgtacctttaacaaagtttcttcccactacctccttcttccaattagtaactaaataatgtcaacttacagtcagagatgtcttggcattgaggaaatatggggacctagtcaagagagttagtcagtgacatttctggagcaaatccacttttaacagcattgtgcaaactttataaagggggcacttgagacgattttagtaggatgagaggaggctttaggttctgatgtgcctgagttcagccccgtatctgtctctgtgatctggggcaaatccttagcctccttgagcctcagttttctcatctataaaaacggagataaaaagtactttcctctgcctctttgggctgtgaggactgcattagaaaatatgtactgtacagaacacccaagtcagcattctctctctgtctctcaaaaaaaaaagatccattagaaggtcgtgaaatcagtttagtgattcacagctaggatatcttattaatgaaacagaataaaataaaatagaacttgtcagcattattcacctctaccaagggtaagtattattttcagagacctttgtttcagcgtttaaatgtttatctgtcagtgtgtgtgcatgaatgtgctgggtgttgctgtcagatgggtgacccctgtgggtctccttaaatacatatttagtggcctaaatcacataattcatgacctcctcagtcagagtctcatggggataattgttatgaatgacattcctgggctcctgcctccaccataatttgaggtgggatctgagaatctgttatttaaagttccttctgacacaaaagtgtgaggcagcaggaagtgcagcatctggcagatgtttatgatatgccagtttattccgtttatttctggcctttgttgcttctcagaaaacctcaaagatacctgatgctaagggtcttgtagcagttacagtctgagcttgggagttggtaagtttgatgttactttctgactctgggacttagaagtggtgtggctccgtaacctaacaaatcccctggaaatgaagacaacaggacccacctccatgggaatttagcgagatgatgttcgtaagggacacggcatatagggaggggcctgtccagagtaattcatccttctaatcctcctttttagtaggaggaggagaatgaagaagaggaatagtaatagtgattggcggtggtgcatctattgagtctgatggtctctcaacaaatgtttagaatacttaacctttgtcattgagaagtgcatagtctttctttggctatcaaggtacacatattcaaaagaaatcttacatgtactttctggagataagctaaaataatatattgccaacaaagcactgagaaggtagacgaagctactttcaatcctcttctggaaataaatgggtacacccggtcagtatgtgtacttttaaagtagaggaaatgttatttaattaaaatgattgcacataatgttttcccttcccaagagctataagaaaatggtcttttcttacttgatcacaaaacaagtttgtttctgtgttgctccatttaggtgttttatccactgtccaggaaacctcaggctaccagagcaagttgtgtatagaacagcttcatttcagcaaaaactgagattctaaattgaaagggcatcacatggcaaaacagaactatttccagtggaaaggaaaacccttgagttgaaatcccaaatcgagcacgtttctggctctcttctaacttgttcaaatcagttgcaatttcagcatcacttttcctgtgctttgctgcactttctgcagacatcctcactgatggttgggttccacgtgttgacacatctctttcttgatgagcattcgagcgcctgagagtctcacacctcttcctcattgcagcgcctgacacataacaggggccctgtagcagttgaggaatgaatgagtgagtccatggaggaaagcacatgccataactgtggcctttattcctgagaaatggttgagtagaaacccccacctttgttttttaaagcacttgccgctaaggcatagaccagatgaggtttgcccggagcagagagctgggctgtgagcctcaggcttggggctgaccctgcaccccaggccatgctgcagcttcgtgcagcatctcccttctttcaaagggtcctgattgctttgaaggccatttccgtcagagcaaacagactccaaaagctgggctctcctaccgtcattaaggcatgggtctctcagactctccatctctgctgggagctcttttaaccaccactctttttaagtttgctgtgtcagtctgaattttcatctctggtatggaactgaggttttgaaaaagaagtaaatgagtcctaagagttccccccaccacccccgcccagtaccctttaccaccatctgtgtccttctgacagtcttcaaaggcatcaaaaaataagggcccctgataagctctgagataaattgctttctgactatcagagattaaaagaaaaaaaatcaaatagcagaggctcaggggagatcaccgtaaactcctgcaaagcccttctgaatgcctccatcaactctgatgatgcgggcaccgagaggcagccaggggtggtggaggtctcctccaggatgcccgcctgacccggggcatctcgcccaaggccaagggcagaggaggacagtgacaggagtgctctgaggagccctgagcctgtggtgtagcctgtgtggggatctgtggcattgcctggccagaaaactcaggacagtttcttaagtggtgcctggatcccttggacatgtgtggttggctgtcgttgcttggtattcagatgtttggtgggaaatgcatcgaaaccatttggttgttcagaaggacttttggttggtttggtttggttttggtttttaatgtaaagtacactttttctaagtgtacgctggggaacaccaaaggaggtggagggtgctccttcagatcccgctctcggagactcccagggaatattagcccatgagaagggctgctgtctcaggctgagttgcatgatagcaatgtggaaaccacagcagcaaagtctttcagatttattgagcactcactataggagaggctcaattctaaacactctatgtctttttcatctcccttatccttcctgtgaccctgtgaaggaggcattgttttttatttccattttacagatgatgaaacggaggcactgagaggttaaatcatttgcgcaaagttccacagctaacaaggggcaaaaccaagatttgaacccaggggctctgagccctgaacctgttctgctagtcagggtctcataagagcaagagctctggagtccagctctgccctcggtgtagtgtgaaccttgggcaagtttctaaaggcctcataggatatggtaatgtaaagcactttgcatccagtgagttcttaagaagtgatagctcttgtgctttttattatttagagtaggagtagactgcccggtggggagcacagtgaggagagcattcatcacacaaggcgtggaacacacttggtgccttggggagctcacagtaggggctccacaagtagagggaattagtccttctgtaaatccaagtgagcgtggagtggattaacttcccccaaaacacacacagcccaaaacatttccttgcagtggtagttctgaattttttgtttttactttttattcacctatctgcgcagagtcctccctaccagggtttggctctctgtaagctgtgggcttggtaagcttggcaatcaaagtgccacatgctggtggtataaacagcagatatttactgtcacactgtcctggagagcagaaggcagaggtcaaggtgttggcagggccgcttcctcctgagggctgtgggggaggatgtggtccatgcctctctgagcttcaggtgatttgctctctgtctttggcatttcttggctggcagttgcattgctctggtctctgcctccatctgcacatggtgttctccctgcatgcagctctgtgttcaaatttcctctttttataaggacaccagtcacattggatgagggcccaccctagtgacctcattttaactggattacctctgtaaagaccctatctccaaataaggtcacattctgaggtattggaggttaggactccaacatatgattttttaggggatagaattcaaccaataacacccactctaggggaaaagagtgatatgaaatcgccctcaagtgagcgctgagagcaaagggaggtgagcaaaagccatagcttggtaattcacaaaagcttcttcctaattgagaatgttacaccatggtggccctggctgtgaagctgcagcaatgcaggatgaacaacctatctgcgccccagtgggacaccgaggggcaggaggcatcctgggtgggcgtccgcacactctacttccaacactggctcctcttctcagactttgggcttatctcctgggccttgttttcttaatctgtaacatgagcatgaactgtgcctatcttttgtgagtggttgtgagtctcaataaaatcacttgccatgcaatccctgcgttgagtgctggcggatgtaatatgctcttgggttgtagagtagcactggtgtgtgtggtagacccgcagccttgaggttgagtaccacctgcctccacagaactctcccctctaagccccatcccttccttctgaaatggagctgatgccattcccccattcccctactctcgagctccccaggctgtgcagcgccaggtagagggtgtatgtatgtgcttggaaggatgtactttgtctggttttgatgaagctgatgataatgatggtgctgatgagaatgctagtgttgatgatggtgaggggggtcgtggtgatgttgatggtggtggtggtggtggtgatggtggcagtgctggttgtggtggtggtgatgactgttgatagtgctggtggtggtggtgttggtggtggtggtaatggtgatggtggtcgtggtgttgttgttggtggtggtggtgttggttgtggtggtgttggtggtggtggtggtgatgactattgatagtgctggtggtgatgactattgatagtgctggtggtggtgatgatgatggtgatgatggtggtagtagtgatggtggtgatgactgttgatagtgctagtggtggtgatgatggtattgatgatggtgatgtgatggtggtggtggtgatgactgttgatagcgtgagtggtagtggtggtggtggtgggtgatgatggtgatgatgatggttattttttacagaccacagatttaaatgagaaagtcaactgattatgttctctttctattaaggacaaaaggagttattcttgtcctgtttgtgaaaagtctttttcagaggatcgattgataaagtcacatatcaagaccaaccatcctggtaaggttgtgcattttggagtggaagattaatgttaaaaatgcttatgtttattttaaaacaatgttttacattaactgcactatatagaaataaaaagggatgaagctgtgaatatattcatgggaaacaaacatctttattcgacgctgggaagttgatgtaattatttatttccttttgttcttttatctggtcttcagatgcatcaaccctcacccctgcaatttcagtgataccctctgccccttttaatgggaactttgcatgcctttcgatgggtcgcatatgaggcagggctgttgtcataagcttgtgttacccagagtggtggtttgtaaggggtgttggctcctgcccaggctgaagagcatccttgagttggagagaccattaccacgggtattctcatattccacactgctcaggtgcatgaggcaccagctacctgggtgttcataccttgtcatttctgttcgtgccacctggaacattttcccttctgccctacctggttaattcctgttcattctttgcattcttcctcagagccctgcctctggggaggcttttgtagcttccagcctggccgagggtccaccccgcacccctgctaacgtcacacagggcgcactgaccgctgtgctcaagtcactgtgactctccagcaactcccatgggctccctgagtcggggcttatcccgcctcatctccagtgcctctacaggcaggcccaggaaagcagacaagtgtattgtgtgttttatgagggagtaacaggtacttcttctaaatgtgcctctcccttcgtacatgtctcttttttcctgttctttattttgtatttgctcttggtataagggaactgactcactgattataaatggaggaagataaagaaataatagaagggcactaacactcatgtttcagctgggaatggacagagttgtgaggccttcgtctgtgtgggctatgtgcttctctgaaggcccagctctgtccttctcatgttaactcatgtcctaagtgacatgggatccaatgtgagccaaagttattcttaaaacagctaacctttgctgatgaacagatgtaagacattattttgttattattttaagctttttattccagaaaatcccaaaatacaagagcacacagaacaatgccaggaacctcctgtatctgtcacttagcttccacagttatccacattttgtcaaactctttttcatgtatctaccacacacacttttcttcttctaggatattttaaagtatattccagacagcatgtaattcctccataaaaacgtttaaaatgcatctccaaataataaggattgctttcaacataaccaccatgttaccggtaaagcaaataggatcaactgtcattcattattgccacctattatcagtctgtttaaaatttccccaatttccccaagatttttctttttaactgttggttcgcttgaaccagcatccatgcatttgcatctagtggtttagttcattatgtttctgtttcttgttttctctagtgtcctgctgtgcttttttccatgacattgacttatgggggaaactgagtcacttttcctttagacagtttcactttctgcatttgtgtggtaattgccttgtgatgttgcttctccattcctcatacatgatgttaacagatactgagatctgagactcgatttggttctggttttactttttaggtgaaaatcctgtctctggacaccatgaggcacaccttgattcctcctgtgggtgctgcttagcaatgaggtttatttatgtctaacttcccctgaggtgctctgactccttttgacatcctgcttttcttctagaggtctccatgagcaccatttctgaggttctcgggaggagggttcagctgaaagggctaattggaaagagagccatgaaatgcccatattgtgacttttatttcatgaagaatggctcagaccttcagcgtcatatttgggctcatgaaggtgagtattcatctttccaaattgggcacctttctaattttgtgcttccatccttcattttgggagtacattaagaggaagccgtatcttcacatccctgctgttagaatttccttagcacactgagagatgtgtccatcaaccagctacaaacagtaatttaaaccattacttaattagttgcaattgcaatgaatagaggtgtgcactccttcataggtctcattgcaattgtagtgaaataaatcaccatgactcctctgctggaaagtaggtaccttgagaacaggaacaccggagacttattcatggcaggaactccagtgcccaccctgtgccctgtgcatagcaggttttccagaaatgttggtattatgaatgaaggaaggagggcagcaagtagttctcccattccagcagtttggagtgttaccattcaggctatggagaaggaattcagaaggtggaagggcagaatggagatgagggaatggagagaagaaggtaggctgtgcttttgggttgcttgcctgtgaagggaagtgtggggccactctcagggctttgggaagttggaagtgaagattctactagggcaacagaccgtcaactttgttttctccccctggataaggacatggccctcctggggattagggtaggagacaaggggccagggaaagcccttccagacacctgcatcaggtccctgcctgttagttaggaacctggaatgctgcagataggaaaacaagagtagagggggatgaaggatgaagtattttctataatatgggataaaatgacctatttataggtcccagggaaggaactattagggagagagagaccagtggttcagtaatgagaatcgtaactgacagattgggaacccggagaaggcagaaggagttgagataaattccaaggttggaagctacttttttgtttaccagcatataatgaacactctatctccagagggccattccgagaaggcagaatcctttgtagaaggcagtcacagtgttggggtgcctatggactgggtgctttgtgtcaaatgttcactcctggtacaaacaacccaggtgtggagaggagagtgatggtcacattgtaggtactattgccccttctgaaagccaagtgatgggaacaggtttatgatgcatgtggacaccaaagtgcaaatgctaatggcagtcctatgccctgagcactctaagagtgacctaaacagatgccagtgctcagtgtttgactcatgttattggagtcagtattctcaacaaccttaaaggcagatgctgttaccatccccattttaccaatgaggaaaatgaggcttagagaggtgaagtaatttgccccaggtcacacagctaacaagtggtggaactgggatttgaaccaatgccatctgattccaaaacccttgctcttctcttctgaactgacttgtttcagaaggaggaggcacctcctacactgagacaggagtgaagggggtgagggtggtagcaggtatgtgtatatacacgtgttgtttctttgttatgaagttgaaggcattcgtagccgatggtcacagttggctcagcaaagaatgccaagaaggcaggcttggaatggcattcatgggaatcagcagggagctgaccctgatggaagcacagagggcccagcagaggctggagaccatgggcttataaaggcatcaaactgtaattgtactcacatgagaagaagtgagagaactgggttcaaatcccaccctcaccatgtatgatggacaaataattccatctctcgaaactcagtttgtttatctgtaatgtgtctgctttgggatttgttagaaggatcaacgagataatttatgtaaagccctcagtagaaggcttagcacatattgggtacttaatacatggctgatgctgttgtgttaagtaaagacttgtgatgatgcagtaatgttgcatatttgccatttgaaagtaatctaatatttttagcgacttcagaattgataaagattcagaaagcgaaaggctgctgtatcctggcatcttttttttcctctctaatttataactttctctgtaatgaaggaatcacaaaggaaacaggatatcagtacacacaccatacattggggttctttggaattgatcccctgtaccataaaatatcccttgtctccgtttactctcaaaacataggacaagaaaaacaaatttaaaaacccaaaaaattaaattgaaaaaagaaagaaaaacagaaaacacaggtattgattgtagtcacagaaattaaccatttgtgtagaattttgtgcatacctgtgacattagttgcttagaggacctgcaactttgttcaaggtttcctaatagtcaagcaatggacctgggacccatccactacagcagttctaaacactggctcttaggggagaatttagagtagacagtgtcttggtatatcgccttggggtgaatgccatgttgtggatgatctggagatccacagctagttaacctgcaccatctcattttccacgaccgtatgtcacagagtccacggaagtgcagagctgtttaggtgactccccagggttccacagccggcccgtgggtgggcaaagatgttaatggaaatatgtatacttcagtctctgtgttgctttgcttggttcttctccttccagtcataatgaggaacagatattaggaatttggcttctccaggactgggagacagtgcatgtcttcatttttgagttctttgaatgttttagaaaaacaccaggtcaaatagtgcctgagtatattcaactgttcacacatttataaaggatctaaagacagcagggatgcaccatgttccctctttgtatggtttgtgtgggcttctcctctgtggttgtggtagttctgagccatctgtagctttgactcggggttgaaatgcctgctgagggtaatgcgagatacagaaagatgctgcttgacccaggctatcaccacagctgtggccctgctcttgtgagagtgtgttgtaaatgaccaacccagaacgagggatctggtgctctgaagacttcgtgggaagtgattcctggtcctgtcattttacagagatgagaactatgacccaaacataagttcaagggcacacagcctgttgacacttatggttagattattacttcatctctagaaacccagaccagagctgggctttgcgtgggccctaaggcacatcagaccccaatgtgcaactcagctctgcgcccctggacattgccctcagcctctttaagcgttggtttcctcaactgcaaagtcataggtagtgtagataatgggtgaaaacgtttggcttactactaaaaattgtctgcttcattactatgtgcaggtttgttccccgccctctttccccttcccccggccccagcccctgtccctatagcacatcacacaatattgtaacggcctgtttacctgtctgcatctcccaccggacagtgaaggctgggattcactcttctctatgaaatttcctactatgaaaataggtcctcagtagacacttagtgaatgaaggagtggtgaatgccaagatgcccctacagtcagagtcaacagcccatcaaccaccagttggtaaagttcgatttgttttacaaagtaaatgtgcttccacatttggtcctggtgcctgatcccattgagtttttgcaaagggccttggtgcctttgtgtttagtctaactcagttcaattgaatttagtgactgtctgctctgcaggttgctcaggatctctgtcctcaaggagttcccagactgtggggagagggcagatatgaaggactcactgtaatgtgcagtgaacgtttcagctagtagagagttacaggagttgggaacattgatagggaggcagggaaatctaccagggaaggtcagagaaagctgcagggtggaggcacctggtataccaggaggcaagggcatcccaggacgaaggcatagcctggggaagaacctggcgtggaaagtgtgtggtgtgttagggccaagcaagtatactgctgtgttcaaaacggatgttttatatatacatatctataagtgtatttagatatggatatatatattccttcagattcacacatatgcataaacgtatgtaaatatatagagatatatacatttttcccttggcaggtgtgaagcccttcaagtgttctttgtgtgagtatgcaactcgtagcaagagtaacctcaaggctcatatgaatcgtcacagcactgagaaaacccacctatgtgacatgtgtggcaagaaattcaaatcaaaagggacactgaaaagtcacaaactccttcacactgcagatggtgagtaaatggcccaaggtgaactttcccctctaaatgtgtggtttgaagctgatgttccagtttgtcagaaacttgctgtaccagaggcaggaaagagcacttgcccgttagaaggagcttctggaagagcggtgaagaccaggcctgacttcctcccattcctgtgctcagtgcctcacttccagcaggtgcaggataaacacttactgggtgtgtcggtgccagtggtggaggtatgcagggagggaagctgcttcaggaaaggaggtgtcttcagaaagccttgatccatggttccgaagtttccatcctttttagccctccatcaccacctggagctcaaggatcttgaggggcaaccttgatcacacctggcctgatttttcaagtgagtctcttatcatccaagctacctcagtggtggaaccaagtctaaagtaaaaccaacatttgggcagatttgacctagataaagtatacttaagtggatttctaatttcattcattcattaagaaccattgattgagttcttatatgtgctagacagggaggtaggttctagggataccaggtcaagtagagacaagttcctgcgttcaaggagttcgtaatctagaaggcagggcagaagagcaggcaggccacggtaaaggtaagtgcagtgatggaggggagctcgggagccctgggagcagggcatgggtcgaggtgggtggtgagctcggtgggcagtgggcacagtctccctggcacaggctggatagagggaaagaagatttgttctaggaagacaggcagctaaactgtaagagacttttaacatttttgattttacttagacaggttgtgtgagggacttgtaaatacttcatgtaacaagattaataaactttataaatgtattgttatttaccaaaattatatataaaaattggagtttactatagaaatcaaaattatttcaacagtgatttttaatttcaaaatttagtggatgatatagctcttaagttctatctttattttaagattgttctgaaaatcaatcctgttgtgtgtgtgggggttgggcccttggcaagtattcaggtgagctcgagggactcagtgcaaaggctgaatacttggctgggattcatcagaattaaagatcaagggcttgcctaaggctgaaaaagagccagagccataagtattaaaacttaagcagtactctctctaaaaaaaatccataatcaaaattaaaaatacaatgacagtaaagcagtcatacttgaataatgaaagcattaaagtcatgtagttttttatgattctacgcctccacaaacaataagccttactgaccgctcagctgcctgaacgtttaggcaagaattacatttcttaagatgatgatagcacataactactgcagtccttcagtaatgaagagcagctgtccccagaggcagggaagcctggagtatccagtaggccacggtgacagggtcaagaaggcattcacaggcactgaacagggttctgtcgtctcatgcctggttctgcagtctgggcttagcctttgagcagatagaagccatttaatttgtcaggccctggaccaactgatatagagggatggggtcggtgtgagtagttggtggtatcacgggtccacagcagcacactctgcctatcctctctgtcatgattctctgagttcttcggcaggaaagggagttcagatggacaaagatgtcttgttgtcaaagcaggaatgcaactcctgaaaaggaatggtattcaaacattatgaagtattttctaacaaaacattgggaatttgtattgtttctctttctttctttctgctgacatttttgggagggtgaggtatttgtaaagtcatgtctttgttttcagcacttttcagttctctggtaagaagggcatccaggtcgggcgcagtggctcatgcctataatcccagcactttgggaggccaagggaggtgagtgggttgcctgagcgaaggagtttgagaccagcctgggaaacatggtgaaaccctgcctctaccaaaaatacaaaaaattaacggggcatggtggctcacacctgtggtcccagctacttggtaggctgaggtgggaggattgcttgagactggaggcggaagttgcagtgagccaagatcgcaccactgcactccaggcagggtgacagagtgagacccattccctacaccccccctgccaaaaaaaagaaaggcatcagtcatcaggtgcaatgagaggaccactggaacaggtagcttgcctcagtgccaactttttccactacttgggtctcagttttgtcacgtcgcaaaataaagaaatgataccttcacgtttcttgggtttctttcagcctcaattctctgattctaggaagaaaggggtaaagtagagcaaaagggatggaaataggaggggccggtacagctttatttctaaattccagatgattgctttcccacagggctgctgtacttcattatttgtgtttctcttttgacgcttaccagtctcatgttttgcctgggactggcttggtaaacagggtgctgagtcatagaccccttgttctagctccattgctgatctaggatgtagctttaattaagctataggtgagtcatttcctttttaattttctcccataacatgtctattatagaaactttgaaaaaagtttatttacatctcttgcttatttctgtagtgctcatattttatcttgttgatgtcttacagctctttgtatcttaatactttgtcatcatttgcctctatgttttgtttatggtatctttttatatacaaagttaaataactttgttcatttattttcctttatgttttcatcttccatgattctttctgtcaaaagaaaccttcctcagtttggggcaaaattcttttactttttctttgagttttattttatgattacataacatttatgaaatttaatattcttgcaatttattttagcgtatggtatgtggttggaatctttgtttccaaacagttatcattgactcagtatatttatagagaaatcagtcctttcaattttattttgcagtgccagaatttcccaagatattgggtctaattctgagattttggtctgtgtcagtgatttttgtactagtaccttatttttcaagctgttctagtaattaactttatttttatccaataaagttaatttttttatgaagcttacatagtttttctcatttagttattattcctttggataaacttcagaattgttcatcaagttaggactatccctggggatgaccttgtgagctctttgaggatgtctgtaacatgctttgaatccattggtcacctgtgcttgtgcaggtgccttggttgtcttgatgaggctctcagcctttaaccatagaattagctttttacttagaagccaagattgccttacagcctgcctggaattatttggttttagttgtatttgtggtatgagtaataactgaataggttgctctgtagagaagctgtgtagagtaggtagagctagagaggcttgggtgtggatctgtttgccccttcctagtagggtgattttggtcagattacttctctgaacctcactttcctcatcagtaaactgggataggtataccctcttgttgagtgggtctgaggatcaaaagacaggaagtgcaccccatgtttgcctggcggcctcctgctctcctggctgccctgcctcggcatcctgtcctggttctgccttagctttctgattacctctcggaggccacagggttcagcctgtgggcattgttctttttttttttttttttgttccctgtgtcagagtctcactttgtcagctaggctggagtgcagtggtgcaatcccagctcactgaaccccacctcctgggttcaagtgattcttgtgcctcagcctcccaccatagctgggattacaggcatgtgccaccatacccagctaatttttgtgtttttggtagagatggggtttcgccatgttggccaggctggtcttgaactcctgacctcaagcgatctgtctgccgtggcctcccaaagtgctggggttacaggcatgagccaccatgtgttctttttttcttgacaccttaggtgatccccgcagtcttatggctttaaacaccatttagatagaagatgtatggtttggctgtgtctccgcccaaatctcatcttgaattgtagctcccataattctcatgtgatgtgggagggacccagtgggagataattgaatcatgggggcagtttcccccatactgttctcgtgctaggggtaagtctcacgagatctgatggttttataaggggtttcccctttctcttggctctccattttctcttgcctgccaccatataagatgtgcctttcaccacgattgtgaggcctccccagctacatggaactgtgaatcgttaaacttctttttctttataaattacctagactcaggtatgtctttatcagcagtttgaaaacggactaatacagaaggcttccaaacttgtatttccagccctcttgttcctcccagccttggcactgccatgtctgaaactgcccactcaacatctgcatttggatgcccacctggccccccaagcttagcgtgctcaacattaagctcccaatcttcgtccctagacccggtctcttatggcccaggggttgccaaagtttgtaaagagattgtaagtatttttggctttgagtgccacatccagttttctcttttttgtagtttttatttttacgaactttgaaaagtgtaaaagccagacttcggtacaaaagcaggaagtaggctaaatttggtgcttgggcataggctgccaacccctgctgtaccccatcttgggaaatggctactccttttcctttgctcaagtcaaaagcattgggtcagtcttgactgtctcattcataccccacacatgatccattagcaaatcctgtgcgttctgtctttaacatgatctggagttctcccgcttctcaacaccctcatgccatcctttttgtactggccactgtcatctcctgcctccattcttgcagtagcctcctaactgctttccctagaacctctcctggtccccacaagtccattctcaacagaacagccagtgatcctgtggaaacaaaggccaggtcgtgccattcctctgttcagaaccctcctgtctatctgctgtcactctgagtggaagcccaattcctcaccatgacctgcttgatccccccatctctctgatgtcttctcctactctcccccagctagcatctctccacacatattgtattcattccttttttttttttttttttttgagacagagtttcgctcttgtcgcccaggctggagtgcagtggtgccatctcggctcactgcaacctctgcctcccaggttcaagcgattctcctgcctcagcctcccgagtagctgggattacaggcacccaccaccacacccaactaatttgtatctttagtagagatggggtttcaccatgctgggcagtctggtctcgaactgctgacctcaggtgatctgcccgcctcagcctcccagagtgctgtgattacatgtgagccgccatgcccagcctatcttcattcttgttcctcacacctgccaggtatgtgctcatctcaagggttttgctttggcccttccctcctcctggagtgttctttccccctgtctgaatggatacctccttcatgtcctggaggtctttattgacgagtcactctgaatgagtcttccctaggtgctcacgtatggaaggtctccataccccaccaagtaatccagacgcccgtggcttcctgtgctgctctccttggcttatctttctctagtgcattatatagtttccttatttactacttttttgtctctgttactggaactgtcccactaattacttcatactctctttcatgttttttactttctctttaaaccaacccttctccagtgtactgtataatttccttatttatgatgttttgtgtcttccactagattgtaagcttcacaagcagagattttcgacttactacatttattttgtatcctcagcacttagaacagggcttggcttatcataggcactcaataaatttgtgtttattgaatgagtggaaaatgtaaagtgccttgcatgaagtggttgcgatatagtagtactcacaaagtgtcagtgattttctccatttcatcttagatcattctgttaaatcaaatgcttgtgaattaggtattttaaaatatggtcaaggaactcaccattaaatgaatcttcttgggcattttttaatgaagtaaaaaggaattgaataattacaattaccctttcttctaactacttgtgaatccaatttttcacatttgctggcttaaagtgatagatccctatctgtggcattcctgtttcccaaaggaactcattactgtaccttagaaaagatagctcattctgggtgaaggtttcagttaaaaaagtttgccagtcaatatgtacaaagagagaaattgatctataaagggctcgattaaaccctttgtgtgtatgccaacaggatgtaagaatttaatgcaaagatcatgctgtaatgtagtttcccacttttgactttaaaaagccctagacatgatgtgctgtctggaggtttatacacgattctgcccacccatagcagatggggaaggttaagctgtacagtgcctttatgttatgtaatcaaacaggaatccttaaatcatgaaataataaaagtctttggagtttatttctaattcctttgggtctctcccctccccctgatccaaactgcccctgtacattttaattaagaagtttttgggtaaaatttgaaaagaattatccaggcttcaagcactcttgtaatagacaagtggagagttgagtatggaaattaggtttgagtggagtaagtaccctttttttctgtcccttcttcaatttatgataagagatctcatggctgcaaattaaaatattctaggagatctaagtatggagttttgttttgttttcctccactgtcctctaaaaagcaaagccactctaggataaagtagctccatggccttttgcttctaaaaacagaaccaggaagtaaatagaaaatggtccctgagcacctagctggattgatcttacaaggttaacttgcgagacttcagtgagactggtctttccactgcatccttttcccttttgttcctcctcctacttgcccttggagaaaaggtgaagaggcaggtgtggaagtgtggctactggatgaacatggtagatttctgttgcttatcactgggctggagtctgggtggtgggcaggagaaggcagggctaatttcagggcccacaaatactgtttaataggttcaccctgttggtgttcatatgtagctctttttctcaggtttttataaaccacaagatccactgggaataagtgggcccatactataaaatgaactacgcagcttactgagcaattagcttagattgatatacagatttaactttttaatgaggcttggccacctaaaacctcaccaggtagagggtctcagctgcaaatatctggcacagtgtctgtaactttcatctagccctggtgctgtgctctgtcctttatgtggctttgtgctgccttcggtttctttccacctctgtcttatgctgatccatccctccttatatcaaaactgatgtactaattacagagaatcatcaggccctaagtctgcagttgcttgaagttcagcctttaaagtacagagacttctttaactgtatttttattgctgtagctatttctgttcgatttgccactgcataaatcaccacagatgctagaactgtgaagatgtgtgctttgcaaaacacttgctgcaaaatgcctgttatgcttcctgcaggacgcttttcttacatgaagcagcaaacctctgtgtgctgggctacatggagaagcgaggaggtagagtagggaaaaccttgtgctccagaggcaggcccaggctggaatcacttcttgcctgaacagtcttgaacagtgatccccatttgtaacatggaagttacatgtttccccgtgactcctgtaacaaattaccacaaagttagcgacctagatcaacacagatgtattatgttgcagctctggaggtcagcgatctaaaatcaaggtgtcagcctggctgcattccttctgggaactctggaggggaacctgtctctgcatcctgtggcttatggaccttttccttcacattcaaagccagcagtccagcatcttcccatctcttctgtccctgcttccatcaccacactccttctctgactttaagcctcctgccttccttttataaggacccttgtgatttcactaggactacctggataggccaggctagtccccagctcaagatctttagcttaatcacatctgcaaactcctttttattttttttccatatatgatagcatgtataggttctggggattagaacctggatatctttgggagggccattatcaacccacagcatggggttgcaggaagattaattgggttcatactatggatgtcagctcatgtacccattcctctggtgcatgaaccagtagctcttaatgacacagtataagaatggatatctgtagcagttaatttacatcattaggaaagattaagtcacttttttttttcaaatattctcctattaggaaggcacagtgcaatagttaatatttaaagagtatcactgttggaaagggtaaaagtcagttttctgaaaaaaaggtaaagtcaattttctaaaaactcttgaaaatttacttatgtaaaataccacctttttcagtaagactggataaacagtcataaggaggcatttttacttttatgcctctagaatagtattactaataacagttgagatttatagaaattctttcctctaagtactttagagctctttcaggtttgaggtgcacataaaatttgatttggcaaggatgatttaatttagcagatacttcaaacaagttgccttaaatcccaaggaatttttcattgccgtctctctctgtgttctgatggaatccaaatgccaaaagctgaaggtgacgttttaagtttttttctttcctaccattccattccttcttagttttacatagaactctatctaaagtaagcaagcagctggagtcatcctcagggaaagtcaccaagcagatgaggctgtagtaagaaacaaagggaacaacaggtgccgcacatactgttagtgccaagtcgccaggctggggcttcatagatcccacggtggcctgcccacagctgccgggaggccaggagcgattgcctttcttttcaggagcagagaatgggagctcagagtgtggctcccttgcagctgagcttcagaggtctagggcgacatgggtgcctttgtgcttccatatccagctgggaataacttcctgcttgagcccaggggcttcagcaaggcaggtaccctgctggctcccccacctaccacattgacatccccctctccttccttcaacgtggagagtcaacgggaagcgaagttcgaactctcgtaggtttggtcggtcacatctctctaacctgagctaggataacaagtattcctgtttcttctttccttctcctattttcaagtcccctcttccctttctaacaggacaacgtgggtaatgttttacctgggtaaggctggagtaaagagcagagctcagattctctgactccagaccctgtgctggttttcactgtctggtgatctttgaattcagccagcatccagttgccaggcccaggcagcgctgcaaaggacagaggtcagctttgcttcatcagtcatggacatgcagtcccagcactcatgcttaggcaaagaaagaggctccttccaaaagaacacttgaaagtggagagagattttgcaaagatatgcctcacctttggagagatgaacagaaacaatggaaatgacattttcgtgcctgcatccccatctttgaaggagagttcaaccagatcacacattttttaagggaaatggagctgctagtgaaacactgtatttccagaaagagctgcggtgtctgcagtggaaacctccagcaagcctggcactcagaaagatgtctaactgaaaactacagggccaggaacactgatgggatccctttccctccaccagcaacatcagcctgcataagtctacaaactgccatacagtcttcaaagtttatctttgaactacacgacacatctttcctttcttaaacgaatttgttgccgattctcaagaaccttccaaggaaggttcttgttttgttgtgttatttttatttttacgttttttaaattaaagtaacacgtacacacacacacggcacacacacacatgcacacatacacgcacacatgcacagttcaggagtgtacagctcaatggattgttacaaaggaggcacacctgtgtaactgcagcttaggagaagaaacagcacactgccagcctcttggcaatttcttcctcctgcaacattattgcctgtctctcctccccagaggtaactacttactgccctgacttctagcagcataacttgcttttctctgtctttgaacttcatagagttgattcatacaatatgtgttcttttatgtctggcttcttccttttcacattgtgcttgtgagattcatctaggttgttatgattttgagttttaccattttaccatctgggcctgtgggtcaaataaagaatttcataaggaaatgagattctaaattctgcaatttctgaccaggaagtctttgttcccacagtcagcttttttttttttccccaccgtggcaatattcttgcagtcagcttggagcatgtgttctgcaagagtgtttctccaaaaagtggtatgactcagctttgctttgtccttatttacaaggtgtggctcagaatgacatttgactgcttacagaaattaaatcctgcccaagaggaaaagaagcgactactcctgagattattcgcacaattaggccactggctcttttttgtgaagaagagggagaaagatgcttggtcagaaagagcacccgtaagtcagtgcgtagccagtcaaggctggggggctgttttttaaaagacagtgaactttcaggttcagaagccattggtatcattttatggctctgcgttgaaagatctgtcttctggtttgtgtgcagtagcggatgaaacatctcagcctttcagagatgggtgctaattatctgaaatgcttttctgttagagcacagacagcacgaaaacaatgttcataaaaatccaactgcttcctacaagtatgcccacaattctatcacctaacaaataaatgattctttaaaaatctttattcatgctcatatggaatggctgtatagttgtaatgaaaggatatcattcttacagccttgaaattaatattataataattcttcgttgctgtacagttcattaataacaagtttaagagttgtatgatgcactaaggtgatccatgagttgtgtaaccattcccttattttcggacaatgtgttattttcatttttcctcccattattttaacttatgtggcaggggcttctttcttgcatgtaaactttgtcttcttttgaattaactccttaggacacatttccaggagcgggatggctattttgttttggtggttttaattgtgcattgcactgccaacttcctttccaaaaaattgtaccagaaataagaaagtgtcccagcttaactcttccatttttaacactgtgttactaaaaatgtctagtttcttagtttaatgggtatcaaatcttaccatgttatactttttatttatatgatagctcataaagtcaaacaggtattgtgacagttaaatgagttaatggtcataaagcatttgtagctttggttcatagtgctgtgtaggagagtgtgctgtaattggacttttttcagttaattaagtctcattctgtcctctctagagaacgctgtttggtcaagacctatttttgcctggtttctggggtcttggtgtttcatagtcatacattcactggttcattcaacagctatacttcttggactcttggttgcagctgacagaaactcatattggttgcagttgacagaaactcatttgaggtcacagaagtcgccacggggcatttatggtaaagttacctgggatcttacagagactcagagcctttgtgtttgagttccttcttcccagtgctgtgttcacctcttcctcatgcggctggtcctcctcatccttccatcttagtataacgtcacttcctcacagaggccttccctgacagcctggccacatggccacacctcttccacactccctcatgctccaccatggctccttgcctttgtccttcgtggcgtgttgcagttggtaattatttgttggactacttgctggttgtccatttaggtgatgagtgccagaggcagggcctttgctgtcttgtccactctcatctcctgggatcaggcatggtcctggcacccagcagcccctccgtgaatgctcgctgagtgaatggacacagccagccaggagattgtcttcatcctccacctttggtcctctctgcttccttacttcattctgatgtcctgtctctgtctgtcttcgctgtgctctcctctcacccccagcagattggcttgcttacttgtttcacccacagagtgaaaacacaactcccatccactgctgagttgcaagcttcatatctggacagttctgattcctggctcagctagagtctcttgtccactgtagtccaatctcctatgactttgggtggggagatggtgggtatgacgacatatcactggcccttgtgatgccctgtgtgaccatgttgattatgaggaggggagaaagggtggctgaacagacttctgaatggggtgctcctgtaaattaactgctagccttacctccaggatgctctcacctccaagcactgaggacatggcatgaaaattgcagtcttgtctcaaagtacccacaacctgcaagggtgccagatggaccaaccaaaggtgaatcagtgcactgcttcggtgattgcaaccaaagcccaaacccaaaatctccactgtcatgaggcgaaaattctcgtgagtgagatggataacaaacactataaatcagcaaagtgtgtggtatattacaatggaaatatgagtacatctaaaatattaagaaaattgagagatgaaaataaaaatacaaatatgaaatgattccatttcagtatgaaaatataggctgagaaatgctaaaaatgaatcagtaaaggggcacagggactgattttaaacagaatggtctgaaaggactcagtgtgaaggtgacatttgaacagagacttgagggagatgaggcagcagagcacagcatatctgggatggacaccccgggctctgggaacagcaggtgcagaggcccggaggtaggtgcgtggactgtgtctatggagtggagagaggtgaaggcagtacatgagctctgagaggtgacagggagtcatacacccctgtgccctgcagccactgtgaagctcttggcttttgctctgggtggaggtgaggccagatagggtgctgggaagaggagcaggaggttttctgtaaactctgctgttataactgcttacttacactttgatatagttgtacaaaccttttcctttgctctgcttttatgctttttgttttaggtatactgatttaggctggcttaattagaactgaatatttggattgtctcagggagtgtcagggaggtacaggtctggagggcactgcactcagctgaaaggtccactgtggggtcacctgtatgcacccgcagcctcatccttcagggggctgcttttcagatgcttgcaggcccagtccctgagcccatcctcacagcagatggggattacctccccatttttctaatggggcctctgagtagcatagaagaaagaacccagggtcactcagggtgagcaggacagggccagaaagagaacatagttcccctgcaactggctcttcttgggcagtcttttctgatgggtagtcaccttctgatgggcagtcaccttatgtgttagtggcacagatatgccattgctggtataaattcctccttccatttcggaaattgtatcacacccttattagctgaaaagattcttatgtggctgtgaatgggggtgttggggtcaacagactgagggccaaatctgggctctgccacttatttgaaaatataagctgtattttcaaataagcttatatttgaagcttatttgaagcttcgtgatctggcaagtactcagagtcttgataccaggtcctcatccatgaaagggtgacactgcccacctcctgggtttttggtgcatggtaagattttacacgtcatgccccagtgcaactcatgatgcctagtagtccagtgagtagacctagccaggtatattttagggaaaaggcattactttttatcagtcaacctcttttctttgtaatcattcttttcttcccctgggattctgggagattcgcatccacgtacagccattcgatgtgcatctcccagcactctgaggtcaatctcacctcgagtaaatactaggttttgcagttgactctgcttgtaagtctcagaagtctcttgatagaaagccatctgatggtctcaaagtattgctcttttatgattagtcatgaatctgcatcccattattttaattaggcagcaaataattatgtcagatgccctcccaggcctgtttgataggtgctggcagtggttgctgaaaacattagtaatatttattgccagggctctgatgcttcagtaagggatggcttttagcttctgccttcttttcttgtctcttgcagagccttggaagtacatccataaaaggctgactcttgatttcaaatgaggcagttccatttattcattttaggactcttttttagctcttaatctgttactctttgacccaagtgtttgacaatgaatgacagaatatttatcaacttagagaatggttccatcagctctgcttcccccactctagtggtgaagaacacagcacagttttgcccaggctgcccagaataatgatgctgtatgcacatgagccatgtgtcagtggagaagtgtgtttaactgagattcaactggaactgtgtagaaatgtgtggccctgtgtttgaaagaagatgttactgtattttttttaagttctaattgctctctaattgtaacttgtgtgacttacaagtgaaaaagtttccttacactttgggcttgcagaattaataaaatttagaattttgggttcattcacctggaataatagatacaactgtggtattaatatttgtttccttttgctgctgttattgaggctgatgttcatataagatgtacaaaattttcactcagttcagtttaatgaaatgcatggaatatattcagtctgtgtgtgcactcatgtgctggggtaccaagatgagtaagatgtagtccctgcccatgggcagctgaaggcagccctgccttgtacaaggcggtagaggtggggcatagactgaagcaagtggacagtgtgtagggggcctatggagggctgcctcttggcccaattaccagagtgttcaatttgagttctgaattaacaggaagaatgaccagatgctgcgagacagtgcattccaggcatggaaaatgttagcaaaggctcaggggtctgagattgcaaaggcaaagcagaaagtttggagaactcaaggagttcagtgttatgagcctaaatacagaaggggcaggcacaagagaaagtcagagagaggggtggggtgggttggggagagttggttctgattctggagggccttctctgctgtgctctggaacgtcaactttgctctgaagttggggccattggttggttctgatggctagactgtgggatggtttatgctgtacatcatctggatagaagatgaggcatcaggatgcatgtgtggatagatgggtggattatggttgatggatggatggatggatggatggatggatggatggatggatggatggttggtagggttttatgaaggcaaggaaaccagcttaggggcttttgctgttgtctaagaaagaaatgaggaggacctaaaccagtgtggaggtattagaaatagaaatagacagacatgagaaatatttaggagatgaaatcaggtgctgaaaaaatgaggtgagtgtaagttagggccataaagattttgaggaaggctactgggtatctgatgtaggtgatcagatggatgataaactgggaaggctggaggtggaagccatttggtgaagaagatgtgtccagcttaggacatttgggacagctaagtggctggtctagcaggcagttggatactcaagtctcagattcagagaagagatcagagtagaagatgctgattttggcatcaaaggtttacaaaagtctgaaggggtcagttagggtcagttatatgcaaggatgcttgtagacttagagtaggagtgtgggctggaacactgtggaacatcagggcctaatgatagctgccctggtgagagggaatgcctcaggggtactcagaatgaatagagaggcccagagaggtggtattgttgcagagtcaaaggaacagaagatttccaaagtgtggactattaatggagtcacatgcagtacagtcatccagtaacatacagaccaaaatctgccattggcttggcatcatagtgggaacaggtttccaggtgagctggcagtgaatagaggggagggggaatatctaagagggaaaggtgcaagagtgctctgggaggagccagcacttctgggaactcagccacagtggctgtgggtgtaatgccctgaggaggtttacaccattagaagctacttgttgaattctttactgctatacgaagtaggccacatttacatttggttacacatgtttgtgttattgcttgttgaggttttatttatgctaatcagaggcaaaatgtagggtacctcatatatctattaatttgttttaacatatcccattattgaatgtttaaatattgctaaaaccttaatctttttttttttttttttgagttggagtcttgctctgtcgcccaggctggggtgcagtagcgctatctcggctcactgcaagctccacctcccgggttcacgccattctcctgcctcagcctcccgagtagctgggactacaggcacccgcgactgcgcctggctaattttttgtgtttttagtagagacagggtttcactgtgttggcctggatggtctcgatctcctgacctcgtgatctgcccatctcggcctcccaaagtgctgggattacaggcatgagccaccgcgcccggcctaaaaccttaatctttttaagaccagtggtttacttttccctagttttctttctagcattctccccaaaatgcctttggcactccaaacagagttaggagttctgcaacgcagatcctgcactttgctggccatcatcctgcagactcacctgactttcagggttatgtctgaggtccttgtgagatggtccagacccttgatattctgggccagcaacctctctggctcagctcttgaatttctgcagacctcacactccaggaaggaagatgcagctgctcctctccaggaaggaagatgcagctgctccgctttcctgagcaccctgtggtccattcccctgcagtctcatctgtgtgtgcccctctcccttgatgcccttctctctgggcagctggacacacccttactctttctttaggagcctgatcgaatgtcattgctcatggggcctccccaggtggagctggctgtgcctctccctccctggggagtgcctctccactcccacctgttgaagactgagcatgctgcattgtgcctgtgcacctcgtcgctgttcccttctgagattctgatcctcacatggcaaggaacacctttgtgtacctggctccatgcctggcacttcattcacagtgggagctgttggcctggcgacgctcatcttgtcctccgcttctttccagggaagcagtttaagtgcacggtgtgtgactacacagcggcccagaagccacagctgctgcggcacatggaacagcatgtctccttcaaggtaagagggctctggagaagaaggcagatgttcagacaaaaaaggcgttgcttttcaaagtgaagatggagagagcattctttcattgtttgttggttttaccttcgctttggggcccccttagctggtacacgtggagtctgaggcatagtgcagcttatttgtgctctctcgttccagaagcgtagcattgctctgtaatttggaaaccaagtcaaagatgtgtaagaggatgcagacagaagaaaaggcacgatctttgcataaaagcactggagtgatttagaggaaggcttgcaggctttagggacacgtatttttgctttcagatcctggattgctgcaggtgagtcacccgataaagcaggtgtgatgaagcccacccggcaagcagttgtaaaaactggagattgtgttcgggagtgtccaccacagtgcccagcatgttgcaggggctcaggagatggtggcatttcatattcttttaatgcctctaatttgtgtttcttcagtgtaggtggtaatgcttgcttagccactgcttatgatgcaattattgacaacaataactagggtccagtaatgtgttcagtaaaaagttctgctcagcacttggggaaacttgaccctgagaattactgctgttgctggcacagcaacatggcacacatggcacacatggaaaggaatcatcaagatttgtaaacttgttgctctaaaatggtttttgaaattatgtctaccattacatcccagagaatcatagaacatgggagggactgcagggcatctgttttgtccctctggacttgcagctggtatcaccccaaaagtggtggcagtggagttcctaccaggcagtgccccaaactgtcctgatatagggcctgttgggattccaaagaaagaagcactaaacactggggtgatttgtttaaagcaattactaagtccttgccacagacagcaaggggacagggcgtggggtgttctactgggatatgtccacagcaaggtggtcagggtatggagttgtatgagccttaatggaatttggcttaggcagggccaaggctagtttctttcagtggtgtcttgggcaacaatctagatactctttttttttttttttttttttttgagaaggagtctcactcctctttttttgagaaggagtctcactcctctgctcctctgttgcccaggcaggagtgcagtggcacgatcttggctcactgcaacctctgtctcctggtttcaagcgattcccctgcttcagcctcccaagtggctgggactacagggtgtctcaggtagcccgctgccacgctcagctaatttttgtatttttagtagagacggggtttcactatgagcaacctaaatatttttattggtgcctgagaatgttcgaggcttcagttctggttcaagcctgctgggaaatcctgcagctggctggctcacagaacagtcaaggcaccctgatttttggtcaggacacagaaagaaagcactggggagctgggcgaccctacaccagcacactgctagcttgtgtttattgaacatccattgcgtgcaggcactgtaccaggaactgcatgttcatcatctagaatctccttcatggtacatattatcttccgtctttgaaatacgaagattctaaacctcagagaagctaactgatcacctgtcagtcttttctgccatggctatatccactgacttcagtcaccatgatgatattgactcacctgcattcagcacttctgaggtgacgaggaccttccccactggcaagtttattttatgctcagaacagccttgtgggaggtgaattttcatggttccccctcttgtagttgaagacattgagtgtcagagggaggctcggagggatctgctggtacgccttcaatatccaggaagtgaagaagctaaaacatggacttcatcctttcactcctagtcttgtgcttttctcactacatgttctcagttacttgttgggggcagaaagggagaaattggagaaactaaggatgttgaaaggtgttgcttgtatagctgctttttaaaaccacccgtactgactgtgagtttcttaggtaggactcatatgtcacctagtgggattgtggcagtgtctgaatcaagaagcgtctttagcgttatgcatatttgtgtacgtatttaaaattaagagctttatttcacatttcacagcatataggtgtacttctttgggggactagtgcaattattgtgctagagaatagagagctaaggcaaatttcactttagaggtgagaaaattagacccagtgaggttaattattttcctggcttttgcagcattgctactagacttttcaatcattccttggtttacactgtgaagcattttccttccctaaacagacctagctgaaacagcctttttgccctgaaatccttactggtttttattgttgttgttttgttttgtttttaagattgtggactatctggtttatgtgcagaagaaatggatttgggggtggtttcagttaaggaatcactcacatatgtattattaacttctgccattacatagttggtgtccggtgctgggcctcaggacctgctgcactgagctggacctggggtcatggctggtttcccttggactccctgtggattttagcttcctccctattgagtggtactatagatgggaatgagattcagacctgagtgagaaacagtaaatccagccttagtttctctcatcccacaacttagggtattcatcaaatgcatatcaatttaggtagtgtttctcaattaattgggactgacaaacaaaatgaaattgcttcatgccaacccctcatccaaatagtgataatcactctctccctgtcgtcttcccttcccactctctgtgttaatttcctattgctcctgtaacagattaccaccaatttagtggcttaaaatagttcagattgattatcttacatttctgtagtttggaagtctatcacacatctcactaagataaaatcaaggtgttggcagggctgcattttttctagaggttctgggaaaaaaaattcacttccttgcatttctggcttctacacgcgacctgtattccttggctcatggccactcccttcatcttcatggccagaaatatggcatctctcaccatgtctccttctctgactctcctcttctgcctcctcttctacctttaaggaccctggtggttatactgaacccactgagataacccacaacaatgaatgtccttatcttaatctcagatgattagtaaccttaataccgcctgcagtcttaatttatttttgccatgcaaggtaacatatttacgggttccggggattaggacatggacttttttaagggccattattctgccaaccatacccccccacttttcttccttttacgtctactctgtggtagatcattttcagcaagatcagaaaatatatgatattcatacatataccaatggcaaacattactaagaaatcaagtctcgctttttttactaatcttagattagagctcaacatcctcacacagatgctactaatcaattgtgattggcttacaagatgaaatcaatttgcttttctagatgtagatgtacaatttacaatatatgatttgtgttagggaatattataataagggcaaattcctgtattgccttttaaaagtacatatttcttatttgtatacttattttaaaaataaaattaatgtgttcactaagtaagatttggaaagtacttgttgattcctttccatatggaatttttttgatattatttagacatggttgaggtcatattataaatgcagatttttttttctttttgatggaaatcggtgcctaggtttaccactgataaagctctattggagaatgtggcttagatgactggcctgatggtttgctgctagggtactttaccagtgaaaggcagggccggagagcttatatgcaatttttaatattgccttttaaatcagcattttgtaggtgttttccattttatgaaaatgtatttataaactagttttaatggctgcttaaggatgattatcatagtgtaaccattcctttcacaattggatagtttggtcattcccagtttctgttgttataagtaaccctgcagtggatatctttatgccaaaagcatttccatgtcatcctgaaatctaaatagctataaaacgttgggtgaagcccatcaaacatctgagaattcacaaatagtaaagatgttattttctcttcttgcagatgcaattaaaatgcattccctaggatggaactgatattttcaaccttaaaagaggtgccagagaagatacttagacaagatgaatgttgctgaactaggattctctaaacaaaaataggcttattccttccatctagctattcgactctttgctttcttccaaatccttccatctagctattcaactctttgctttcttccaaacccttccatctagctattcaactctttgctttcttccaaatccttccatctagctattcaactctttgctttcttccaaatccttccatctagctattcaactctttgctttcttccaaatccttccatctagctattcaactctttgctttcttccaaatagataagtccacgtatcattatgtaaggcagtgtagttaggcaggaatcaccttgtggagttctttctcatttggctcctttggacccctaactctgttgatagaaatgttctcaatgacagagccgattcagtggcattctccttgcacatgaatcaaaagtgagtttattttaaaataaaattttatcttttcatttaaaagggacactcattttcatctaaagaggatacctctttgtgctaaccttatatatatatcattctatactaagtttgaaagttgttatatgttgagttcatgggattcatacaacctgtgaaaatgctgtcgtgagagacattgagtttgggatgggtggtgtcagtgatagagagggagggaaagagagagagagtgagaggagaaaaacagatgaacatgagaggaaagtcttgctagggcttacatcacaaccccataccaaaatggtttgtgagatctgccattttagctgatcttgaatctctctgcctccctccccagatagtttggtagattgattgaatggcccattcattctaggaaactatgctagatttctctcagcatatttgttagatgtcaaagcctgagaatggattttaagataatactttcaaaatccaagaaaaaaatattgactggacagctggaattatttttattttcatatgatattagctctttaatatttgtcttatttttatgaatatctcatattaaaaataaactgctaccagtaacccagttgaaaaataggcaaaggatatataaaaagaacagatcacagagaagggaataactttgagtgtatgataagttgtccaacctcactgataattaaaaaaaaatagtaaaactacattaagataccatttttcacttatcagattggtaaacattcagaagtttgcaagcatgctccattgatgaggccatgaggaacagccattctcacacattgctggtgggagtgttagtgcctttgaccctgtggaggtcagtttggcagaatctgtcaaaattgcaaatgcatgtgttcttcgactcaccacttgtaagattttatcctacagatatacttgcagatgcatgaaatgcttactgtgcagggttatccattagcaacaactgaaatgtctgtgaattagggtaagggttaaataggcaatggggcacacaaacaacagaatgatgctttgtggctacaggaaagaatatgggatctctctacttctatagaaagatatttaagatatatgaggaagggcaaaaagtaagattaaaaaagggcaaaaccatatttgtatttacttatgtttgctttcaagcctctgcaagaatacatgcaaaataaacaaagaaacataacctgttgcaggtgggtgagggttggaactgggtagactgagggacagggctgagagtgagacttttccctatatatatattttaaccatgtcaattaattgctttacctattcaataatttaagtaaaaaacagcaacgtagtaaataagaatattatcctagaaactatctaaagtcaaagcagaatgtaaacatgtttcttatccatgataccatcctatgaagatagtgcaaattgcctttggaatttcattgagattctgtttggcatttgaaaatctctgagagtgatgaggtctcatagcaaagcacaggatttagaaccaggcagatgaagtttcaatttctggctgcaccacttataggctgtgttatttaacaaattttatgatctgtaaaatgctgatagtgatgtttgtcttctggtgttggagatattaaaagcaataccattttttatgagtagtaagtatggtacatggtaccaggcaggtgatcaaaaattgttggctcttgtttcctcccctatctcttgaaaatgactctagttctcgaaagaactacagcaaggaatataacccagcctgatcgtggtttatatacttttcggtgagattacattatgtttaaaaatagctcactctaaatatttttctaggtgttatattgtattttttataaatttttagatattgatgttgttttacttttttcttgttgttcggaattgttgggttaggcagattggggccaaaatgttgatgctgctgcttactaattagttaacctttgggaattcctttacctttttgagcctctgtcttcttatttgaaaaatatgaacactgatataattatttcagaggctttgaaagaggagttgctttgagggaacagaccagaaggaatgtctccacacagctttgggaaggcttggcccatcagccctgccaagccattcctggggaggaagtgctggggtgctggggaggacctcaggtttgctctttcatgaagagagttagggggctttcttcttacaaggagaaactctggcctcttgccacccttcctgcaagattgacttttctgtaactttagtcaacatcagaattaccttgggatcttgataaatgttcacataatgcatttctaaacccagaagatgctttcagtaagcctagagcccaaccgaggatccttgacttgaacacttccctgtgaggttctgatgcaggggccccacagcccataatctgctagacagtgtactgggttttgaattctgcaaagaaaggccctattcaaatatttttacttaaaatgttctcctgtaaacagcacacagctagttcttttttgtgtctgtgtgtgtgcctacatgtgtgtatgtgaattatgtacctgtgtgtaacagggtgacaatcactgccctttaattggagtgcatagtccatttacatatagtgtaattatcaacatcttttaacttaagagtatgatcttggtgtctgttttctatgtgttgtataagttatttgcttctctttccttcttttctgtcttcttttgagtgaatcaagtattttttagtattccattttatctcttgtattgactttttattttagaacagttgtagatttatagaaaaaaatgtgactatagtacagagagtttctatataccccacacccagtttcccctgttgttaccatctaatatcaatacggaacatttgttacaactagtgaatcaatattaatacattatcattagctaaagtccatattttattcagattttcttagtttgtacctaatggcatttgcctatttcaggatcccattaggataccacagtaccttagtcctcatgtcctttttaggatctgtttggatttaacagcttctcagactttccctgtttttgatgaccttggaagttttgagggatactggtcagtcattttatagaatatccctcagtttggatttgctgaccttttaaccatacttttttgtgttcgtcttgttttagtggttgctgtagaccttaacttatctttgttacaacatattctagtttcaaatattatattattttatgaacaatgtaagaagcataaaacactgtaattcatttactctcctcctacactttgtgcttttgttgtcacacatgttcatgttatgaactcctcaatatagtgttgttattttttgctgtaatcagtaaatatttataaaatattttaaaaatacataatgaaactaaaattttaaaaatatttaaaattaaaaaagcatttaattaaaatattaaaatatttttaaaagggtaaatatacatttacctgcataattcacctttctggtattcttcattttctccccgcagatctgggcttctatttgatacatttgtctttagcttggagaacttcttttagcatttcttgtgtgctggtatgctagaattaaattctctcgatttttgtctgtttgagaatgtctgtatgtggtcttcatttctgaaaaatattttgatagccatagacttctagggggacatcactctaaaaatgttccatcccttttcatcctttcttgtttctaacccttatcattgtttctctatgtgtaatgagtctttttcttctagccggctttaagattttcctctttttttttggttttcatcatattaacatcagcaagtctaggtgtggtttcctttatatttaccttacttggggtttgttgagcttctgtgggttgatatccttcatcagttttggactgttctcaaccattatctctttcttccttctgcttcatttgttctctcctttccttctaggactacaataccacatatattaacacatatgtattaatacatatatgtgaggcactaatagcacctcacattctggtgatctctctctctctccctttaattcttctttttatgtttcagtttgtatagtttgtatgatttctatttgcctttcttcaagtgcacttatcctttcttaggatatattaaatctgctattaagaccaccaaatgtgatgttttaataaaacttctaggatcttcatttggttcttttctttttctttttcttttccttttctttttccctcccttccttcccttccttccttccttccttccttccttccttccttccttccttctctccctccctccttccctcccaccttccctccctcccgccttccctccttccctccctccctccttccctccttccttctttttgtatcttgcttgagctcctgggctcaaatgatcctcctgcctcagcctcccatgtagcactttctttttgtagtttttgtttctctattacattttatcatctgttcacacatgttttttattttttttttcctagagcttttaacgtatttgttctagttacttcagtgtttttgtttaataattttaacatctggggcacctgcacatcagtttctattgactttttttcttttcttttttctttttctttttttccctgcagggctgcagagatgtttttcttcttggtttgaggtcatcttttcttgcttctttgcatgcctcataatgttttaattgaatgccagacattatatgtgaaaaaacagtagactgaggtaaacaatagttggccttgggaaagtatatgttattagtgtggtggattgtgtagaaaagagttaatatagcaggcttggctgctctcctttgaaagacctgcttacaagcttgggctggcatctgagaacatggacttccaagacagttcatagcacctcactgttaagaggagcttacactttctaaagcatttatacaaacaatgcgatttatgctgaatacctgcctttatttctgggagtatggaattttggtacatgctaggcagagggtacttacatgatcagccatcactaaagtttctagtcactaagtctctaacgagcatctctggttgacagcagcatttcataagtattgtcacagttccttgctggggagataagcatgtgctgtgtggctccacttggagaagacccttggcagctcgcacctggtttcccctagccttcaccccgtgtgcctcttccctttgctgattttgctttgtattcttttactataataaattgtagccatgagtatgactatatactgagtcttgcaagtcttctcagtgagtcattgaacctgagggtggtcttggtaacccccaactcaagaatgaataaatctcatttgtagttgagctgggtctgggtctgggctctgaacaactctagggttggttttcactatcttcaaatattctgagaagaggatcaaggactttgctttcagcaaggttgagcatctgagcaccagtgagattccagaaatcatgttgtgttttacagcccagcactggccttctcaatcatacaggcgctctaccagctttgcaggtcagctgccagcgtttcaggatgctgcagagtttctgtctctctccagctccaccccgggctttctgtttattaggcatctctctcctgccttgctctgcctggggaactctttggagagttggcagtgcacttggtgaaggccttgtgtactttgtaaggagtggctttcctctcctctttcatctctggcgccagcttcagcccccaaccctcttgcccttggtgaagttctccatttcacagggaagaggttgatgggtcactatgctggagataaaagtaggacaaaaggaactggtggataccttggtctctagcatagcgacctatccacctcttgtctttttctagaattagttcacttaggtttctttgtatccttggcaatctgatagatccgtcaagttgttagtgtgagatcagtggtctcttgtggttttctgcatcctagctgggagcaggaatactccacccctgtgattctgacagtgcctgtcagtgtctgcacaatgtgggtgcctgtcagatgtacctattgcccctgctccaacatacacagaacttgaagctgggagtcaggagcaaggagggtgactgagacagcagactgtggcttatgtgagtaatctgggtgggtgcagagtcacgaggagagagtcctctgccagctgtcatgcaagggtattatcaatgcagcattccccgtgggtagttcaggaaagacttggagattcatggacccttgggactgtccccatgagagaaacaacagtgtgcaggtttgatggaaggcctgtatcctacagcacaagaccttccttttttgacattagagattgtggctctacagtcagactatcatagaatcctggcttcccacttactgcctgggtggccttgggcaagcactctcccctctgcagcttacctgtagcacagagataaaagaagtacctcttcttgccactatacacattgtgattagtcaggaagtaaataaagagggcttgtcacgttgttctcaaatgttagttctgtagagactccatcctggtttcttccttttttcatcacaggactgtcctgactctacaatcttcctttctttcatgactttgtttaagattcttggtgcctgtggcatgttctgtttgttcacacagtcatattcacttaattccactaatgtggcacattctttcatgatgtacctgaccacataaatatgtcactgagacagagtctcactctgttgcccaggctgtagtgcagtggcgcgatctcggctcgctgaaacttctgccacccatgttcaagcgattcttctgcctcagcctcctgagtagctgggattacaggtgcctgccaccgcgcccggctaatttttgtgtttttagtagagatggggtttcaccatcttggccaggctggtcgtgaactcctaactcttgatccacctgcctcggcctcccaaagtgttgggattacaggcatgagtcactgcaccggctgagaagcttttaccaggtatgtctcccacccagagttcttaataaacagcctccttctaacagtgaatgtctctctcctcagtggccctgcccttcactgctggacctgctgcgtatgctttcaaaaagtgtgattctcctgcagaagggccttgccctgcccttgccccaccattctttcctcatcactacctctcacccattttttgcatcgcacaggacatgccacaaggccccagcactggaggaagtttgccctttggctcattcctctgtgaagctccaagtgcaccaagagcttttcctggtttatggaaagcatgtcaaaatttggtgtgtgaatgtgcaagtccacaaaaagggaattcaggtctgaaatccacagtttttgaaatctgtgcattttggagattcttcagtgtgacttcatgctgacccttccttcttactttagacgcttttgcttctgaaacagaataaccctctctgctgtttgacaaatagctcagatcactcctctgtccctgacctccagaaggtgagactggccttctcttctgtagccatcagccttttggtatagatgagtatgctctttcacaagggaaaccatccacgccatcatcttgaaaagacactatttaaagtttatgtttgatgtatctctaaatgcaattgaatcttcaaaaatgtgcaccatgaagctggagaaatctattgcctgttgtcagcctaaaatttgcataactaaaagtattttcataaaactagtgagaggcaagggagatctcaatcaccgatttcattatcattgagaaacttttcctgagaatgccatatagaatacatgataccacaatttgacattcagaattttaagaaaaaacataagtacaaataaagtgctaactattcatttggttttttgatgcaaagcatatgaaatgtttacttatttttcaacacattttttttttctgaataccaggcacttctgtgtcaggcaccatgacaggggcagaggatttcaggatgaaggcaggcctctggtctgccagggttacaagtctggggagaaccaaatagacatcaaaagtaacagcaaatatgttaagtgctacaaaaagttatgtacaaggtgctgtgggaacccagaaaaccagcaaactaattattccaactttatcagtttttaaaaattatgttttaattggattaatatattatcctgttgtgtaaaacctgtaacttaaaaaacccgttgcaaccagaaagctctctgattgactgatacccacaagtcaaagggaattagtgtaacctctttttgcattcctgatgatgaaataagtcctgaaggcctttataatgtgtcggtgtgaaagggaaatggttgtatgtacaaaatacacgaggcatctgagcacctagaatgtataaggggcttgggtactcagttgaacaaaggtgatgtttggatgaggtcagccgaggatgtggctgtgtaatttgctcctagtttccaatctaaactttgtcagcaaggaagtgaaagcaataaaatgatctcaaataagcagattgtttggaagccacacatttataaatagttcaaagtaatcgtctcagagtctcagcaccccctcagaatgctgagtcatctggcattgcttatggcattgcagttttatttatactacaactcctcctgttacctagaagacgttttcatctttccacaagaaagttccaccacaaggttgaatgtttaaatatctagcattagaatgaataagacgggtggactggtttctttgtaatagccatgtgcttggcattacgcaggtgttttctgtgtattaccttattttgccctgaaaaactctaccaggtaggtaattaacatccccgttttacggattaggacactgaggcccacagtctattttagtaatgtgctcaggagtaacacaatttctatgagctagagttgggattttgatccatgtctctgtagtgaaaactactctctgcgcgttagtccacgctttctcattttcaagtgaagcagaggaacttatttacccctttgtcctttttcccctcactgctatgcctatttaagcctgcagctgtatgtttagctatcaagactcgagcaaaatcttcaatcaaaatgctgatggagtgtaaagttagcagccagaacattttccaggttcagtggaaactactgaaccaaggggcagagggaaagaagtaaagcatagagtttctgttggtggtgtttgtcttgcttttcagttccaaatttgcaagaaaatgaggaatctgagattacacatggttttcttgttaattttgaacgtggcgggtggggttgggagcgggatgcatggcagggccatgtggtggtggtaacaggggccatttgttaaattggtttgaaatgcaaagtctctgctaaaaacctcttagtgccatcttcagcttcattctattttagatgtttaaagcacctctggaaaaaaaaggaaattggattgttttatgttaaattaaaatcctgtctaagagtgtgcaatatattctctggaaatactgcatttttgacacaagcgataacaaatcaataatcagagaacgctaaagagtcttctaagcttgcacaaaaggcaattagtgtggattgatttactgttatttattgtgatgagataattgcctcaacacaagccatttttgaacttgtggtatgccacggttttaaaacatttattctcttaaattgtttaatttgtctctggccttattttaaaaccaagataggtttgtgcttcgtaaatgatatgaaggcctggcattttctctctggatctttaccctgtgctgttttttttttttttttttttttccgttgtgaccaaccctggatggaatgtaagtcccagcttcatgttctcaggtttataaatcctgaagcgataaagcaaaaaatatattaaaagatttttatctcccagcatgggtggtgcccggtggactcggccttgagcctctccactttcaggaagacttggattatagaccagagtgtgacctaccaaatctgcctgaattatacttggccactgggaaaaggagaagggaatgatgttctcattcacctgatatcccgtaaacatcaacattactttgaaatctttagtacaaacttctttacatgctaacacgagcccatgaaaatctgcttccccctcactccctgaggtccttgaagaggtccgagggcctcttcctttcgggcgtttgtctcttgatatctcttggcttctgcctctgtgtttctttccccttgtttgtctcctgtgactgtcagtgggtcacgggggtctggtgtgtttgtttgggtcaggtggagtgcaccagtttcccacattgtcctgtgtacatgtggttcacaatcccactgagctcaggctggagaagaaggtgagcattctaggtgcaaatgttctttaggaattttccttacgagaaccaccatgtatcttgtaatttacagtcttggtcctttgttatgaatatgcatttttttttgagttgcccactgcccagtataggggtgcagatctttggccatgggcctagtgatcagtattcttcttgctgcggggtggggagcattcatgcagctctgctgcagtgactctcaggcactgagcagcctctggggatgaactcgtatttcttcttcttcttctttttttttttttttttttctgagacggagtctcgctctgtcgcccaggctggaatacagtggcgtgatctcggctcactgcaagctccgcctcctaggttcacgccattctcctgcctcagcctcctgaatagctgggagtacaggtgcctgcccccacgcctggctaattttttgtatttttagtagaaacggggtttcaccatgttagccaggatggtctcgatctcttgacctcgtgatccgcctgcctcggcctcccaaagtgctgggattacagatatgagccactgcacccggtctgaactcgtatttctatgaaacatttccgtctgtcagcctgtgtcatcatccagaacattctggaagagtcacaagctttactgggtgaccctgggtagataatgggccttggagttcagagattcaatgtgatggaattcttccgagtggaaaagaagtttctcgtgggcacagttaacgtggagtagtgacgtgagtcgggcagtcagccaatcaggcttttgttttcgcgtgttccgttctgagtctctagtgcccagtgctccactggctgtggtgcaacccagcagtagcagaagacatggcttctgtcctcaggaagctcagcttacctaggagacaagatagaccctccctggaagaggccataagtcaatgttttccatggtgtgccctctagaacattagttccctgggatgtcagtaggtgttaggtggtagggacacagtatgcagtgattttcaatctcatttggctggagaagtccctctcctcctatttttcccaaagtgcctgccagcacttacattttgtgaaacagactttgggaaacactggttatcagagaacccagaagtagagaaaatagtataatgaaccccatgtatatttgtcacttcagtggcttctggtcacactcagagttaaagctgaaatcctacaggtggccacaagcacctgctctgcctggcctctggttcccgtgccgcctcaccctccaccctccattgcagacgtggcgtgtcccactccatctccgtgcttggttgcacctgctcttcccacttctcactctgcttttctcccaggtagccacacggggcttctctcacctccttcaggtcttggctcaaatgccttatttttatgtgtttaacagcatcaatgggttatatatttacttgttcataatgctagaatgtaaattcttgaggctctttgtttagtttttgtcttactcccagcacctatgcagtgcttaataaatatttgctgaatgaacaaatgagtaaatgaataggttctgtagaaatttactgtgatagatttatcatggccaacttccaggtggaagtaggactctgagctccttcaagggcttggagccacaagggaacagcgttcaacagatcctctgtttctgggccatgcctggtccttcactccattctgtggctttgagctctcagttcttccctcctctcacagttgccagaggcctctttaggttaatacaagataaaacatgtgtaagtgctttagaaaggaggtgctcagcccaggataaccaagcatggtcccaaggctcatgggattcttcacactcaccagatgcagtgagccaggccctggaggatgctgaaggatcacagcagaggttcactgcagcccaccaggagccctcctcttagcaaagagcaggtttactatctgtaagtgtattgttttcttatgttgagcacagcaaacctaacttcattattgttatgttcaagaagcctcagtggagattcctgtaagagggagttcatgtaatctgtttctggtgtgttctttggaaatctatgcaaatgcagttataataaatcttcactactgcagtggtgttaactctgacctgcagtgtttggtagttctgtggacagttctgtgggcagttctgtacagagccaggtcctgaggagggaatagagagggaaggggaataaatggtgagaaggttatgctactagaactttgggagctggaattgctgctgtgaaaacagcaccatcttgttgatgctgtgatttgaaatgcaaagtcatctgcaaaactgaaaatacagtataaaagcaaaagttgcagaaatcatccatctgatccgttagcaggagagattattgctgaagtgaagcttgtttgtggtgagctttggtgatcagtgctccagcggccaaggagaccgggccgtgaacattaggatccaacagaccttagctagaacactagtttggctggtgactaactgcatgaacttcagcaagccgcttaacttcgcagggccttgtctgcaagatgagaatgttaatatctccatctttaccctgggtgactgaggcatgtagtagaaactcagtgacagctctcattatctgttgtgaatttggggtcccctccttgagctcatcttcctctattgctgcaaatttaaacaggaagtgctcaaactccaaatgcacgttaaaagaaataccgttggttctgttcctttaactgaggcgtttccactgttctttgtgtaaactgtcaatgataataatttgatgaacatctccatgcagactgctctgtttacattagctccagtccttgcaataaaaggagcaaacattctcaaagttgcaaagctgttagacagtagagctagattgaggtctgactccagaaacccctgccaattaggggttgtgagaagtgtcacaggccacagacctctccactgtacatggtgggaaatatttctcagaagcatctgttctggttgtctttttcccccagaaataaaagagaggtaagactgaagaagctatcacttcatcctttacgggctctgattagatgaaattgctttctaagtctcagaagtaactgaattaagtctgaattcaaagttctcaagaacttgggatcccgccctcccccagcccagctacacacttctcagggtgacttggtgctagcttgcattttaggggattgatggccactccagacattaatgaaaaaaacttcatcttcctgtcgcatttcctcagctgcagaagtgctgttgtaaatcttataggtgtcctaccaccaaaacccctcgggaagcacttgcatgatcaagaccatctctccacctgggtaacttgatttaagcttggcaatgccagatttatagttaatatttcctctaggcctgtcactgggtctttagagagaaattcctactatagcctcatttttggaatatgttatagtatcaatgcagtttttatcacacagatgaaagaaaataaacctaaaaattactttgcatgtgctgcaataagtgttgtcgtcgtcagtgttattaatgttagtaataactaccagttgcatgctatgtatcattctaggcatttaatgtaagttctctatagtcgtcataaaaaccttgtgaagggggcctctgttgcctatttacccatttggtcatacatttctttttactgtctttctttctttacttttcttattgtgaaatagaatgtatgtccagaatagtacatatgacatgaagatgtggtgtgatgaataattatgaagtgaacacttgcatagctgctgcccagaaatagaccattgccagacactgtcctgtggggtcttcctgagcccaccctttctctgtcccaaaagtcaccactgtcccgacttcaatgacaattattaggttggtgcaaaagtaattgtggtttttgccagtaaaacacacgctaaagcaccttgtttagagatgcatacatgggtggccttacttttaatggcaaaaactgtaattacttttgatcagcctaatacttttttatttcattatagttttgccaaccacgtatgcatctctaaaccatgtctcatttttttaatttattactttttgtagagacagagtcgtgctatgttgcccaggctgttcttgaactcctgggctccagggatcctctcaccttggctcctggactagctgggactaccaggaggacgtgtgccatcacatctagctaattaaaaaaaattttttggtagagacagagtctcagtatgttgcccaggctggtctcggactcctgggcttaaccatttctccacctcagcctcccaaagtgctgggattacaggtgtgagccactgcacctggccttgtgtatttgttttgaagtttacttctttactcagagttatattggtcagactgaccagttctcacatgtagccctagttcacccgtttctttgcagtacatataccattgtgtgaaacatgagtccaccatgtgaacctagcatgatgtaattattcattcaattgcagtggataattgggttccttctgttttgttgcttttatgagctcagttgctgtggactcatgacgtgtgtgtcccctggtatgcttgtgcaccagtttctccaagatacatacacccacagaggacttgcaggctatgggatgcacagcttcagctttgctaggtgatgctcagctgttttccaaagtggttgcaccagtttgcagccgcatgcattagcctctcttggtccatatcttggtgtgaacattccgtgttgccagtctggtggctgtgcagtgaccttctatgtggttttacttttatcttcatgattgttaatgaggttgagccccttttcatatgttttttagctgtttggatttctttactttcttttactatccttccctccctcctccaccttttcttctagtaaagtatctgttcaactattttttcatttttctgttgggtgattttgttgttatcttgtcttcaggaattctttatctcttttaagtgtgggtcatttttggttatatgttaggaatacagtttctccttatttggcttttcttcactttctttatgatgtctcttaaagttcttaaatttaatttttttaaaaaaaaaatttcaaccagatttttagtttttttcttttgttgttgttgttaggagggtttgctggactaactacacgtgaatcattaacagaaagaggcaagcaatcttccctttttctttaagccacataactatatttgagcatctgcctgtgctgggcactgcactggctgctgggggagcataggtgagcgggttctgatgtggactctactctcaaaggatttgcagcctgtggagggcggacctggagaggcaggtggcagttacaccatagcggggttaatgctttaccaggtgttgggggacagatgagaagaagaacttacaacttcctgggagagttagggaaaatttcagggtgaaggtagggggagtaaagagcaagatgaggctcgtgaagaatggatgggagcctagctcatcaacattcccactcttagtaccacaagtcaatgggtagacatttttaataacttgaggttaaagaaaacgttgaactcatcaagtttggctcaaatctgtgaagcataataatattgtcttctttcaaagcataagagggggcattgttttaagtggggagggtgggtatttatacagtgtcatcccacgatttatgctttggggatctaaggcttgatgcattgcttggaatgaatgggtcagcattgaatccaacgtgatcaacttgttccttcagacaagttttgctgactttcacagtcagtggcatgtttcactagatgaccatagccccttctcactttggtgtcatctagtattagaatcaatagattctttctcaaggatattgaggggaagatacacagagcctgacccaaggaactcagtagaatagagcaatatcagaaggacagaagtggatgcctgcatacaacagttgcaagatccgctaaggggcaggaacagcctcctgtgtgctgaagttgtcctgaaagttagtgaagtagagagagcaggtggggagtgttctcagtcaaaaaggaatggcttgaaaacatgagtggcagctgcgggagtgagatggtttggagcaagctcctgcacatctcctgcatgtgcctggctgactatcacagagaggtgtgggcaggtcatctgggtatttgtacatgaccccatctcttcttctgtgcagtaactgcatgtgcccggctgactatcacagagaggtgtgggcaggtcatctggggatttgtacatgaccccatgtcttctgtgcagaaattgcatgtgcctggctgactgtcacagagaggtgtgggcaggtcatctggggatttgtatgttaccctatctcttctgtgcagtaactgcatgtgtctggctgactatcacagagaggtgtgggcaggtcatctggggatttgtacatgatcccatctcttcttctgtgcagtaactgcatgtgcctgactcactgtcacgagaggtgtgggcaggtcatctggggatttgtacattacaccatctcttcttctgtgcagtaactgcatgtgcctggctgactatcacagagaggtgtgagcaggtcatctggggatttgcacattaccccatctcttcttctgtgcagtaactgcatgtatctggctgagtgtcacagagaggtgtgaggaggttatttggggcttggtacatgctctccttcccctgcccccctgccctcacttctgtacaatacctgcatgtaccttgctcactattacaaagaggtgtggacaggtcatctggggctctccacaggctctggcagactttgaaggctctgagcagggggctgataaagacacttgtgtgagatcatatcctatgcagcaacatggatcaagctggaggccattatcctaagtgaattagtgcaataacacaaaactgtgataccacatattgtcacttataagtgggtacttactgactacacatggacacaaagaagggaacagtacacactggggcctgcttgagggtggtgggaggaggatgaggattgaaaaactacctgtttggtattatgctaattacccggtaacaaaattatctgtacaccaaacctctgtgacatgcaatttacccatgtaacaaatctgcacacataccctttgagcctaaaataaaagttggaaagaaaagaaagacacttgttgtagagagaatggcaggatcaagactagggtaagaagggcagtttggagacttgactttggtccaggacacagctgcctgagggaaatctgctgatggggtgatggggtgttccggatagagggagagttagaatgcaaatgagaaaggagccagtatggttcgagtccagtgaacgagggtgaccatggagaggaatgtggtcagagaagtgggcaagtctggatcaggcaggccttgtagggaagaaagttaccagctggcctggccttcaaggtcctggcatctgggagggaggaggtaagatgtaaacactcaggacctccagtagaaggtggtgaatgaggtaaaaggatttagtggaatgcctgtgaatgtggcgccagccacctccagttcctgacatattgcttggcatgtagtagatactcagccgatactttatttatgagtaaagataagagatctttttggaaagaaatggcagcatgatttggcatttaatttttatgtgagttgatgacatattttgcctatttttcttatctttcagtggatcatggttgattgatcctgcgattgtcattcctcaaactcagacactggtattctccattctcttcccttccccctctctcccttttctttccttttttctttcttcctttcctcctttcctcgtctctttacttgtggtaaatgacgattaactgatgattggcttgtattagtccattttctgttgcttataacgtaatacttgaaactgggtaatttataaagaaaaggaacttatttctcacagttctggaggctgtgaagttcagggtgaaggggctgcatctgtttgagagccttcttgctggtggggactctgcagagtcccaaggcagtgcaggatatctcatggtgagggggctgagcgtgttcgtgtactagtgcatgtccccttcctcgtcttaataaagctaccaattcctctcccatgacaacccattaatccttcaatccttgaatatgtaaatccattcatgagggcagagacctcataattcagtcacgtcttaaatgcccaaactctcaatacccctcaatactcagtaatactacatttcagtatgagttctggagggaaaaatattcaaactatatgcatggctatctccaaatctgaagtccaagatttcccttaaggtcaagtgaggaagcgctgacagagcctgctgtcctggccagcacgtggaacccagggcccggagtcctgctgggcctacgagaactggcccctctcccctctggtgccagtgggcagggccacttgatccacggaaccctgagcacattttcatgagcctaaaaaatgaccccaaactacaggaaaactacaaaatcaagatgaacaaatacctacaggccaaagtttaactaaattgatggttagatatagttcataaaaatttcatgacacttgaaatctattttttaggttagagttttttcactttttcagaatttcccagtccgctagatggcgattgaggaataaaggcatatgagagtgatggttagtgtttctaagtggcttaacatgcaacattttaaaagtctttttacttacatttagaggagtgagtccggggcagttgatgtataagtaggtacagtttaatagggtcatggtggtgtaggtgggacttttcgtagcctttgaaggtgatggagggactctgtgcctgcatgctgcaggcaggcagcctcctacacaaggtcccgggctacatgaagagaagagcttctctagaagggaagagaatgttcttgtcatgggagaaattgggaggacacccaccaggaggtttcttggagcctcagatgaccacattagacaggggaataaaaatatgtgaacatgttaaaagagaacatttaagagagatagagagggtaaaaccagccagtcctgagggctgagatgatgtgtgagaggaaggagatcgagttccagactccacactcccctgatcctcccacctactgtctgtcctctcttgtccttcttccgagcccatctccttttggctgcctgcccctgcattccagtgtgctgttccaatcctgcttctcttttcactttatacactctctttctatggctgtgttcagtcttagggcatctactagttgcctgtgctaatatgctaatgaactgattaaagaccacagtagtgagacctatggggttttatgattctcaaagcacagtcatactcttgtgtttttggtgccccatctaatctccgtcaggtaggcagggaaggtttgctctcccatttcacagatatggattcaaaagcagtggagttgtaatgacttggccagggtaactccactgttagtggtgggcctaacacctgaccctcttctcctgcgcctggttcattcatgctcccacactccgctcttctacccttgcttgacatagaatgcaatcatgtccttgagaaggtccttctgtgttgtaaagttgtccgcattctaaaaacaccacttctatcagcagtgtataactggtcttgtaccaactagtccacttcatgtaggtcataaccattacatggcctttttctgcatttgaatccaaattttctgataccagacgggtggttagtctccttctgtatgtctatctctgtctgtatctctattactacatcagccaggttgttaaactgaggttgaaatagtgatgtatgaccccagatttcacacactagtgtcatctggcactttctgttttgcctttattcttcttcaccctctccaaggtaggcttatcaacaaaggggtggattcacatctgatctttgagccttttgatgtatgtgccaccttaataccatacttggttgcacaaattagactgcaaaaacattacctgatgacagccttcttgcttgctgcgaataggagccaacagagcaactcctctttttgccaaaaagccatcctgtacattgcagtcagttgccaatgtcatgaccttgaacattacctcatcaccagcttcccatctgctttcaaacattcctctaggtcccttccttggtgctgatgggaaatgtgatcactttaatgtagttagaggtttttagatgtcttctaatcaggtttttcggaacccagtttcacgggtgagatatattccctgtcctcttctactctctttctttctgtttaaagaaccaaaacagcaaagtctcaaactatgaaaatgtgtattttacctgctttttatttttaagagacagggtctcactctgtcacccatactcatactatggtggtgacaacttaactgctttcttgacataaaaataaggacttaaagaatttcagccttaacacattcaatctcattttctctcaactcaatttgtaaatcttcaatgtacgtctttttaatctttatcttttttttttttttttttgtgacagggtctcactttgtcacccaggctggaatgcagtggcgcaatcttggctcactgtgacctctgtctcccaggttcaagcaattctcgtgcctcaaccccacaagtagctgggactacaggcatgtaccaccatgcccggctaatttttgtatttttagtagagaaggggtttcgccatgttacccaggctggtctcgaactcctgacctaagtgatctgcccgcctcagcctcccaaaatactgggattacaggcgtgagccactgcgcctggcccaatataccttttgagaaagatttttttgatgccacattttggaaaaaggaacatgacccaaagcccagcttgtgctcctcgtcttttctcctcaacttgctgaagcctggtttttgtgtttctcatgctgctgaacctcttcttggtaggtcaccggcgccaccccctggttgccaggtccagtggacactggggaggccccttcctgttggatttagagcgctcagcttcattatcctctcctacctggaggaccttattcctcagatcccgtgattccagactcccctgatccccacacctgttatcctctgtcatccttcttccaagtccacctccttttgcctgcctgctcctgtgttccagggagctgatccaatcctgcttctcttctcacttgatatactctttccatggccacattcagtcttaggacctctgctagttgcttgtgccctgatctgtgtttgcagcctggagctgtcctctgagttctagacccaccctgtgggatgttcagaattctaggaatacaccctctccctcccattatccatatgacttccttcttgctggtggccttccttgccttctgccatccatactggaagcttgggattcatcctagaggctccatctcctccctctcacacatcatcccagccatcaggtctgactggttttaccttcttcacctctcttaaatgttctcttcttttcccatatttttattcccctgcctcattttagacctttagcatctctcgtccataccactgcagttaactggataattggttccctgcctccagtcttgttcctttcaagtccatttttccatttaacttccaggtatccagagtgatatttcaaaatgggaagttggccattgtcccacctgacacctaccaggggctcccattttctgtcattactttcctgacccagcacacagcacactggctggtatcgaccctcgtcttctcccctgccaagtccctgcctcctaatgatagcccagtaactgcccacatctctcccggtccactgtgcgattcctcggtctagaggttgatacttagatctgggccaccttatgtccaggagacccaagaataccaacctgtgcccctctcagttggggttttagggagatatatgctagggaaaaaaatggccagtggaaaaccaaatcatctctttactgttggctgggcctggggccccaaatctgatgcaaaccaagtaaccaggctgggagactgtgaaactatggcaagtctctaaaccattctgtgtctcagtttccttacctgtaaaaatgaggataataattgcacgtaccatatgagcttgatgtgagacttataggaattaatccatgcaaaacatttagagctatctggcatatagtagctatcagtaaaaattagagaaatcagtaatatttatcatgttagatctcattactttggttaagaacttctgtgcaacactgaataatagctatgctaatgggctccctgtcttgttttttggaccatgataagaactttgatgttgcattccaaatgagctgtggagccagtttatatcttcctcccaactctaggctggattctgtcctgaaagctctgattaaataacttcccttttgagatctagtgtcatttgttgtttgcgagtttctgtctatgatttagtttgcctagataacatttaatctttggagttgatatttaagtcccaaaacctgtatatatttagggaatcacaaatctgcctcatttgccatgtattcctgggggtcagaggacagtcagaggtcagtaaatatatgcttcataaatgaaatcttgagacttgcagttagggatgctattccctacctctgcctgtgtccttccctgcatcagccccaggagaattccctgctggcctgtggcagtgcctcacaggtcagaacttgttttgcttgaagagcctagatgaggctcagttcccacactttgggagagaagatccccagcagaaaatgggtggtaattgacttcatatagaggttctaatggatgtgaagggtagaagcaagaccaatgaaggaaagagtctgggagatttatcttcctaactccccctgcactggtcagcagtgaaaaggctgctgggggatgttttgaaccccctgcatcaaagcagaggctaagtagatagcagactgctagagaggctacagaagaaagtctttcatggagggaagatttcgccaagtcaagtgtttctttcaactctcagaattgaaaattttgatagaaattgctagctcaagagactgaatcctcatttgggctcacacacacattttttgccaatatgcttacattttggcaacttttcttctcgttagcaattctgccaatggatgggcatggggaagaaagcgagctgaactcacaggaagctgtttatctgctttgctgcaagaagggtgaaattggctctcaagtctgaagctgggtttgcaggaccatttcttattttcatcgccctttttcttcctgccttttatgcccactgactgcccgatgctggcaatatagcattttcactttttctttttgatttgtatgtaaatgctaacattccaaaaataatatcttcatgttatttgcttatttagagatgaaagcatttgaaaatggtttagcttttattttaactttgcagtaatcatatattagaattctagaccttttgttctctgcgcactagatagatgagaaagcccgacaaattttgcctttgttccaggtccttttgtttagtaaatgctgtgggccaaactccaaggattccttacccagggacttaatgtagaaacacagcacatgcggtgcggcacaaagcatccggtaaccagagtgtggccttggtgtagggcgaagtccctggggaatgttttagagcaggttgactgaccagattgagagagggagggagagggagggagagggagggggagggggagggggagggggagagggagctctggaaaggcttcccaggaaggctggacaagactctgtgatcagttgaatagtaagaaagaaggaaaaatgaaagatggctgtgggtttctgtctttgatgactaactgattttgcagaaagatgtgagtccaaagtttaaggtgcctatagaacatccctgtggagatacctggaaggcagttgaaaattcctgtgtatggttcaggagagaggacccaacaaaacatatagatccaccaatcaacaatgcaaaaatgataattgggaccagaacagaagaacaaatccagcccaagaccagcaccttagagagatccagcatttcacattaaacctggattgcagatcttgtaaataaatctaggaggttgagccctggcagaacctggtgacagtggcatgacaatgtcacagctgtcacagtgggatggggcagccagcctaaggagataggatggaggagcatgaggtctgagcagggggcatccccaggagttgtttgctaggagatggcagaagcctgagaaagagaggtgacagcatgaagggagaagggggaactgctcttgcagcaggcggtgggcaaggggcctacgaggaaggagtgtgacttaggcagggggtgaggtggaagattttcctcttcattttcttcctttcctccctcctctctctctctctctctctctctctctctctttctccctctctccctctccccctcttcctttccctctctttctctctctcccttctgtccctctccccgtctctttccttgtctcccctctctctcctcctctctcttcttgtctccctttctccctctctccctctctccccctgtcctctctctccctctcttccctctctccctctctcccttctctctctccctcttcctcctcctctccttctccctctctcccatctgcctctatggggctacttcatcacagttttatacttgaagggaagaaaccttgaaagaggagctgatctaagcttcaaagatgagaggacattttctctctgttggtgcacttcacattcagacattgcagttgctggtttagctcttctgggcaacagtggtgaaaagattgatgaattggacagtggaggagtaaaggtagtgtttgaggtcttaatagatgcagtggtacgttagcttccagatgcacagtaagaattgtgatagaattgttgataaaatcaataagaaacactttgcatggcattttaggtatcagtttatatgataccatttaattctcacaacaaccttatgacatgggcatgagcctcatttccctgatgaaaagatccatgctaagagaagtttcaggacttgcctgaggttccatcattggtcaaggccagaggtgtggctggacttgctccatctgagtcccctgcaccaggcagagtgctgcttccattgtggctgctccatgctcttctgctcctcctgggctagaaggctgctgggtcatcaaacaggccctgaatgaccctggagcactgtcggaatcatacagcatgtggattacaggggcatgctggcagctcctgaccaggggctgtggcatggaatttgacagtgatggagatgcccatccgtcgaccagccaaaggccaggtctcactgagcttccccaggggcccagcaggtgcttctttccccagccccactatttatgcagcctccgaagcattgtgcaagaggaaaggcaggactgcatgactcgtttgtggcctcatcccgaaagtgtcttgtcttgaccaggtgggcatgagaaatagattttacctgctggacttccctgatggttgacacttgtgtatgccagtgcttgcaggcaaatactgcggaggaattcatttagctaaagaagcaaatacagtgacgcatcactgaatggcagggatacgttctgagaaatgtgtccttaagcaaattcttagttgtagaacatcatagaatgtacttacacagatgtagaaggtatagcgtacttgcacttgcaggctgtgtggtagaacctactgctgtgaccactgttgtgtttgcagtctgtagttgagtgaaatgtcattatgtgacacctgactgtatatcagggaaccaattgtaatgagagctacttttaatgtcattcacttaaaaaaatgatagattagtgtattgctttttttgtcttcttcttgaacaaaaactaaattctgaggtggatgaaaaaagaaaagaagtaacaaaagcaaattcacttagtagagacagctcctcctctggggcaccttgtcccggtcccttggttggtcactgcagaggcaggtctcagcattcctgccctagtggttttccctagaacatatcacaggtgatggggcctgctcatctcaggctttcagggtgtcagatgctcaccaggtgggagcagcagcgaaggcagacatctggggctcacctttcctaacccctcctcattgtccccgcagcctttccgctgtgcccattgccattactcctgcaacatatctggctctctgaagcggcactacaacaggaagcaccctaatgaggagtatgccaacgtgggcaccggggagctggcagcggaggtgctcatccagcaaggtaggcgaggggccagcgagctggggccctgcccgcttccttttaggccaagtcccccattgggaagagctgctgacatcctgcagttcagttctgctacataaatgtgccagtgatgttcattcttcatcgtcctaattgttgtcatcatcgtccttatcattgtttgtcagcattacttcttgcctggttaatatgacaacaaccttagtggaagtctaaaatagcagaagtaaaaattcacacacaaattctactaccctccacaatgctgatttgtcagcattgccttccattctttgtccgtgcgtaaagttcgcagagatgaaagttcggttgtctttctttacttcacattagcaggaacatgttgtttttctttgatatactgtcttcctaattatgatttccaagggctttttgtaattcaatgttaaatggaaacactaacaattctgttatcgaacattgtgggatttttagatttttcttttttgcagttataactaatgctattgtaggcatatttataggtgaacttttttggaatatctaaaaatatttattaagtaagcttgttacttattcatcctgaaaagaaaaaaaagacattctagaacatttaaactaatgagaattgatgaaaacctctcttcattttaaattattaaaactttgtggggttttttgttgttttatttcaataaataatcacattcccactggagagggcttagcttatgtgctgttaccatacagagaattctgttgtatttatatctacacttcaatacttcagctaaaaaatgattgcagcacacagttagctgctcttctttcctaagtcctgtgactatttgaagctgaagacagatttagaaatctgcccccagtaaacagagatgtggaattgtagactgctgcagctggggatgcttggagttttgtttcagcgtgaagctccgctcgctgtaatagccatgaaatgcatcttaatgtaaaacaaatgaattgactatacccttcagcactttcagtgacagggctgatgcacggaaatagatgagcagcacagaaaactcaggataattttaaagccatccatctggggtaacggcgagcatgtgccttcgttttcttaatggcagttttatggagctggggagcaggatatgcagtgggaaggtctctggctccaatctgcattcttctttcttagctgtgccatcttgggcatgttacccaagctctccctcttaggctcttcacctgtagaatggagttcacagcagccatcttccacgatggtggagaggattaaatggaaaaacacgtgcatgcagtacatgttcagtccttgcttttgtatatttttttcggaacatctaggaattgtggagccatcgcattattttttatgacccacgccaatgccccatgtccaggaatcacagaggggagaatagattggcttacagccccagtaaataactagagttgcaggttagggattctttttcgcatccttcacactcttgggttggattgccaggaaatagatgtttactgtggctgttgggacaggtgtgaggatctgagtgatgataccatcattgccctatgcttccaaactttcatcattgccttggaaaaaatgtgctgaggttgaactgtttcatgccctaagtttccagttaacttcctaagactctctgtaatcagtcggcattccctgacaggagcggggttttatattttatctttgcagggttgcttttggttcctctttcagagatacacacacagacacacacagatatatattcacagttgttcctaggcatccatgggggattggttccaggaccctccgcagataaccacaatccacagatggctcaagtccattatataaaatggcgtggtgtttggataaaggctacacacatcctcctatgtactttaaatcatctccagattacttataataactaatacaatgtaaatgccatgtgaatagttattatactttggttttaatttgtattatttttttatttttatattgttattttttatttatttttcctgaatattttcaatctgcagttggttgaacccatggatatggagggccatctgtacatatatatatagatgtagcatttgcatatgcatatgtacgtgtatgcatatgtatgtatatatgtttatccccccattcccttcaagggacatgttgaagaaggagacaacccagcatctcttgactcttaagaggccatgcgccgttgtgctctggcaggagaacagtctctgaaatcagatggatggtggagtatgaacacagttttgaaatctcagaagcacaaagttcacattgttcttatgtctaggagagaggagcagaatgaaaggagaacatgaaaccagattaaattactgtttggaaatgttgaattgtttggaaccactggaatttttcattttcttttgattaatttcaagtaactctctccatccctatttggttttattttcctcttctactcccccaaaaatatcttcatgagactttataatttcatgttttgatatagaggaagatgtcttaaaataacatcataaaaaacacaaataacatgtatttttctcaaaaggattttacagtctcctttaaaccatgtgcagggattccttgtgtatcagctgtgttaaacagtgtcacactgtgacatgtgcaaagctattgattcctaggaaagaccctcctgcctgctatgccacagggatcctgggattccagggaggggttcagtgcacagtgctgcagaggaggtcaggaaaatggcctaaaaggagctgagggttcccacatcagatacttctgttctgtgtgggtttctaagggaaggtactatggcattctccatggagtttgggtggtttacagtgtgttcccaaagcttgctgggaagagtggctgctaaggctcttcccaagtaggagggaggggaaacatgacttgtagaatttgccaatttctgtagtgtaaatacttctaccatggccaagtttaagctgctcacatgatgtccctcaacgtggagcggggacatgtgcacatttggcttatgagcttgcgtatcttggttcccacgtacctttcaccctgagggcactgggtgacattgccaggtgtctgccaccagggcctgtctggatgtactgatccctcagtactctgatactttgtagtaattaaggtagtactgagcactatgtaaatattatactcctggcttatattttatgtgcatctgatgctttgaagacagattcctcttagccatcacttcttcattaatatggatttgaagcattctcccacacaaatgcacgtttcatgctgtttaaggaagaaatacttgtattgcttcagtgggcctgcccctttcctccccttaaaatacacctgattaagctagctcaagaactggttcagtaaatcacaggctgtgagaggcatcagatactttggtgctaagctttatgaatcttttgctcactcctagagcatgtagcagggtgaggatggggtttagtgggctttccagtggcttccaagccctccctcaagtctctctaggttattggaatgaccacacgcttgggagtcagatggacctgggccgggatttttgatcactgtggaccttggaccaggtacttaacctctctgaatcttggtttatataccaccaaagaggaaggctcataacctacctccacagcagttgcaaagattagatatcattctctaagattcccagagagtgccgacagtaagttcttgatgaatggctcaaatccactattacatttatctgcatatttctactttgagcatgtatctctcaagcgcctacagtgtgcctggaaccatgctaggcactgggacttggtgtcaaacaaggcagtcgttggtggtattattgttattcctgcccaggttgcggaccagggctaggcagctcccgccaaagctctgtattctaattacagcagaaggaatacatccccttcagctgtgccctggagcggagttagctgcttctcccagagggctgtgtcccccagttttagagtcattgaagtgtaagggtgggtaactggaggaagaggaagcaataagaggagaagtgtcaaggagacgtcttagtatttggcgtctgctagaatctttatgttactttgaagtgctatattagaaaaatgtaaatatgtatgaatgtgtaccttggatgtatatttgtgtattagttttttacaccagattcagggaaaatagcatagcaggaaatccagaaactgtgaggtaacccacaggtgatgtatttgatttttagacatcttaattttaaaattgtttttattagggcccagattcaataagttcttggcacatgcttctagtgatgtgatataatgctgtgttattgattgttattttatgtgttaatttatctctcacaatggccctgtgagcttggcataatcgttcctattgtgaaataaagaaatgaagggagtgctaatgactgacctcaggtcacaccaagcaagcaagtggccaagccaaactcagtctcctgattcaacgtctgtgcctttgccactcccatgtttgatgtcccctaaagtttgtagatgtttgcacttattagagaggaggaggagaaagaggaggagaaggaagaggcgtggtcatctcttaagcaattgggccacatttgctggtagttggtggaaaagtcacacacatggatactgtttattttctcttatttcttcatccccgaggctaattgctaatctgacccaagactgactctgaaacctatttctttgcaagtccttccctatggtaatccagagtgtctcagatcccaagatttgggggcgtatgtgaggggagggggcggatgggaagaccttgcttatgctcctctgccaagtgtttcttattgggtttgggatatcagcttggctgataataaaatgcactttgtttcctctgctgcattttcccttttgctctttttcttgaggatcctgtgggaagaggggctgggatttaaataggattcagatagtcccaggtaggatctaatattgcatgccatgtcaccaggaaccctccacctcagtgcttgcatgtgacttccggttaatttctacccttaagcacttcctagctctgaactggggccctggctgggcctaggacagacactgagttaagagacagtaggaagtgcaaatgtcagcaaaattctattccatattcacttgttaatctaatacaatttttccatatccactttccttggataatttacctgcttttgttccttgtccttatccgtattcgtatctgtcagtgcctgtgttagttgcctgtagctactgtaacaagtcaccacacacttcgtggtggattaaaacaacacagttttattatcttagttctgaaggccagaagtccaaaatgagtctcaccaagttaacatcaaagtgctaacaaatattccttctggagactctaggggagaatccctttcctggccttttctagcctctagaggctacctacattccttgccttgtgacccccttctccaccttcaaagccagaaatggccagtggagcttctctcagattgcatctctgtgccctctcctgccttcttcttataatgacccctgtgatagcattaggcccactcggagaaaccagaatgacctccccctctcaagatcctgaactgaatcacatcgtttttgccatgtaaggtaacatgttcacatgttctggggattaggatgtggctgtcttcagggactcattattctgcctactgtactcagtgccttttttaagaataggaactttattgcagtggctcatctcaaaaaaaaataaaaaataaaaaaaagaatatgaactttagcatcttcaccttcatagaagagaaaaccaagacccaagagtttcaggaagctttggcttacctgagcaagtgccagattcaggtcttgtgactgcccaacccagtgttgtatgccattctgggagttatattattgaaaatgaaattgaattttcaataacgtcaagcaccacaaaggagcagagatattttaatgcctgaaactgctccagaatatattgcattccaaaaagagcaaagcgtaccatcatcagtttttttaaatttctcttgaaattctatattttcacctgattaatcagtccgtgggaggaaattgtgatttgaggactcctggtttttatggtgtgcacttaatatcagtgccatgagtaaattcacgaagtcttccgttgacctttactgtgcattgcctaagaatttaatgaatccaaatagaaattaatttctctcagctttgatgtcaattaactggcatagttatacattcagtctagattacatattttcatttgttgttctttaattaaagtcactgtggcaaaggctgaagttttaattaatgtgggggcattatcatattaagtttaatttaaatataatataagaatgttttcctctctgaattagtttccactaaagaatatcccagaaggaatctttaatttcattttaaagcctaagtttaacctttaaaagtttgcctttgttcatcatcacatattaagtctttataggagaagcaacatcagcttaacaacaacaacaacaacaaaaagtggaggtcttcataacttggaggtttttaaaaggtgattgaaggaaaagacatgattttatctgatttaaaaaagcaataacaaaggaagttaaaaatgaagtttatcctctgggcaagaaagaagctcatttgtttttgcctaaaaaacagcacagtatgtttgactttcagaaaataaacatccatctgagctgtcttttcagcagaatattctagaatttaagaatttagtgtttgttgccagtctttctgctgacagcgggcgccttctgcctcggtgccctcctctgcctccaccagggttggggccaggaagcagtgggcagaggtgctggggctgcatgtggctggcaggttggcctctgtactagtgactctttggaaaattacccacaacctcagctgatagaacagaaaccccaataatagaacactgctctgtcttgattccactgacacggaattgatttggagattgagcgcatcaaaactgcatctgggagatgattaaatgtgggccacatccccgtgaggtttatctggtataatttgtccagacaaccttgatatcaggacagaattcctccatttcttcccgagtaccctaatgagcaatacataaacatagcagcctgagatacactcagtggtcagctcagctctttcgttgcctaagtataagcatcttagtggtttgttcagctcacatgtatattggggaggtgggatactttgggacatcactggacctgcatatcagagatatagaggggactgtttgtgaggctttaggactccacacagaggatgagaaggctgtacagggatttgagttggagaggtgcttggtagaagaaccaggagtgagtggtgtcacagaagccctgaaaaactagatcttgactggagaatgtggtcagcatcgccatataatgcagagaagtcacagtggacaatagcaaaggctggggttaaggatgtgtgttagacttagattcagttcttaactttgccagtgtgacctcagtagggttacttcaccatcccaagcctctgtataaaacaagctaagcatgcctgtgtcattgcgctgttgtgaagaaaccatgacttgatgtatgaggtgcctgatgcatggtaactgcccagttagtggaagacatatgttgttattgctattagtagtgttggtggtggtactagtggtaagataaagagtgaagagtattcattggattaaccaatgaggatgttagctgatcctgacatgtgcaataccaggagaggactgagtgcaggaagcagcatgctatggtgtgaggcagggcttctcaacctcagtactgcttacaatcggggccaggccagtgtttgttttgggggctgtcctgtgtgttgtagggtatgtagcagcatccctggcctctacccactggatgccctgggcaccccccagttgtgccaaccaaaagttcctccatacattgcctgtctgggaggaaaattgtccatagtttagaaccactggcctaagtaatgaagagagacagggaagtgaagaattcatattatttttctagtttaaatttataatcttaatttcagtaattattttgaatagggcagttactctcccatggaataaaatttgaaagatggaggagatgtgaatgctggcctcctccacttgcatcccagcctgttgtccaccccagagcatcactaacagcacctctttctagtgagttcttggaagtggagactccacagaatcctggctgtgaaggaaaggggaagatagaccggcaccaaggcaggccctcggataacactgaacacacttatttggtgaggggacagatgtgtacagaggggaggtgcagaagtccaaggagagcagggggatggttggagaaggagctcaagaaagaagaggacttgccaagacccagagtcagtgatgcaagacagagtgattgaggagaagctagatgctgggtgctgggacttgaacagagaataagtggatgatgcccctgaagttcccgctctaggaaggtgccactttagaagggagaaaggacaatgaagatgtgtaggaaagataataatacaatgtcagactgaaagtagggaaatccattagagagttttgatggctctatgtgtttggtggggctgctttctctaggagtcccaggaaggcctttctgaagaggtggtgcttaaagatgaggagaaggtcaaatggagatcttggggaagagtttgtgaaccaggaggcacagcagttatcccaggaagggaatgaacttggtcagtgcaaaagacagagaagggagagaatgaaggcgagagggagggaggcgggacttgccagccacagggaggagtcaggattttattgtaggtgagacagaagaccattggaagggtttatacctctgagactgtgatctagtctgtgttttcgaaagaccatgttgtgtgctgggtgggaagtggaccaacagtggaggatagacaatagctgctgagagagcacttaggagctggttgctcccatctatgcagaagactgcagtggcctggccaggaggcgtgggagacactgggatgcacagtcctgtctacctgtggggaggcatcccaggctggagtttggggcaggagtctgggctggagctacaaataggaaagtcattagtttgtggataatatatgtcctgggcaggaggaagagcctgaagaatgtctggataccgagcctaggcgacacgggacagagtaggagggcccagccacccagccgtgggacagggaaagcataaaggtgtggaggctggaggaacagagtgttcagtggagtggtacttgcacccatgcagggtttcaaaacttgaggggcttttaaaaaacttcaggatgatggaggaatcttaaactgcttgttgtagaaaggggcattgagtctaacagggctgaggatcagtgctctagaaagaggagaaaggggtcttggaaggcggaggggaactctcacccacaactggtgtcaggccaggcataggcaggagcagagggacagaattgtatagtacaggaaggtctggaaagttcttacctgatattctcattgtgaagcaggagacaagaactgaggctgagattgaaagaggaagtcgacaatagtataggggacttaatgagatggatggagaattgcagttcttcttctggataattggacagagttgactagggaaatacttgaggttggaagtgtggccgtaagaataaataatggctttgtgatttgtctcagcatcccagggtcagagcaaggagggctggggcttggattgatgctgggctgtggatttgccaggcaggtttgagagaaagagaagtagctgaggacgtggagggctttgccaataaaagttgtaagttttgggctctggagtgtgctctttggagaggggagcatagttaggggtaggctgagagaaaatgggaggggatgcaaactgaagattctccagaaattgaagaataatgatagtgaaagtaagagatggcccgagggccgatagtcgtcagagtgggatgcttggatttagccccatgggtggtgctgaataatcatatcggtgactgaatgaaactccacagattgtgaaatggtggggaaggttattggccttaaagtcaatggatgttacagtatttaagtggagagggccaggtgccaaattgtctgatggatctggcactgtgggtagcagggacaggatggggaaatgctcctgctctaccgtggaggtggcattgctgccctgcccgggcctggcatcctccttacctggggctcaagagcatgagcagcctccacttgggaggacttagcggagagtgtggtcaaagaaagacagggaaagaacacgctctctggcaaggtgaatgttggggattttgttggccagaaggtctgagattccaggatgctgcggaagcactggcatagaggagagaccatgtggaccacagagaagacatggcagagaaggatgggaagccagagtttgcgactagggaatgacctgctggaatcgggtagctcacagttccagacagctgtggtgttggggatgttggtgagagggctcattcccctggcccagctcagggtggcggcccggtggtgccagcatcagcctggctcaggccagtagactagaggcctggcaccagcactacccttagtctcctgaggctggagtttgcttctgaaggcacaatctgttcaaagagacttttgtacaggctgcagtttagttgctgcttctgtataattgtagaaagatattcttctgtgtgactctccagtttttgtttttttttttaaacctagagttgtacattctcttaattaaagcatctaaacacttcctggaacgtgtgcaaaatttaatcagttcaataaataatgacgtttcaggatgtgaccagcttttaaatttgttctttactgggtaatttgcatgggaatttatgctaatgacttagcttctgacgtgaaggagactgagaatcaggctcctggtcttagtgttttgggacaaaggagattaagaaaagcagacactccctttccattgttctcgttttctaaattatttgttacttacaagtgaaaaatgaaagaatgatttaagccacttacccactggccaagggaattatgttacttatcttagttctctctgccatttaaactgttgggcacatattgggctgtctacaaaagcttattcaacaaataaaaaaagtacatgaagttttaaaatctctgccttgaaaaaacatatactgttgctattgtgttccaatactaaggtaagcttgaattgaatacaagtgctggagacaaaataatacttactagatttgaagcatttgaacaggaggaggaactgttgcatttttctgtattacgaacacattttttttttaacctctgtctgtgctttcaggtggtttgaagtgtcctgtttgcagctttgtatatggcaccaaatgggagttcaataggcacttgaagaacaaacatggcttgaaggtggtggaaattgatggagaccccaagtgggaggtaatttttttaagtatggtattaatcttgacatttcaaaacacagatgacaaaccaggcaaacccaaatactgggcacggacaatcattcctcagaacattagattttctgtttggggaacttctgaaacgttttcaaatgatgtctcgcgtctgaggggtataactgggttaagatctgggccaagcctgtgaattcttattctgggttgaatttagactctcttgtgaaagtttgtgttgacctccttgacacttttacttatgttattcacaaatccagagtttcagatgttgcatctgaaagaatggaaggcaaggattctattgtattgccatcctcaccgagagaattggaaaaggctctgtttcctgaatctaggccctgctctctttctgtggagagctcatgctcctagctgcttttttgttttttttcccttaggagttggaaccagtcacctgctgaaaacacgcctttattataagagccagtaaccatctctcttttcagatactaggtattgccaccacggactaattgcagttatctaaggcagggtttctcagactcagcactgtcgacattttgatctggacaatcctttgttgtggagggctgtcctgtgccctacaggctgtttagctgcatttctggcctcttcccactaagttactagtagcatcatccccccaaccccatcccctgttgagatacccaaaaatgtctccagacattaccaatgttcagtgtttcctgggggtaaaaatcaccctcactttatctaaggactttacagagcatccagtggttgggagaaggctttttaaacagaatccacaacatatgaaaaaaataatacatcatgacattgtggggattattctggaatgcaaggcacaagtggtctcttggaaaggtaacatgttaacatccattataatatgaaacagtcaccttcatagatgcagaaaaggcatttgacaaaattcagtgttcactgatgaaaaagagtaaatagaatttgatggatacatccttaagataaaaaaaaaaatgtgtgtcatccaaacaccagcatcttacttcactgggaaacactagagtgtttccacagaagtcagaagcagacaagagtgcccggtggctctgctgttctttaacagcatgtggaggcatcagtgagtgtggctagaccagacaaagcagatggagacctagaactggaaggaaagaaataaaaagtatctctctatacatataataggatgatattttcagaaaatccaaaagaatgaatgaaaagctaatacaaacaaaaagcagcagattaaaatatcaacatacaacagttagttgtagatacatgtacacctgcacatatgaatgtgtatacacatatgtgtaaatataagaatatgtatatgctaatatatgcacacatatatacatatataaaatcagttacaatggaaacaaaacccccatttgatacaggaaacaaaaccaagataaatctaggcataaaccttataaaaaatgcccaaaatgtaaatatgggagactataaaacacttctgaaagagacataaacctagagttgaggaaattaatgggaatactcaatatcataaagatgttaattcccctgaaagtaatttatacaataatttatcaaggtaatatgatctattacatattacatgtaatctaaataccattagattttttctggagctaatcaagttgatttctaaagttcatttggaagagtaagtacaattaactaggaaacccttgggaataacaaccataagaggagaatcctaccagatattaaaacatattatgaaatctctctaagtgtgcatgaacagatggtttaatggaatcgaacagaaaatttagaatagacccaatgacatatggaaatttagtatatgataaagatggtgtctcaagttggtaggagaaaggtgggctttttgataagtgacacaggatagctaaatagctatctgaaaaaagataaaattgaatctgtttattataacatataaagttatatgagaaaaatttcaaaaggatcagatatttaaatatagaaacagtaatattttacaaatactaaaagaaagcataattgaattcatctataaactgagagctcataaataagtaaaaagataaatgataaaaatatttttttatatagaaaaaattaatatctttataaaaggcctataaaaatagtgatgagaaagatcaaccctttagaaaaatggacaagagataagaaaggttcagggaaaagaaaatgtaaataacattgaatatctgaaaacatgatcagcctcacatgtaaggaaagaaattttcattaaaattagcactggatggaatttctcacctactagcttgacagagatccaaaagtttgacattatctctgctggaaaagctgtggggaaatctgctctcatacgttgctggtgggaatgtaaaatggcccagccttatgaagagaatagcaatatgtaacaaaattacatttgcatttctttatccattaattcaataatccaactgttaggaaaccatcccaaagtttcactgggacactgtgtccatactgacataaataaatgattgaataaataaatgtgggagaaggaactatgcatttcctccaaaaaataatgattaataaatgtagaaggaatgagggaaatagaaagttactattagaataccacaggaacaatcatagcagatgagatccgttaatgagtgctaaagttagtaggcaaaagtttaaggagaaatgagatattcacataaactctgaatatctccttccaaatatttgttaattacagaaggcaaaaataggaactttatggtggaggtaccaccttcaccaagcagtagaggttggcatcatcagtaatgaagcatgctgacatcatgtgtgacctgataccatgtgatcagatgagaagacacttcatctcatggtattcttaactgaaatcttcaacctcagcctaattatcagaaaccattggacaaatccaaatgatgggtgtggtcaaatacctcatctgtactcctcaaaagcgtcaaggtcatgaaagatatggaaagtctgaggaactttcacagccaggaggagacaacggaggcatgatggctaaatgtgctgtgggatgcagaattggatcctgaaacagagaaagaacattaatgagaaaaccggaggaatctggagaaagcctattgtttaattagtaatagtatccaaatgttaatttcttgttttgatcattgcgccatgattacgaaagatgttaagattaggggaggctgggtaaagggtctccaggaactctctgttgcagcactttacatctttggaagtcttgtgtaagtctaaaattattttcaaagtaaagcagttacaaaagataagaaatggggtcattatatgtagggaaaggagacagagagcaagatggaagggatggggagaagctaaatttctcaaaataccctgctgtgtagatttgactctgattatatataaaatattgtaaaagtattttatataataataacaaaattaaacttaaaaagcaagtcttaaacattgtgagtaaaatgaaataaattattctaactgtatatcaaattggtgactacgtggagaggaacaatttcaagagacttcaaaacagttatttgattgggatgtaacctaagggcaaaacaaactgcaaaaactgcagttttcaagtattgttggtagtaaggacaatattgtgattctgaggctgttactagtgtttaataatgacagcgaaacacataaaatatgtttaattctgtaggtttataatgatattgggaaaaaacaattcagtcacctttgtagaatgttagagaatcaactctttattttgaaaattggtaaattaagaccaagaatcaagccattgttctacctttattttttagttttttttgagagatagggtctggctacccaggccggcatgccatggagcctcccttcatagctcactgcaacctggaactcctgggctcaagcaattctcttacctcaggagacagtagatagtcctatctactatcttccaagtagataggattataggcaagcactataattttttgaaaatttttaaaaatagagacaggatttctctttgttgcctaggctggtctcaaactcctggcctcaagcaatcttcccaccctggcttcccgaagtgctgggaatacaagtgtgagccaccatacccagccctattctacctttaaaaacaaaacaaaacagaacaaaacaaaaccctatgtaaacataaccaaacattcgatgaggggaagttttttcttttgaaatatttcaactaacacatgaaaaattagaatattaccatgttgcaaccttctaatgatgtcatgggtttagcaatgatcatcagttactgctaacattacataaaagagaccaccatccaaagcgtgtctcctgaaagaactgcccaatataacccatgaagcattctttgcaaaaaggaatctgaatctaattaagcttttgtatttgtatccagtgaccaatttacagaaaacaccatggatggaggaacattggtcaattccatggtgatgcaatcagcgaaacttagattgctgacagctctctaaggcaaacaccctgctgtcttcaacaaataaactacaaggggagaaaagccagaaatggagggagagcatatggattttaagtcttatgagacatattaatcagttctaatgtgtgaacctcatttagatttgatttgaacaaacctaaaaagtgaggtaattggggaaatttaaacattgtctagaccattgatgatgttaaggatttattgtaaagtttttgagtgtgacaggagcattgtagttcttttttggatgagttttattttttagagagacagtatgaaatatttatagggcaaataatgatttcaggatttgcttcagaataatcctggggcagggcatggagtacatggaaacatagtccaagaaagtctggccatgattcaacctacagaatgggagaaaatttttgcaatctatccatctgacaaagggctaatatccagaatctacaaggaacttaaacaaatttacaagaaaaaaacaaccccatcaaaaagtgggcaaagaatatgaacagatacttctcaaaagaagacatttatgcagccaacaaacatatgaaaaaaagctcatcatcactggccatcagagaaatgcaaatcaaaaccacaatgagataccatctcacgccagttagaatggtgatcattaaaaagtcaggaaacaacagatggtggagaggatgtggagaaataggaatgcttttacactgttggtgggaatgtaaattagtttgcccgtcgtggaagacggtgtggtgattcctcaaggatctagaaccagaaataccatttgacccagcaatcccattactgggcatatacccaaaggattataaatcattctactataaggacacatgcacacacgtatgtttattgcagcactattcacaatagcaaagacttggaaccaacccaaatgcccatcaatgatagactgcataaagaaaattcagtacacatacaccatggaatactatgcagccataaaaaagatgagttcatgtcctttgcaggcacatggatgaagctgaaaaccatcattctcagcaaactaacacaggaacagaaaaccaaacactacatgttctcactcataaatgggagttgaacaatgagaacacatggacacagggaggggaacgtcacacaccagggcctgttgggggtggagggctaggggagggatagcattaggagaaatacctaatgtagatgacgagttgatgggtgcagcaaaccaccatggcacatgtatacttatgtaacaaacctgcatgttctgcacatgtaccccagaacttagagtataattaaaaaaggaaagacttgccatgattgataattgctgaagttggttaatggacacatggaggtttattagacccgtctctctgctcttgtgtattgaaaatttttttataaacattcttttaaaaagtaagagttttggagtctgacagacttaactttgaatcctctgtcacctataaactgcttgcccttgagccattttttaaccctcatggctcagtgttctgctctgtacagtaggctgataatccctgggagctcagaagcactgagagaaaccatttgtaaaatgctgaggcctgaatgagcccctggaggccctcaaaaatggcagctgctatgattattgcggatgttgatgatgatcacttttacatcttcatctatgcaaaaacaattagtcacctagtgtttcaagtattagtacatactggaagaatttactcttcattaacaaaatagacactcgagtgtcaattactgatgtaaaactcaatctatcttgtcagtcggtgcttttataaaagcatgcagtaaagcctcgcttccagctgatgctagcactttatgcagagccgtgaacccaacagaaatagttgacataaggctgggtagttgactccatactcatctccatgagatggtgaacagccaggaagctgccatgaagtggtcaccagtggagtaacaagccacctcttccagcaatgtgtgtgtcacctggctcccaggaatgccttgcaacgagcaccagccttcctgacagcaactatgacatgctttccccagaatgaggaggaacctttcaggttgcatcctgtcctttcacgggctcaggcattgcctggatctactgtcggctaatctgttgcctcatggtactgagaacaaaatgttcttctttttgttcatttatgcattcattgaatattttttgggtgactactatatgtcaggatggaaacacctaaatggacttggccagttggctgtgaaggaatattatatgctattctgaacctctatgtcatttactgatatatgcttatagagcataacttggcacctgtagattttgtctgaagtccttctttttgttcttcttgattggtgacattcatgcatccagccttacagttttgcttgcactctctgccccttccagaaagagataattattaacatctagttctgtaaaaattctgttccacctcttctctctttgaggcacgaggtacctgtgaatgccactttaactcctcctaccctcgcaagtcctgattttgtgcaaatatatttcttgtagtcagttttatttcttacactttcatgttcgaataagaatggcacagccgagcgtggtggctcacacctgtaatcccaacactttgggaggctcaggagatcgagaccatcctggccaacatggtgaaactaaaaatactaaaaatacaaaaattagctaggtgtggtggtgcgtgcctgtaatcccaggcactcgggaggctgaggcaggagaatcgcttgaacctggcgggcagagattgcagtgagctgagatcgcgccaccgcgctccagcctgggtgacagagcgagactctgtctcaaaaaaaaaaaaaaaaaagcacaaatagctaagattttctgaactcttactctgctgggacctgggacctgtgctctccacgtgctgtgtaatcacaggtcctctcccttccaccatcagctgccctgtggctgtgccccttcctctgtgtaatcacccaccctaccccttccaccgtcagctgccccatggctgtgccccttcctctgttggccacatggcacccagtccccagggtaaggcacagattagaagtgatgttggtagcagtgggaggaaacagaggagccgttagaatctaagtgtatgcaagaatatctgaactggtcaaatctctaattgtgaacagcatacatactctgtttcccaccacaaaaatgtacagcaggggctttttaccaaagctagtttttaaaggtcttgatcctcacagagaaattttctctttgagaagtgtatgggagcaactggtttctcaggggtgccaggtaaatgagatgttgcaatgtattgctttcttgtatgcgtttgttctatcttagtatgttatcttggaacttctgggcaacagtcaatcttttaggagatgacttaggtactatgtttttatttagacagcaacagaagctcctgaggagccctccacccagtatctccacatcacagaggccgaagaagacgttcaagggacacaggcagcggtggccgcgctccaggacctgagatacacctctgagagtggtgaggacgcctggtcttcctttgccatctcagaactgtctttcctagacatgctgaatgaatgcgtttgcagatgaatgatgtccatcaggtgatctacttccgaatccctgacccagcgttcagactgcagaagcagccccattgccagcccccagagatctctgcctccagaaatgctctagaacagagccaaagcagaggggaagccttcgaacagggccgcaagagtccctcacatctcttaccacatttaattctctgaaccgccttgtgaggggaggagatctgactattctcacttcacagatgcagaaggttgcttttcattgttaatggttggctaatggttaatggttgttagtggttgactgagggtcacccactttagggtgttggagctcatcctggaatctgggtctcctaacttcttgtcacggcatcatcccattccatgcttcctcagggacatctcctccagggcctacaggggccaggcaggcagtgacaggaggtggtgtgggctcagtgggtggtagagagtagcagagactctggcgtgcagggggtcactttgcagacctgaaagaccaggatcgctcattctccaagtccttcccaaaaggcccagtcaggatttttacatcaaatgtcatgattttcaaatgttaaatcagttctaaaaaaaacaagccactgtaccagcctagtggcagttggggcattatgcttagaaaacagtttttcttgatgctctttttaaaagatgaacagaacacaagttaatgtttcataccacagccctgtacatatctggagggcagaggtcaagcaggttgggttaaaagggaagcattaggtgaaatgaaacggtgataggaaataggagttagaaagacaccatttttacccagttcctaaaaccccaaactccagattgtaagaaagctgcacagaaaactcctgtgggccagttggtttagggaagattaatcgacagggctgtgttcactgcctgctgagctgcagggaattcaggaggcagtgcctccacttctgcagacgggagagtcgaggcccagctgttaaatgtggctctcagcactgaggttctgtcagaacttgagtttccttccatgatgtccagtgacatcagtgattgctcatggcctacaagatgcagcctgtctgtcttcatcccctatgagcacacacacaccccccacacacactctcactctcagactcactcactctctcactccttctaaggccctccgatgtctcttcctagctcttaactttgcagctgaaaaggccaggctcagcttctctggctcctgcctggccttgtcactgtctcttgccaccccattcctgggctgtgcttccctctgccagatttgcagctctcagaagggacacacgctccagtgctccctggggtatggcctggtttcttctccctcacagcctttttctgccaaactcatcctcatcttcagtactcagactgcaggtcacctcctgagaaccccgtcccttttctgcactgtttcctaattgcactcctgacatgggagctgccaggtgctgtaaggatttgcttacagtctggcttaggaggttgtgagccctgggaggagtcggggggtgagggggaaggggtagggctttgtctttattcttagcaggagcaataatgctagggcttgataaagggtcattgagggagtccatggatgcggaattagaacctcgcctcagtaagttgcacaggtaaatgttttcgtccttgcatgttcggagtggttggctgcaaggtacatttgcaccatttcccttaaggggcatgtgtttgggggtgccggcgatgcattgtgaatataagtccgccactgcctcagccactggcttgtcctaccttctgcatgagacacgttgagttccccttctctgatctcttattgattgactcgcattggaacacggcccacagaaagctgcccatgaggatgaaaatgttggcagagactgcataatatcatgctgaggtggagatcaagcagtcatttctcttttagtaaattagtgatcagggtcagggtgtgctcaggacggttgcagatggcctggcagatggtgggagcaggcggggatactaaatagctgcctgatgatgcagaatcccgtctttagagatggttaaaatagaacccccagcttcaattggtttggagttccaaagcctactggttgaataattgatacatctttggatgttttgcccataacttgtggaatttcttggcacacactttcattgagtctgcggctgaacgggcttgctgggcgctcccaggagttcagcttcgagggcagccacatgtccgcatgttaggactcagagcacgtgggttcaagttctggctttgtggtgtaactgactcagtggcccaaatgaggcttctacaaaatgcaaataacgtctcaatgtcccatcctcacagggttgcttggggttttgagatgttcttatagaaaatgctttgtaagctataaagcactatacagattatttctgttgtcaaactgagcgattacggagagcccatgcatcctctggagaaggcgtcacccgagagaacagacaggctggttttgcattccatgtccttcagcaccagtggcctgaatggtgtcctctttgcttcttcctcttaaggcgaccgactggaccccacggctgtgaacatcctgcagcagatcattgagctgggcgccgagacccatgacgccactgcccttgcctcggtggttgccatggcaccagggacggtgactgtggttaagcaggtaggga

SEQ ID NO: 384 - DNA, 3598 bp, Homo sapiens
gagtctgagaagaaagggtgtagatggagaggcggtggcctcacctctgcatgctccgtgggaagcggcggaggcgcccagcatccctcctactctgcccttggtggaggtttacgagaaaacacggccatctttatgtgtaaatgttgtaacctcttctcaccaaatcagtcggaactcctctcccacgtttcagagaagcacatggaagaaggggttaatgttgatgagattattattccccttaggcctctgagtacacctgaaccccccaactcaagcaaaaccggagatgagtttttggtcatgaagaggaagagaggcaggcctaaggggtccacgaagaagtccagcacagaagaggagctggcagaaaacatcgtgagtccgactgaggacagcccgctggctccggaggaagggaacagcctgcctccaagcagcttggagtgtagcaagtgctgtcggaagttctccaacacgcgccagctgcggaagcacatctgcattatcgtgctgaatttgggtgaggaggaaggagaagcaggtaacgagtctgaccttgaactagaaaagaagtgtaaggaagatgatcgggaaaaagcctcgaaaagaccacggtcacagaaaacagagaaagtccagaagatctcaggaaaggaggccagacagctttctggggcgaagaaacccatcataagtgtggttttaactgcacacgaagcaattccaggtgctaccaagattgtgccagtggaggctgggccccctgaaacaggagctacaaattctgagaccacttcagcagacctggtgcctcggagaggctaccaggaatacgccattcagcagacaccttatgagcaaccaatgaagtcaagcaggctaggtcccactcagctcaaaatcttcacttgtgaatactgcaacaaggtcttcaagttcaagcactcgctgcaggcccacctgaggatccacaccaatgaaaagccatacaagtgcccccagtgcagctatgccagtgccatcaaggccaacctcaatgtgcacctgcgcaagcacactggagagaagttcgcctgcgactattgctcgttcacctgcctgagcaagggccacctcaaggtgcacatcgagcgagtgcacaagaagatcaagcagcactgccgcttctgcaagaagaagtactctgacgtcaagaacctcatcaagcacatccgagacgcgcatgacccacaggacaagaaggtcaaagaggccttggacgagctctgcctgatgacgagggagggcaagcggcagctgctctatgactgccacatctgtgagcgcaagttcaagaacgagctggaccgtgaccgccatatgctggtccacggagacaagtggccttttgcctgtgagctctgtggccatggggccaccaagtaccaggcgctggaactgcatgtcaggaagcaccccttcgtgtacgtctgtgccgtctgccgcaagaagttcgtcagctccatcaggctgcgcacccacatcaaagaggtgcacggggctgcccaggaggccttggtcttcaccagttccatcaaccagagcttctgcctcctggaacctggtggggacatccagcaagaagctctgggggaccagctacagctggtggaagaggagtttgccctccagggcgtgaatgcactcaaggaagaggcctgtcctggggacactcagctggaggagggccggaaggagccggaggcccctggggaaatgcctgccccagctgtgcacctggcctccccgcaggccgaaagcacagccctgccaccctgtgagctggaaaccaccgtggtctcctcctcagacctgcattctcaagaggtggtttcagatgattttttgttgaaaaatgatacctcctccgcagaggctcatgctgctcctgagaagcccccagacatgcagcacagaagctcagtccagacgcaaggtgaagtgatcacactactgctgtccaaggcccagagtgctgggtcagatcaggaaagccatggcgcccagagccccctaggggaagggcagaacatggctgtgctttcagctggtgacccagatcccagcaggtgtctcaggtcaaacccagctgaggcctcagacctcctccctccagtagctggtggtggggacaccatcacacatcagcctgactcttgcaaagctgcccctgagcaccggtcaggcatcaccgctttcatgaaggtcctgaacagtttacagaagaagcaaatgaacaccagcttgtgtgagcggatccggaaggtttatggagacctggagtgtgaatactgtggcaaacttttttggtaccaagtgcattttgatatgcatgtccgcacccacacccgggaacatctgtattattgctctcagtgtcattattcttccatcaccaaaaactgccttaaacgccacgtaattcagaaacacagtaacatcttgctgaagtgtcccaccgatggctgtgactactcaactccagataaatataagctacaggcacatcttaaagttcacacagcactggacaaaaggagttattcttgtcctgtttgtgaaaagtctttttcagaggatcgattgataaagtcacatatcaagaccaaccatcctgaggtctccatgagcaccatttctgaggttctcgggaggagggttcagctgaaagggctaattggaaagagagccatgaaatgcccatattgtgacttttatttcatgaagaatggctcagaccttcagcgtcatatttgggctcatgaaggtgtgaagcccttcaagtgttctttgtgtgagtatgcaactcgtagcaagagtaacctcaaggctcatatgaatcgtcacagcactgagaaaacccacctatgtgacatgtgtggcaagaaattcaaatcaaaagggacactgaaaagtcacaaactccttcacactgcagatgggaagcagtttaagtgcacggtgtgtgactacacagcggcccagaagccacagctgctgcggcacatggaacagcatgtctccttcaagcctttccgctgtgcccattgccattactcctgcaacatatctggctctctgaagcggcactacaacaggaagcaccctaatgaggagtatgccaacgtgggcaccggggagctggcagcggaggtgctcatccagcaaggtggtttgaagtgtcctgtttgcagctttgtatatggcaccaaatgggagttcaataggcacttgaagaacaaacatggcttgaaggtggtggaaattgatggagaccccaagtgggagacagcaacagaagctcctgaggagccctccacccagtatctccacatcacagaggccgaagaagacgttcaagggacacaggcagcggtggccgcgctccaggacctgagatacacctctgagagtggcgaccgactggaccccacggctgtgaacatcctgcagcagatcattgagctgggcgccgagacccatgacgccactgcccttgcctcggtggttgccatggcaccagggacggtgactgtggttaagcaggtaggga

SEQ ID NO: 385 - protein, 1151 aa, Homo sapiens
  VARIANT (1)...(1151): Xaa = Any Amino Acid
MCKCCNLFSPNQSELLSHVSEKHMEEGVNVDEIIIPLRPLSTPEPPNSSKTGDEFLVMKRKRGRPKGSTKKSSTEEELAENIVSPTEDSPLAPEEGNSLPPSSLECSKCCRKFSNTRQLRKHICIIVLNLGEEEGEAGNESDLELEKKCKEDDREKASKRPRSQKTEKVQKISGKEARQLSGAKKPIISVVLTAHEAIPGATKIVPVEAGPPETGATNSETTSADLVPRRGYQEYAIQQTPYEQPMKSSRLGPTQLKIFTCEYCNKVFKFKHSLQAHLRIHTNEKPYKCPQCSYASAIKANLNVHLRKHTGEKFACDYCSFTCLSKGHLKVHIERVHKKIKQHCRFCKKKYSDVKNLIKHIRDAHDPQDKKVKEALDELCLMTREGKRQLLYDCHICERKFKNELDRDRHMLVHGDKWPFACELCGHGATKYQALELHVRKHPFVYVCAVCRKKFVSSIRLRTHIKEVHGAAQEALVFTSSINQSFCLLEPGGDIQQEALGDQLQLVEEEFALQGVNALKEEACPGDTQLEEGRKEPEAPGEMPAPAVHLDQAESTALPPCELETTVVSSSDLHSQEVVSDDFLLKNDTSSAEAHAAPEKPPDMQHRSSVQTQGEVITLLLSKAQSAGSDQESHGAQSPLGEGQNMAVLSAGDPDPSRCLRSNPAEASDLLPPVAGGGDTITHQPDSCKAAPEHRSGITAFMKVLNSLQKKQMNTSLCERIRKVYGDLECEYCGKLFWYQVHFDMHVRTHTREHLYYCSQCHYSSITKNCLKRHVIQKHSNILLKCPTDGCDYSTPDKYKLQAHLKVHTALDKRSYSCPVCEKSFSEDRLIKSHIKTNHPEVSMSTISEVLGRRVQLKGLIGKRAMKCPYCDFYFMKNGSDLQRHIWAHEGVKPFKCSLCEYATRSKSNLKAHMNRHSTEKTHLCDMCGKKFKSKGTLKSHKLLHTADGKQFKCTVCDYTAAQKPQLLRHMEQHVSFKPFRCAHCHYSCNISGSLKRHYNRKHPNEEYANVGTGELAAEVLIQQGGLKCPVCSFVYGTKWEFNRHLKNKHGLKVVEIDGDPKWETATEAPEEPSTQYLHITEAEEDVQGTQAAVAALQDLRYTSESGDRLDPTAVNILQQIIELGAETHDATASVVAMAPGTVTVVKQVGX

SEQ ID NO: 386 - DNA, 73394 bp, Homo sapiens
gctttgttaggcatcttgatcatctactgaggtattgaatgatcactgcgttacagtcttaagttttccctctggttctgcgcataagttaccatgttttctttccacattttcttgataatcttacaacttcaaagtgacttctataccaaaagttccaaaatctgtctccagtctcactttgccatgtaatactcatgtgagatttgataagtcatcctttctgagcctcagttttcttatttgtacaactgatgtaattaccaacactagaaggataaaaagacagtgaaaggtacaagcttatataagtataaaggataatattatttttattgctgtaatcagtaactttaggaccatatctcaacatttttgtaggaaatgcttgtttgtacagaccctgacaccttaaacttaagatttactaaatagtgttcagtcactcttttttcttgcatgagacactgtccttgattttatatttttatgatggcatgatctttccgatagtcattacatttcaaaatcttgaaggtacatttttagtgccttctcctcctttagaggagaaatgttactacatttcttcagactttctttgcaacttgtctgtattgctctaatcatctcataactggtccctttttctttagtctttacgtgtactgttatggaatttttatttttttgtttttgttttgttatttttgccttttgtttctctactcctaaaaaaatatagcctgaaacttcagcatccccgcactgtgtacacattggctcacttgtaagccttgcattcaaggtcctctacaatatatacttaatctgcatttgcagcttttcttattacaactttttcatgagccaaccccttcagccaacctttttgttttcaaattgagtattgaccacttttatttctgtaagctctctgtctggaatgtcttctctttgttgaaaaactacagatccagtctggcctattgaaaatgccacctccatgaaagtatttgtaatattcctcaaacacatgtgattatggctcttctcttctgaactcactatctcactgttctttacttcatctcagctattccatgcttgtataatacctaagtaacggcataaaatacacttaactatttctttagttgaacttgatcactgtgtatctgtttctttccatttgtgaaccatatttgaatcagcctcggccccatgatgagaaagtggttggtgacggtaatgcagtttcatcttacagtttatgtcctaccatgttgcaagtacaagaaggaaaagtggctcccaaccagctttacactattgaaaatatgggggaccgttttaacactattttttttcttgataacatgcaggaatatgtgttgaaagaattatttcaggcatttttatttatatccatgttaaaatatagttaaatgaaagtatcttccaatcagaaactaaaattttatagaacaagtaaatttacttactcctagaaagatgtctcacctgttcttgtcttgattaatcttcaaagggattattttttatgatctgcagtttgtgcatccctattttaaggcattaagctctgtatcaaatcctttttgtattattgcaaatcaaccaatcttttgctactttaatgttgtcagccattcactctttattgttattttaaatgccagaaagtaaaatgcaaaaaccccaccctatattaatgtaattttatggttaagattttacattcaaaaaagtccagaaattcaaagttatagttcccagaagaatcctaattcagtcacattgcataaactgatattaaggctgaaatgtatcatcattacagtaatgcacaatacctctatatgcatgaggacacagttatagttgctgagggaaccataattttggattttctgactttttttgcacatacaatttcaaacataatgttgttaatgcaggcttttttcattgactctgaagtaatgtatctgttgcaatgtttatcttaaaaataagttttcattggctcaatttttttccttctttatatcaataaacctatgcttgtaaagatctgatgtccctacagcgaactacctaggaatatttctgtataaaaatagtttttagcctcatgtatgctgatattctctctgcctttctttctcacacacacatccacacacagcctcacacacttatgttacattctggcacattatagaagcaggtagcatatccactacctgctgttgaaagtgttgacgatactgaattatttattctatcttctacactatccaaaatcattttgggtactttgacacattttggtctcttccatatggatacttcatggtggcagagttgccagatgctcaggttttgtgacagtcttagtttttcaaggactgttggaatattcttgggagaatctcgccttgttactgattcctatggagtggtaaaatactaacatttctttgaaagtgtttttcaagacaaggagttgttataaaaaagttactagaatgtcccatctgagtgtttttaactttgggaacctagtaagggaggaatttatcatgaaattcatttacaatgagttggcatcatcttaaaaaggaataataatagcagtatatgtaaatatggggattaaacaaacatggtgatatttcaacatttgaaatattagatatttgactctcatagaacgtcagccatttatatttcaactgccaaaatgcaaaggagcaggatgccatctagtttatttttttactccttatcaactagacagaatcttgcatgtactatatagataccatatagatatcatatatatacaccatacatatatatagttatatatgtgttatacatatatgtttatatgttaaatatttgcttaattgaatagaatgtggatatttgtggtctcaagtatttacctttcctgttcagtatgaatagaaactccataatctcttccctttccaatccctgccttcaacacaaaaataattggacattctgctcatcttttaatagccatcgcaagtgttttctccttttctaaagccttttttctggctttcctgggccatatctgaggttcccttctcacttcgcttatggcattctatgtatttcttggcatttctagaccattgttatgtacaagcagagaaaaaggaagaagggacagctctgagtcagaagggaagcctccattccatggcctatgtgtaaatgtcttttatggctgagagaggcttttgactgccattatgtgatctatgacatgtgatcttcagatatgtgaccctcagacatgtgaccctcaaatgtaggcaatagaaaattcggatatcattaagagtcaggtggatatctgtattagtctctactgcatatttataccaaaagttcaagtactttgtctacgttgtgtggagagaagggatgaaacagaaaataaacaaacactgtaaataaagtttttcaaactttttttcttggtgagtaaactttcccccatgtaactagagagcattttcattgaaacgtctaacttgaaaaagttgcttttactattggaatcatgagtccaggctcacaagcagcaactgtgactttctttttattactgatttcacactggttctatttttgcctcttactggctaacgtggggcagatgacctcattttctgctcttcagtcacctggtaaagaagtgtggcctaggaaattttaaggtccttctttctgtagtgttagatgagtcctacatatcatgtttcatgctaggtgagacccagaaaagtgtgtctcagaaagttagcatgtgatgtaggttgtgttgaatgactccagtacttcattttagataatctaatatataacttaaagagggcagttgtgatcaacggaagcattttttttgtttgttttttgaaaaccaatgtttttgtttgttaaatttagctgtgtacagaatttttaatttttgttttactccatttgatctttaaaaaagtggcttttaaatgtttcccctctgtgatatatggggtaattaatattaaaatgagaattctcacacacaggatttagcaaatcagtgtttgtgaaaagtcttacctttaaaataagtgtataaaggaccaggactcagtcctaagactcacctttgattctttttctgttgcagatgtacaacattattaaacatttcactctctctcaaacatttcttgaatgcctactgtacatagtacagtttgctagttttgatgtttataattaattattcagtggtacccttgtaattaaatagcaaaacattggggatactaagttatttgtggggaggtatttctccaaatggtatattaagcaccaaatttaaggaggatttcaaagaactgtcgtgaacttgccaaaacaaacattggaggaataatcaaaacacagacataatttctatgagaagcataacaaatcaaatgataaaacgagtaactcaatagagtaaagcaaactgggaagcaaacttgaagcaaatactcataagcaccaaaaaaattagatgttattactgattactgaaagactgaatatttaggatatattttattttgatagttttatcagtagataggactcagtagaaatagcaagtccctatatttttcctggttagcttatttgttatttgggcacaaaatacttttttttttttcatggttgtcaggaacagcttagttgtcacgaagcagatattattattgttattgtcatgattactttaattattatagtgtcataatattcaagcctaaatcatgatactgtccaaaagccactctgtacttgcctgtggtttgtttctcaggcttgcgcctcaagagagttttctgaatttacttgtggatagtgctctggcttgactggtcagtaggtccttaaatgtgtataattttagactacactgatagggtcggattgcagtgatgatagaacttacatccattaccttgggtctccagtcttcaaactttatagtatttagaagggaactccagagactcatgagtggcatgaaataaagggcaaagaacattccaatgtaaaatgatatgctgcttttaaggaatagtcttgtacgatagattaatcatgagatgaattataaatatttcacatactaattatattagtttatggtgataaaacaccatatgaagtgttcccagcacactcagcaagttagatgctctttgcatgttaattgacttacttcttcaaggctaatgatcatgaatccctgaaggtgacaaaaattattatcaagatattgtacattgctgatctttgtaccaggttgacatctacctttcctcttgagttccttttgtttggatcctgtcttgaatactttacgatggtgaagcagagaacagtgcctgaaatactattagggaccccaggaaaaactaatgagctcaataaaaaatgacatcaaataacacatcatagaatcgtgttgggtgttcacatccatggggcatggggaatgtaagcacccatgggcatggatgcttcccagcttgttttaatggtaggagtgaatattgtattgaacacttctgtataaatggaaagttaaccagttttattttctcacagtcgttgagggaatgaatgatccattcactccatttattcattcacttatttgaaaatatttgttaagcacgtggctaggatggggaataagacagatgtaggacctgtcctaatggaactttaaaatccagagtgatagctgccaagttaggaaaactctaggatactaaagaaaagaacagcagatctaatttatcttatcaaggaatatatacttcagtgtgaagaaacgggataatatattaaatattggagaaccacatagaatagttatgtaaaattatataacagactagatcccacatttttaacaaacatatttggtgatcaggcaagttctttatttaaatcaactctccagtgtatttcctctcattaccctattatctgtaatcttcagttacctactgggcactctacttatattcagtatttgcaaaacatgtctctttatttctcctccaaaccaggatttttttcctcttgtgttaaggagtattacaccatcactatctgattatgtaagctagaaacctttagcctcttacttttaataaccaagccggacatttctttcatcacccttaatgttagccactctctctattccagtgccctgacctcctccttgttattccaggaggctcgctcctgcatgttatttaggatgcttcctagagtgcatctccttaggaaagcctttactgatggtcattacctctccacaatttgtatagccagagcagtctggccactcagtaaatatgtgatggataaagggttgaaataaaactattcacttttgtatagttcttctttgtaccacttatattcttttatatttccaacacagattctaataagtacaattaacacaaaaacactgagtcacatactaatcttaagatgattcaaaatcagtgtggagtaagtgaaaaagtagaggctttaggcccagatcaacttgaatttgaaactcatctttacctcttagtaactgctgttgtctcagcatttaaccaaacctcttgtgctttaatttcttaaccagtaaaatgaggataataagtcgtatctcttaggggtggtggtagtgatgtgtgtagagaaccttgcacgatacgtggttttctatcttcctttaaaatattaccatcaacattacaatattatggtgattaaaggattccattatcaaaaagtgatcatggaaagccatggatttaaatgaactgttttgtttttgtttttgtttttgttttctttgagacggagtctctctctgtcgcccaggctggagtgcagtggtgcgatctcggctcactgcaagctgtgcctcctgggttcacgccattctcctgcctcagcctcccaagtaactgggactacaggcacctgccaccatgcctggcaaattttttcgtatttttagtgttagccaagatggtctcgatctcctgacctcgtgatccgcccgcctcagcctcccagagtgctgggattacaggcatgagccaccgtgcccagcctaaaggaactggttttatatcttctgtatttggttatatttagagtaatcttccttattttgagaataatagtgatttatagtggtactttatttatttctttatcttctcactttacaaccatctttttcttggccaataagcattaaaaactgagttaattaagaataagaaaaaataaaagattgttagtataataatgaacatgcagtgagtcaccaaattgctgaaagataaagtacaaacttcttatcctgcatctggatacttctgggtctgaggagggccaccgtttcagttttatctgattattcatttttttccaaacgctaactgctagccctctctgactaattcaaatagcactgatccttttagtcccgagaactcaggacctgggcctcttctgccacccctgataattctgagacttcctggtttttcactgctcttagttctcttttcttccactgagtggccatagcacttagtgcctctgccttcattcgtaatcaatctcacactgctttgtgacatttcttgtgcaggagagagcagttacttatcttttttattgttatttaatgtttcctgtatttacggcttatttcaccaattatattgtcagttcttttagaacggggtgatatcttatacttcttaaattgccaagtcaaaagattttacagtgttctgatttgttgacttattgatagaatgtctaaaaacagatatatctacaaatgttctggttcatattaccttggaccttgtaagaatactcttaataatgaactccagtcccaaaagaaataaacacatacatgaaaaaatgtttaaatgtatgcaataaaaatttcaatgtatttatagattttttaaaatagtaggctcaccctctcttcttgtatcttcctttcttgttagaaacataattacaaagtgtcttttatggattaagcactgtgccagataccaagagttaaaagactcagcgtttgcaggaataatttaagagacacctgaatttaagtgacacctttagctaaagaagctcaataggcattatggaatttgtttccttaaacatccgtaagacagttcagagtgctgatgatggcagcaaggatagatgttaagaaaacagccttatgttggagatactgctcagtggcaggttgtgcctacagtctttgattccctaccttcttgacaggtgttctgtatatagtgcttttttgtatacagtgctctcctggccatcgtgataagcacaggaaaggaaaattacatgatggaagaaagtaaaactgtccgattgatgccacatgatgagacagcttttgggaaactggctactctatttataaacagcctgtaaattaccaccacaagaacctgggagattaaatgactgtgtttccttttccttcagataagacttccatcttgtatttttaattgtttcagcaaagggaaacattttgttaggcagtgttcttgtaagtttttgaatatccatagcatttaaacatgcagtagaaatggtccaattaagattaagtagctgacaactaaagcaaattgtgttaaaatgaattttgtatattgatgattaatgaatattagaactcagttatctctctacacaagttttatgaattaaaaaatatgttgaaaccaaagacttttgaaatgcttgggagtaattttcatttatgtgtgtatgtatcattgagtttctgttgtaattaaaactctgtcaaggtgctttggaagtgataaagggaagaaagcaatagctgtcctctctttcgcttctcatatccagttttatcagcaaaccctgacagttatcagtacacccagtcaggccacttggtaacactctcacaatattagcatcttagcccaagacagtgtcattttttttcttcttgctgtcttcttccactcatgactccttgcagtctgctttccatatggtagtcagagtaaagttttctggtattaaaaagtaatttaaatatgcatgaattacataaacaaaagaaatataagagattaatacagagaagatttcaaaactttatggacatgagtataaaaatcatgccctagttggagatattatgacttaccatatcatgaagcgtaataaaaaatcataccttttagaaataatttttaacatggcaaaacaacatggtgttaaaagcaagaaatgaaagtatgcaataatgtatttctgttacaaagtggaaagaataaaataaaatatacctaatgtacatataagattttgtcacttccctgcttaaaatccttccagctcttcctattgttcttaccacaaaaccaagattattttcatgtcttacctttgaatcttcacccttatttttggccactctcccattggctccaacctccttggtcttcgttcagttcctcaacctgtcattcttcttcttgcctcagctactttgttttccattttatgtctgtaatttagcatagtgccttgcaaataataggtgctcagcacatgcttagagcaccaaaatgcaaatagtagctatctctctttggaatagttatgggtgatattcactttatttgtattttttgtgcttaaaacattttccatagtgaatgtgtattttctaattctcagaaggaaaagaaaaaataatgccattccagaactggagagctgggtaggtgaaattcatctaggcaggaggaacatggaaattaggttatcacaagcgggtcaagggtctgttcaggaaaatcagttaagcaggtaattgtattcaggaaacatgggtgtcaggttagggaaagctggttcatccagaactgtgctttccaatacagtagccactaaccacatatggctagtcgatttaaatttaaatttaatcaaattaaatttaaaagttagttcctcaggagtactagctacatttcaagtgctcgatagccatatgtagctagtcatatgtggacagtacagatatagaacattttcatcatcatagaaaatactgcatcacagaaaatacaggatcctagagagtagatatcaaggaacaggaatgcatgagagggaagaaaagaaccaaggcttaggtaatgagtcttagcaacatgaatctagaccaggagtttaggtattgagcaaagtgacacagctagaagaatttactcttttgtcaaaggcctcctgaagccatgcaagaaattgtgtatgagtggtaacacagcccaaactggtgtctgtgttaaattgtatacactatctcattatgtcataaatagcttcaggagaggagaggggcctactgaaaagatttcatggggcaagagtgaggtgacctagcccatgaagaatcattactaaaatgtatgggcagtggctggaatattgaatgcctgccttctgttactcatttcacttcccttctgtaccatttaagatataaaagtgtgcatcttaatggtaatggtcacactactactgcccttaggtatatttcagcttttctttttacatattaagtaaatagggtaaaaggcaaacaactgatttatttaaattgagcagaaaataataaaatctttaatctcgaatttcattgtgtttaactgtttcggattctttaaacatatatgacttgaaatgtagatacaatgtgtattggaaacaatcgaaacgtgtacaggtccttttcccaaatacatggaatggtgttaatgtgcttgcagcatagagccgttttggttagatgattatagtagcagcttacttgtacttttggtgaaatggtaagctaatgatgtagctgttaatttgaatttagcagacattttaaatataggtttctcttacagagacaaaagttgcaatttaaagctctttggtggtctaaaaacagcttaattctgtagtagcatggtaataagtactaatccagcttatacagtgattgtagtatgtcatgtttgtgaaagattgctcaactgctttctctgggttttatgttaatttaaaaatattaaacataaaaccttataacatcttcatgctgagataaactgttcaatttaacttgtgctcaagcagcagctgtcaggaattatcttgttcctagtggtttttgctatcaccttgtgtcctttcctgctagagacacactgtgggatgataaaatgcaccttgttaggatttattggttaaataatacctgaggcaggatgagcatttgtagcccagggattagctgctgatcaagtgatgtcattcattgtattattatcaatttttaaaaattgatagtagggagcagagtaaaaattgcctatggatcacctgcattccttttgtgggcatattcattacttctttttgggtgttgttgagctaaatatttgagaaattgcttattgaccactttaccgttttacgagcaagaaaagcaaagagatgatggagataatttccactatttaaaactagtgagggctatttcaagattaattatacaaatacagtgaattttcttttaatgattaaacaaactgaaagaagtgttggcgtgggcagtctcaaatggggaatattatgaaaattattgttgtttctcatatgaatatattgccttcttttatttgggaggttttctttggaaggctgaactttagggttgaattctttggttacggataagctggtgggtagggggacatgtggtagaaatagagtgaagggctcctttcggttaaacattagctatagatagtccaccctgaggataatcctcatgtagaaattaacagttggaatatggctagaaatacagatatgatgggtttattgtttatggaatatagaattttttcttctacttactgccatttaatgcctgttacttcaaatgtatagttttataaatgtataacttacccaaaatttgcagtacgacaatgccttgctccatgaaatctgtttgatagactctccccatcccctgaagctatgaattactacacacctgttcacatagattaatcaactgttaatgtgtttgcacattttttatttttctctctctgtaaatatatacatattaatatttattattagtagtagcatttggctgaactatttaataatttattgcagacatcatggcatttcacatctaaataatttgacatgaatctcctaacaataggaatattctcctacataactgcaataaaattattgtatttaagaaattaaagattgataaaaacttgcagtcttataattagcccatattcaaatttttcctattgtcctaataatgtccttaataggtgttcttttcccttccagtgtccactaaaggatcatatactggattttgttttgagtgtctttatttcctttagtctagatttttttcttttatgacatgacatttttggagatccagcaaattattttgcagaatatttgtctggttattccttaccaaattcagcttaggcatttttggcaggaatactatactgatgatttgtatctttctcagtgtatcacatttggaaatacataatatcactttgtcccattattggtcacagtaagtttgatcacttgattacattggtttctaccagatttccccatcataaaaggtatattttttgtaattaataactcatatgaaggctacttttaatgcatttttctgccttgtgtgtgaaaaacattatgcttgcccaggtgataatgattaagaatgggcgtcattgcttgcaatagtatgtatggtcagggatgggcatagtaagaaagaatagaaggagaggaggattacgcaataactagacctagaagttgccatgtattcccttttaaggaaaatattgtttgaaattaatattttgttgtttcctctgctaaagatcagatttttaggtaaacaaatatcttcatgtttcagaattttcagtgtaagttttagagaggcttatatgtggtagtggtgtggggaatatgtttggacaaaatggggcattgtttggtcataattttttttttatttgggtatagacagacaggtttaaaaaataagtgcatctccttggtaagattttttttttttaaccttaaagagataaattataacattaatatagcaatgtaggtttgaagagggattgctggcttttggtcttgtgtgcctcttttagcccgtgaagaagacacttgaattcctacttgtgatatatgcacttattatgtaatccttcttatgtgaaaggctagtgcggcagatcatataaacacctgaagttagccatttggcttgtcagcaagggaggatttatagtagttgtaatcatggtaataacaaggatgatattttgtatttattaagtacagaaaaaagcacttgcaatgtaagtggtctgcaaccaattcatatctgtggtgtaatgaaaagcagtttgagcccttagaagaccagcagtctctctgctttgcaactttctaccagtgtgatcctagaaaaactcttaaccttcttgaacctgattttttagaaagggaattaaagccataaaggtaaaatgatgttacattatgttataaaggtggcattctatcaaaattgtgtcatctaaatgtcctcagctgctcaagtcctgtactttgtccctcttttgtgtccgtatgtaataggcaccttattagggaaacatttccaggttgtcccagacaattagtattgctttctgtttgtttctctaatgttttgtgtatgtctctattacaggcagcatttatcctgctgagctgtcttgttcatcttttctgttcttcctggttagaccctggcacatagtaggcatttagtaaatgtatgtggaatgagagagtaaattgacacttttttcatttataaacatggataggcaagctttcagtttccctttttcccttaaaaatgaggaatcagcctttcataaaatttttatatttgtgctttttaagggattttacagatgatgcatctggtaccattagcagtccagtaatggagaagaaaagatgtttttaaaaatacaagtattgtaagatactttacaagtgaggggagggtaagaaaacatgccaagagaaaaagaccatactagataagtctattgcataaatcaaaagagtttatgtcataacatgaacatgtgccattcctgctcatacattgaatttcagtagttggttgcataaagaaggaaagtgtaatgaaactggcaagcaaagtattccccagtcagtcttatctttgttccatttgtccttcagatagagcttttcttgcctttttcaataaaatccatccggctttttttttttttttttttttttttttttttttttaacatttctcagtaactgcactgagaagaccagtgagattcggggactttatagttctaagcagctgctttttaagagatcaaaacttagaatgctgctacatggtattaagcctcaactattgatgtgtccctataggggatgtgtttttcttggggtgggaagaggaaagaggagagaagagcaaagcatgatcccttcaaacatacttgggacagtaaaccccaattttcttgtttcctaggaccctctttgcaagttcagtgcttaacctgaccgaactggctgcccttcggcctgaccttgggaaactgaaaaagattctgtattttcacgagaaccagttgatatatcctgtcaagaaatgtcaggagagggatttccaatatggatacaaccaaattctttcatggtaggtatggattgtatcattatatttggccctttgctacctttttctttgtaggtggttacgttttaaatctggagacctactattgtacacctttttttaaaacaccataaggtaggtgcaaatatttaaacaattcttccttctgcagtatatgtaagatcacaactaatcattttataaaaatacatatatgtaacaatctaattatatgttgagctaattatctatttttcacaacattcaaaatagaattaaaaggttggcagggaccttcaccccttgatttcatgatctattgcttaaggcatttagaaagtgcagttagtcaactcttacttattaatcacgatcactgtattcagctaaaatcaaaatagagttttacagagaagtaaaaattaaagcataatggagcaacttggggttttgtctcccccgccttttttttttttttttttttaaattgtaagacagagaagactatggacaatgaatccttaggtagtgttttcttttttccttcgttgagtcttctgaaatggcacagccttaaaataccatgacattttaaaggtgatggtcctctattgttacttcgacaaagtgtatctcctgaagcttagttaatgaaagaagttaataacaattctgaaatggctttgctattggatcctattcacataactgcaacagtcaaacggaatctgtttgtcagtgattttgtacattttatttatctttattaacagctattagcaactgggtttgatgatgtatttgaacagacccgcaattcttgcaagaatgtttcatagtttagttgacatagaaaaatggctatatagtaataattctgtgttgtgtgcattttgtgaatgttttcctacaatcatttttacaagctgcttcaattgtgaagtagcagtgctatcaaaatagagtgcaactgcttcacgtcaaatgtctcataaaaaaagcagccgttttaaaatttcataataaaattaaaatactttatattgaaacagagaaggaaaatatgttttaaaaatgaaaataaaatcattttgtgctttatcaatatggaaaacatttgtaatattcttttgatttcttgaattagcatcattcttttcctcagatagtgtgtttattacccctgagaaatcattgggaaaaaaactaagtctattttttcctttatgggtggctttaaagttaatggaagttacatccactcatatcagggaggaaatgtaccaaaaaggatatttctgtaaactatcttggatctttaatttagcatagactggatttttaagaatgtaagtcattgggtcacatgccgtttgagggaagctatctaaaaacaattcagctctcgattcctcctcactttcataaaacattgtttttgctgatagggaatgagactataaaagttttgtacatgatttttcagcattgcttttctcaagagggtaaacttatagacaagcttggagagagagaagtgtacttcatcatcagttggcttcttaatggggaaaaaatggttcacagttgtccagaggaaaaataagagtgtcaaaaggcagtcctgttcagattctctttgaaaagtatgactcctgcttcctcaaatgtttctttagttttcttgctgacttctgctttttttggcactgtcagatttctttctggactgtgtggcagttaaggactttaaagatgactgacataagcactcaccttaaacagtgatttcactaaccctctgacttatgaacacatgtcacaactatatattatgacctgtaggtcactattacaatatgtgacatatggtgaaaacaagactagctgtaaaacatccttcaacttttggtatattattatattagcttccttattgcttagtgttgtgtcagcacttctgtgacattcctttgtattgttcgtgttgtaatcacccacaccccccaaatttgcactaggtagcaactaataaacaatacttgtatagaaaatcagtttttttcaagggatgcacggaagtagcaggccaacactctttttgttcattttttattctgctagatattaacattgtaatagtaaatttggctgtctcagcaaatatgacttaaactaaactgacgtttggctacggcattcctattctataagctctacttattctgtggtgttctgcagtcctgtggacataacatgtcttctttccagtagtattgatctatcatttttagggtggaataaaaccaattgctttatccctttaatcttgtatacagatgttcctcaacttacgataggattacagcctggtaaacccattattgtgagttgagaatatgataagttgaaatgcatttaatacaactaacctatcagacatcatagcttagcctaacctaccttcaacatattcagaatacttacattagcctacagttgggcaaaatcatctggcagcacaggccactgtagagtattggttgtttacccttgtgatcatgtggctgactgagatttgtgcctcactgctgctgcctagcatcgtgagagaatattgtgcacataccattagcccaggaaaagatcaaaattcagtattcgaagtatggtttcaattgaatatatattacattttcaccattgtgaaatttaaaaaatcttaagtttgaaccattgttgttgcggactggtattaccacatttatttcattgaattcgaagatcatggtgttgcggcgctttataatttatatgtacctttatgtaatcagttaggacctagtgatctggatttccggatgcatttctaccagtttcttctatttctctggctagcccaatataatataatatgatagtgaaacaagttattttgggataccataatcctttctgtgtagtcccagaacttttaaaaacttaacacagtttcttgaagtaaaagctacagcaagaagtagactttaaccaaatagtgccgaaggtatcgtgccttagtatgaaagtagttttatctgaattagtcttcttgaagttagtgagaagtgtgacagatgctctgttctcggtagtatggtgtaaaatgatgcacatcactgacagaaattcaacatgggtagctgggccacgaagaaaaaggaattgctgtacgtagtgttgttgataatatagaaagttcctggcattgtggaaaaatatgctttggtttggagtctcatgcgatcccattaaatcattctatttccctgttgcctttcaaatctgatgccaccaatcaactccctgtgatataacactaatgaaaccaacttagctcttagagacattttggtagatactgatatgaagtgaagagttctttgcaaacctaaggtgtagtataaactctgattaatccatagaggtcttaggttgataaaaattactctgaatgagtctgggctcatcatttgcatttgtcttttacctttacagcctggtggctgatgtggttgtattcaactcagtttttaatatggaatcatttctcacttccatgggaaaatttatgaagctgattcctgatcacagacccaaggatctggaaagcatcatcagacccaagtgccaagttatttactttcccatcaggtttcctgatgtgagcaggtcagtatgtttgactctgttctcaatattgtgtcataaattattcctcaaatgtataaaaattgatgttcttcatgccagttttaactttttagcataagtatggttagttagagaattaagttctatctcaccatgctgtgatttacaaagattttaaatcatcatgtgtctaacccatcactagttagttcagatattgagtccttcttttcttttcttttcttttatttatttgtttgccaaagcagcccggtgttttgtttctttctttctttcttttttttttttttgttacagaagtcattgtcaagcatatttctcaacctttgcattcagcttatgcccattgatttatatatacaataagaactggtctagataagtcaatgttaagtctcactgcttggattagttcatttctcatgctattttcttttattttttctttatttttaattatttatattatcttaataaagagttaagtcttctatattggtttacaaatgtacctaattgccatttctctttcttagttactaaggacattttttttattacccttgctgctgggcccaccttgaattagcaatggatgatgtggctcaaagggaacattctggaattccttttcacttttgattaaacctagcaaaactgtttttactaccactaggaatatttctcccttgtgaacagaaagtgtacttcagtgggactcacactagcaggagacgctgctgttttttactgactgctttcttaaaagagttcaggaacagctgtttcttcctcatccctgaaatgaaggcaggaaatgatttaatatccatacatgctatgcaagaggtcagcattaacttctgtgttctacacttactgagttcacccatattttgctgtagaaacggtagtcctcatctgcaccccattgctgatttatttgagtgtcttatttgttaatatttcatcgaagaaaaatctgccccatacaaaatcaagttagtgaatcataaaatttaagttagaccatcttgcccaatctttatataaagtgcagaaaacagaggcccagagaagtagagactggcttgtattcaccttgtcgttgtcacagactggattaatatttaggccttatgacttctgatttcaatttctacttaccattcaagcatcctgtcattacaggtcatttgtcaaaaacagttaatgatttatttgctgttttgaaaactataaagctaagtggagccacgatcacaaagcaattttcagaatatatatgtaattacgtatattatctatgtatttgtagacatagttttcttatgtgtgatgagagaactacaacttttgaaaaatgtgatagttatactttgcctgtgattaactagaacagttatatatctgaatttttcaaaatatgaaccttatattttgacgttttaagtttttttaatatcacatataggcaaaatgtatatctctaagtgagtagatggttatagctcctcttaattattactgctatagaattctaaataaatgttttaaaattcatttacatccgatgtatttctgcaacatcatatgtttaatatacctgtggcagttgagtagtttattaatttggatgatattaccataaaggaatctagctaaatagaaaaaggttaagaaatattgtggccaagataacattcataagcaaggtcttagcctagaatgttatttgaattattttcaaatggtaatttgctttatgcaacccaaactcatatagtgtaagtaagtgattatttgcatgaatgacaatcattctaacgcctgcagtttcaaaactgtattattttgttgagatgttgaaaagtatttagtaattccaaaggcaaaataaccaaggtgattaaaaaatatttttgaatgcttgtatctttctcccaatccaaatattatttggtcatgggaaaaatgaatttaactgaaaacaaagcagaagatacagttaaattattagtcattgcgctatataatataatggatattaattagggaggggagaaaagccatatttccaacaaaataaatgaagatttttagagtttctatctgttaaaactcagagcatgtctgtcacctcagcagtttcgctaatattagactcacggcacctactgctacctcttgccttcctcacttatctcctgcctcactcgcaatgaccagataaatagtagcatgagagtgtattctcttgaaaacatttcattatatgtattgaatattttgggatgggaaagctcttagacgccgtagtcatgtatacatgtatttgagttttgaccaccacttactagttctgtgatctgtacttgtggaatgaccttgcacttaagtttgttaatggttgtgattaaaccatctcatagggatgatgcagtgattaaatgaaataatgtataccatgtacctaggatagtgcttagcatacagtagacccacaacaaaaggttattttatcttgttacccgccccgctcccattaatttataacctagcatatttattggcatctgaatatagaggactatcttccctctgcctctcacagtcctataatcgacacatgaaaatagagaactactctcctaaaagctgaatctaatataaataaggagattggttttatttatttactttatcaccttgagtcaaacaatcctttggccttaccagaccctaccatccattgattgagccaacttaatttcactcttgtcctattttctctttctttgtccagcttaactttcttattccgtcattatgtttactctcttgcatatcctctcaaatcatttacaccttttgtttcatatttgattggcaaaacccctcgtctgtttaaatctatttgttcatatactgtcttcctataatcatggactaaacataactggagaaaagcatgtcatacttattagcatgttctaaatgtgtgattcataagattcagatgggccctttgactacctggcaagcatttcccttcttctagataattatgccttctcctttttttagaacactccaataccaaatcttctatcttcattctcagctgatgagtgaggaaataggagcaatcagaagacaactttaatttattgatactaccaggtccacccaattatgtgcttcttctgggtgcatattctccatcttctcacctgttactggggatgaacaaccttgcttctgtgtaaggccccatctacacttcttttccagaactcatccatcccacatactcaaggactattgtcctaacaattttttctggtctattctacatcatcaattttcctttcttctgaattattcctattttccttttatctgaattatttctattaacataaaaaaattatttcttacatcttaaaatttttttttctccttattccacttcccccttctactacctcatttctctccttctcttagtagcaaaaccttaaaagagttgtttatacttgttccttctaagttccttcctcctgttctgagttaaaactattccactgaaatagttttagtcagggtcaccactgcctctaaatcctgtggtcagttcgtagtccacatcttatttaccatagcagcagcatttgacacaccatgacacattcttcagttgtctagggcacatagtcccctgattttcacacagactgctgcttctcaggctcctttgctgggttcctcatcatcatcctgaccttttaacattggagccactttggcattcttgacacttaaggggttggtggaggaagagcccaagattgaagtgagaagacaaagtaagagtcaggaggtcaacactgagataattatcctgtggaacaaaggggagagagttctaaggagataatcattagtgaattcacagcagcgaggttaagtaaagtgatgactaaaaagcgtccttgaatttgaccattaaaaggtcagtggcatccaccctgcattctattaagtcacaaaaaagtttcatgtgtattgtcatagccaaagaaacttaggattcaggtctggatgagatctctctctgtctgtctctgacgcgcatgtactctctctctctctttctctctctcctcttcttattttatggataaaggcgccaaggcccagagaagttatatgtcttctggtaatcacacagctagatataggcagagcaggaactagaactggtatctcaaaatcttcatccagtgttcagcccaccacttattgtaaatgcaatttcggaagtcttgattatctgatttttcagctgacagcagattagcagcatcaaattgggggtgtgataaaggcagtctcactgacagcagtaaaaagtgacagctgactgacagcttgacaacaggggaggagagagataaaccattttgaaaaaaatatatgggaagttaaaaaaaaaagaaacatagcagcctggagccattctatggcagggcaggcaactctgcacatcaaataacccctgcagacatttctccatgattgtacagcttgtacatcaaaaggatgactgtgatttattaagagagattaaatggtaatcagtaagtttcattttaagaatgtaggaaaatgcataatccacttttggcagaagttataaatgacagcaaatggaattaaacattataccttactttaagatgtgcatgagctgtgttcccctaaaggaagacaataaacatctaaagcctttcttgtgcagttgtaatatccttcagttttcagtgaccaggagacatgttattaagctatctttttaaaatctccctgattacagctttgccattgaccaaatttcccatttctgctgggttgcaaacactggctccttccatactgaaggcttccaggcctgcaagatgattggtggtcaacaaaacagattttgtaatattaataccagaagataaatatgatcctgagacttggtgagatgagaattactactggaatgtattgcaaaagactattttgtgttaaaggatatagattagattgaaaagtcaagcaattttgcagtgtgtttcaagaagacagatttcccgtggaactccatggtgctgagtatgtgatggagaggcagagaaaaaagggagtaatcttgcaacctactaaactagatgctaaaggaagccaatattttcatactttaggtcatgtaattgtcataaaggcaaggcctagcagaagtagggaaattttaaatatccagacctttctgcaagtctcagtcttatgaaatccaaacatctgaagaattacatcttcctttcccgtctcttttcctttctcttttctcttttctcctttctccttcctcctttctcctttcctttctttcctttcctttcctttcctttcctttcctttcctttcctttcctttccttttccttttccttttccttttccttttccttttctctgttccctcccctccgctcccctcccctcccctcttttgacagggtctctctctgtcgcccaggctggagtgcaatgatgtgatcatgacccatttcatccttgacctcctgggctcaagtgactctcccatcttaccctactgatagctgggactgcaggtgggtatctccacatccagctaattttttaatttttttgtagagatggcgtttcaccatgttgcccaggctggtttccaactcctgggctcaagcagtctgcccaccttgacctcccaaagtgctgggtttacaaccatgagccaccttgcctggcctcacatcttgctttctgacagtgtcatctttagatggtagaactagccataacaactaacccttattgattattactctatgctctgtattgtactaaatgcatttatcatacatatcttatcatttaatatctttacaactctgaaagacatttcttgttgaagaaactcaggcatagaaaacgtaagtaactttttgccagtgatcacacatatagatagtaaaggtatacctggaaaccagatactttttaatactgttttagaacccaaactcttaacaattttgttgtaactacctgtctcacaaagagaaactctggtctctagtacttgactttgaccagtaaagaacaaatgatttataaaaatgaactgacagaaaatttgaatgaaagtgagtatgtcatggtaacattataagagaaagcgctcaaggcttttgaaagcatatttttaaaaggttgaagttctgaaaaagaagatacatcaacaggaatgagaaattttaagaaagaattttgatagaaaaaatgaaaatggtcctaaagaagcagaataggaggaatacttcaaagaaacagctgtgggctcaggctgtgatttcatgtgtaagaaaacatcttttttttaattttatttctgaagttatgtctcatttatacaaactctcttgcctcacaacttagcttatagcatgaaacatgtcttatagggcagtgcccagcccatcacattagatgttaaggatggagcaggctgcatctgcgcagcatccaacttcttccgtctgtccccctacaagattctctactgaaggagtatccatgattttcatgtcagtagattgtcttcacttccaacaaattggatcatataagaatgtgttatagacttacagcaaattacaaagtagcatttctcatccttgaaaaagaccaactcctcccaaggaattccatgagggagtcatgaatagagtgtatcaaaatgggtatcatcttcttcaaatcatattcagctggattaaacgtgaagcgagacaaatgctcaggttgtcaggctgatatttgtatatatttatcaattgtctgctttctctgtcccattatggaaaaagttaaaatttttttcattatggttgcatataattaatataaaaagatcaaatgtttatgtttcctgtggagatcttaaaaaaacacccacttgtttattttttaatgaggagatgaatggatgctatatccttaggagtttaagtttagattttgagtaaattaaagcaaatatactttagattcagaaatatatactttatctgggtttcaggtccaacttagttgtcacagagtatatccaatgtcaaccttgctatgatcactacaacagaatttcatatattttcacgatcatttcactgtctgttcctatttcccaccacattggattgtcagagttgccacagagtaaacaacagtgggtttttcctgtgaatttcctcaatttgtagtagattttacatccctggaatagggattatataaagagcatttctgctttcctacttcctacatttttgacattgaagagggaaaaaggatgttggtcatttggggtaatctcatttatcaaaaccttacaaatttctctgcacatttctcttcatcatttctatgtagctgaaatgagaacccaaaacagaggtttgtggactttgcctaactaatttagaaacagaaatagggaattttaaaaacagtgtgaaaactttaaatgaaaactcccaggctgtgcaaacaaaggcgaggcgcctaagggctttttgaagaattcttattaaaaaaaaacactattttacattgcaaagcagatgtgtcagaaaacaacagcagatttgtaattcgagaatttgtggattgataggacagaaggcagcccccgtggctccccacggaaaactttttgttttctgccatcaagagttctgcttttagggaagttgccggaaaacaccttaatcttcttaccacatgtggtcatacttctcagatattttgagacagtattaatgttggacatactagtaaaactactgcctttgctctgtgaaataatgaaatgggcactgtcttcttgaatattaatctgaagctaaagtagaagaaaagctttaactttacaaatttaaacttaaccatatttgctaacaattattttggctcttcagaataattgcaaaaacgtgtttcttttgaatgtcattaaaaaatttatagaattattgtgtaaaaaaacttttgatagattattctaatgtataacactactcactgtcaagaaatctcctttatatctaatataaatctttcatgctgtgttaggttgtaaccattttcctcttaattatctttgttaaaagagagtttggttgtcagtcatatatatatatatttgtatttatatttatttttattataatatttatatttatatctttatatctttatatatatttatttatatatattatgtatatatattatataatatatattttatatattatataatatataatatatattatatattatatattatatattatatattatatatattatatataatatattatatttatataatatatattatattattattatatattatattatatatatacatatataatatatatttatatatgtatatatacatatatatttatatgaacatatatatttatatatgtatatataaatatatatttatatatatttatatatatttatatataaatataaatatatatttatatatgtatatataaatatatatatataaatttatattatatatatttatatatatattatattatattatatatatatatatatatatatatatatatattaccagtcattccattttgggtaatgctgtattaaaagatgtaaatcagtagtacagtatacagggtttccagtttgcgttctacctctaactaccactgttcagcctagggcaaatcactaaaccttccagagcctcagttttctcatttgtaaactgaaaattgaatattgaatttgtaaactgaaaattgaaatagcagccccccaccttaggtgtgttatgaggattgagatgatttttgtaatgtgctgactacaacctacaactttttggcagattttagtagctttattagtactttcattatcaccatttttgttatctattgatcggctttttggcaagtttgtccattcaacatgactccaacctgaaaagcaaaggggaacaaaattctgaaaactctagtaattctgtagatctaaagtttatcactaattcaagtaaataaaaagatagagactgtcttatattctaccaacccatatgacggcagccaaatgttgtaacttagcaatgtgagtactgtgtcatgtgacatgaaaggtcacatgtacagctgttctgtgacatctgcccagcggctatgatattcatacattccacatgggtgatgaatgatgatgagtggattgatcagtacagaagtaattctagttgtttagtattctattttagaatgctgggaaatgttctgtgaagttttccattaaaaaataaacaatttggaacataccattgaaaagtaagctaccagaataatctcttagccagagtggctcattccctaataaattcctgataaaagattttgttatgtagaaaattcttttaaaatatgcctcaaaaaattaggtgtaatgaaatttacttcccagtaatttaattctttgaggttttatatatgcccttgttcacccaacatctattaaaagtttgttatttatgtgctaaatacaagatattctgggatataaggataaataagacagagtttttaatcttcaggttaagatctttgtagaaataataggcatattcaggtgaatattcacctgaatatattcacctgaatattcaggcatgttcagatagtaaaaacgatgtgatttttatggcatttgagctgggcactaagactcaccaagctttgggcataatcataatggatatcctttatcaagtgccttttctgggcacacactttatgtacattacttttcatctttaccaatcccctggaagctaggtagtattaacctcattttgcaagtgaggaaaccgaggttcagaaggttaagcttgcctgaaattgcttagctacccaaactgtcttactctaatacttacttctattaatgccatgttatttcttgctgttagggaatggaggtgagttagagtgagtgagagggcacattatgaagacagaatataggtacacagaattgtgaaagtaaatggtcattggatctagagaagattaattatctttgacttagttgtgtgaggaggtggtaagactatagatgggattaagactaaggaatttagactttggcctatagtcatttggtagccactgttacactacagcatggataacttggtatccatgagtagaatattgatggaaaaggagataagaaacagagaaacaagtgaaaaaactactagaataggttattggagatgaactggagaactggcataacaatgaaaaggaggaagcacacaaataaactggtcatacacttggcaagttgatgtgacaacttgatggaggagtgtccgggagatttcgaagtattgattatagtgactgggggaagatctgtgctattggaattgagaaacagatttgctgatataaagatggtgaattcaacgttgtatatattgagtcagagatgagtcagagcctcgtttagatggagctgacctgcaggaagtgtgatttgttatattgacctgcatttgcagaaggtttggttggatttgccctttcgtttgacatacttgatactgctcaaattatttttttcaaataaatataattgtttcttatcatttattactgattgataaaaactgagtgcaaaatttgtaaaaccatcagatcttttcaactctttatttctgggtaagcaggagtatattgaattactcttctctttgtcttctcagagttcaataacataattgcttttggtcactttggatagagaatcatgagatgaagtactgtatgttgataagacagtgtggtgtagtgcctaagaaaactgactttgatgtcagacagagctgtttcaataccatgtcttctgataaccagtggctgctgttaataaagttgcttgacctttgccacctcatttttttctcttactggtcaagtagggggagtaatttcagtcatgttacattgttgtgagaattaaatgaggtattgtgtgtaagatacttggcaaaattcttgagctatagtaagcactaaataaatgattgttgttattatttttaatttgtgtgttcacaaaatgatattgttctttcattaacctatatgtaatgtctttaattttctgtagagccagagctctgccacaaattgtaatccagctcaacttcagtatttttaggagtatcatatgatgtttactttatgtcaacttagtgttttgtgttttttgattaacagttgctttctctagtactaactaccttactatgctgtactgagtgccaaaattcttcttagaaacattgctaagaatattagatccaagtacttttctatgtgtgcacttctgttgtatgttttgagggtcttctgcacttttggcctaataggaggtgaattacagaactttcttacctctgtaaggtttatatcattaccagctatctatagaggtgcttctgtgagtgattagaaaagataggctttcccctgtgggggtggctgggaaaagtgtaaattactattacaggtttattctttttttttttttttttccagaaattagtcagccctgtatcatgagattcaaaaaattaactttgaagatattgaaaaagaaagccttcctactatgttatttttcaataaatgatgtctcaaatccatttacaaaaagaaatgatatgctttccttaagtttggttgttttgttcttactatatttgactcaatgttgtctacgaatttatttttattagtaagtgttctcatgaaactagttataaaatatttttctctgtgtttggaagatttctgtttatcagtactattaaatgtggtactttaaaacattttgtaaaaataacagtgagaacttcatataggatatctagttataattctttttaattaaggtgagctcactagctgcacaaatgatattcatacattccacatgggtgatgaatgatggtaagtggattgatcagtacagaattaattctgattgtttagtgttgtattttagaatgctgggaaatgtttaaatacttggccctccttcagtaaattcatattttcttgcctgttgttccaaactggaatcttggtcctgtttcttaaatagccatgaaatgaaaattgtagaagttcttccttatttcttccttggtcacacactaaaatttacctataattagtgggcatcaagagaagaaataacattttagcacctcttctctcctgtatattttcatgtgtccatggaaatatagtcctcatttgaaattcagtccctagttgggaatgtgcttcctgttcctgtcatcagctcttgagttcatgagtctggcctgtacctctaaatttatttacatttagagagctgatttatctgttttggacacccacctatttcaaatccagtgcaaatctgccttattgactaactactgacaccttgagcagaccaagtcatctatgagtaaaagatgggtctattcaaagctactatatttcatttttataatatcaaaacttattttataatacggaatccttaagtgcatattataattattttccattaattgaagagggaacttctgtctcatgctgtgagaatggaattaaaagagacagtgggacagtagaatgcccaggattgagtgataaattctgttggaaacaaaagacaaggagaagacaaggggtggggggtgagtgaactcaaaacaattcataagtttttgaaaattcttgtattattaactaaaatagaaaaatcagacaaaaatgtcaactacatttccactgtagacaggttcattctcttttcagttttagacagtcgattttgttttaatgaaagaatagaattagaacttttcagaactggaagggtatctatgaaataaaaactttagaaatcttcccatccaaatctgttatctgatagctggggaaactacagtagagaggtgtttacctgagattgttagagcactatggcagcagaatcagaatttagaagcaaagagaaaaaacttcatgaaattgttagaaatgtggtactagagtcattcactgcattagtagttagtagaataggattagtcaacattgacaaaatagatccatttcttcaggaatagatggtattcagaaatttcttagaagagtctcaaatatttcagttgcatcacaacttgtggctatttttcactgaaaataattttatttctctgatctgtaactcattttgagatgaaaatgcatatgactcagtgaactccacttgctgatagcgtattttgttcttccagtaaacactgggctactcatataaaacttatttgaagagtgaggaataagagtttccagcatttgaaactcagaacctgtaagttattttcttgtctctcttttctgagatttgataccacagatcctgagtgaatcagtattatgtacaaccatcaaaatttttaatgctttctctttgcaagttttatataaattatttatcttttatgaataaatttttttcctaagctctccctccaggtttgtcttcagagcctatttaaattttccattgcagggtggctgtagcaacactcctgttctgcctcttcctgtggctatcaggtgaatccttctttttatccctgagtcctgttgggatagctggctgacgtcatgaggcgtgggctgatgttctggtcagttcagagtatgggatagggtaagggagagtttcatgtgttataatgtggtacagggggaagaacataaacttaggagtcagacttgggttccagtcttagccactttctagatgtgtatcttggtcaacttatgtcacctgttcagactcttagattctctaacattaagtcctagagatcaagtgaggatcatgtgagagagaacataggtaaagtgtggaatatattccctgcacatctctctgcccttcccatgtataaggtcacacctactcctctgtttcactttatcaactttaatcgccactcacaggcatctaaactgacctctttttgttgctacctcaatttctgatgctttgagggattattaaagtatatgactcaatttgctattgtatggataatccacataccactaccatgttttgtcagtgtgttcttccatctcttccctcatgactaacttaattcaattcaataactttttacaatgtaagtcctagtcattttcagcaactttttgcaatgtaagtctagtccttttatagaacttgggatactcatgaccctttcctgctgcttatgggtaggtttcacctgctctgttttgtttacattttttttgtgtgtgtttgttatgttttatttagtggctgttattcagcattagcactgtggaagagggctgttatgatcaataacaatcagctattcatatcattatatgtaatctttgagtacttgactctgattgaaaacctgtttctcttcatgcttgtaagtatttcttttatatgtcctgaatgtgcgggttgggttgagggtgcattacttctaactgtaggtagatgattaatatgcaggtaagcgttaatgtgttaatagattttttgtgtgtgttctaaaaagagagagtatgtcttagatgtatttgtcagaaaaaaagttagtataagattttacagtttagcacaaataatatacccagagctaacttgtgtcgggttcaaaaagccttctagttattaccaaaaagattacattagaattttgacccttcaaaaatatagtccttaggtgatagagcctttctcctcccagttgatgaagtatcactccacgaaacatgcctttggggtctagttgtgtggcctgtattaatgaagtacagtaaacccccacttaacattatcagtaggttcttggaaactgtgactttaagtgaaacaacatacagctggtcctcaaataataccattttattcaatgttgttttgttttaaagttgatgagggaaaaaaatgattttgtgtattgtttcacttaaaattgtactttccaagaacctattgaagccgttaagtgaggacttagtgtatgactgtatgcatcccctcaaatacatactgtgattggtttttctgccttaagtaaaagccagtcaaaccacaatcataaccaggttggtaaaatatagctcatagcagtggtttttctatgttaagtggacatcataatcacctggagagctttaaaaagtcctgatctctgagtctgttaagtcagaatatctggggttggaaccaggtgtttgtttgtttgtttcttgttgttattgtttttttttttaagttcacaagttattctactgtgaaaccaaggttgagagccactgactgaaagcagttctaccaaattacaaactgtggaaggtccacataccttcagtagcctctcttggttgcatcatgacaccattttcagtattgccaaaattatattcctgtctgcaagtgtcctcaggcaatctatagtaaaaaattatgtctccaagaaaatgaatttgtataattttctggctatcctgatgaaaaataagaaaatgttaaaaattgtatttatccttgatctctttctccatacgtgttggcattcctccatttcccattgacttaacgttcaatttttctcttcactgtttttcttgggtgacattgggaatttttaccatctgataaggcagatgtattttcaaataaaaatgtcttaagcatttgttcttcctactattcctttctttggcagaatattcatatagttgataaatagtttgctttctttaaataccttttcatataatctttgtagcatgtttcatgggtattttaacctagttttatggtttttcatgaaataaggtattttctaaatatgttatgctgaatttaactgaaataagcagttgtactgtatgtctttaaaatgatgatgatatcttgcattttagggtaacactttcatcctgaaagattccaaagcacactgagaatggttacaaattatacagtgcagcacagtcaccattgtagagtgaagcatggcagctgtttaacagctcatcacaacactacacagcaggttagggtacgaagtgaaggataatagtggattcacttgaaaaaattgctagggggttgaggtaagcagaatgtaattacctaagttggaatttatccaggacataaggctaacacctccagtcttagaagagaagctctgattctttaataaccatgtattacatgctatgtaactaaaatgtaagggtgcttctagcctcttcaaatcataaatgtatgctcagtgttccagttgagacttaaaaagaaaaaaaaaagccttcttttaaaaaaactcacatgttcatactaactcggggatgataggcttctatttgcatggcatttttggctcttaatggctggagcttgtcgaggattctaagatgttcagaattaaaaacgaattctatgatagattagtaatgtctgccatgggcatggcaaaagtagtgcttatacctgtgctatattttctagctccaagacttggctgctagtttcctgggatgacttagcaatactctgaattcttttcaaacctttggattaattttaattactcttccagacatatgtaagttttcctaagaaaagtttaggggaaaagaacattgaccgttttttagtaactgtcattgttggggttagagataaaaagatataaccttatgtcaaaaatttcaatgcaaaaatgtctagcaaaggaagcaaatggtgtcagattgggttttcatttggaaaaataaatcaacatctgagagaagcaaatggtaattaagtttaggaacacaaggtagcagaaacctgttactaaatcaaggtgagaactgaacaccggaatttggtttgtttgaggaataaactttggtacatagaataatagggccctggctctgaaacctgcaccagggatagctcccagtgatggtggcttctccatggctcttcagttctttcccattcagactgaccctctatctagagcttccactctgtggcttagtaatgcctataaaatcaggaaaatggaccctttcatcctgctaatgttaatattagaaataagtttataagcgaggtactgtaaaattcattttgcatatcttatttaattcgtatgacctaatatgttaggtattataactcacatttacatatgagaagataaagttaagtaatttgcctgtagtcccatttcaaatgaatgatgacaccataagttaaactttgatgtgtctggcttcaaagcgtgtgttcttaataactgtaccacaaagttacatgagactgagatcactggtatggcacttgcttcttataaactaaagtggctataggaacattctgggggtttaaagcatagttgaggaggaaatttagaacgcttctactagcagtctagggtgtggataatttgtatgttcttctgtcttccagaatcattatggatagagttgttagaactcagagacagtttcttgtagtccttttgataggatccaagttatttgactagaaaacaatgttttagtttgtttagagggaattcctgtattcttacaagtttggttaaagtaatctgtaaattactttaaacttgtgatattttgattctagatcctatatctttgtcttattccctattttatttcctcttattacgcactggtatcaatgggtgtaaaagatcttcttgcactctaatttagagaatatgaaaccataagcttgcttttagttggatctatgactctaagattaaaaagacaaggactgaaaaattatggatcatatttcaatctatagtgctgtgttcttacttttctgagaagttggttttccttatattcttagatatatccaaagaggaactctaaaccaaaaaagattagttgtccgacttaaaacagccttggtctaagtaatcatctaaagttctaagtaggatgataaaatcatcttttcatttgatgatgggccatgtggaaaaaacaaactttatttagttatctgtgttataaaataattttcatacctatatatcaggaatagatactcaagtttacacctgtggtctggtaagtcaagtttatgcctgaagcacgctcaaatgttcaggttataagactccaaaaaatgccttagagtgaaaaaggactgacagacttttaatcatggtaatgctactgtcacttttgaagtctgtgtaagttatctattactgtacctttatgacagaaaaagtaatattctaagaacaatatgtgataatatgattgggaaaatttggtatagtatggtatggtgagtagctggacactgtttttccatggcttgtagttaagatataatgatagtgtatcaaattctacttatatggcttttaaatccttatagataggtaatttaacaatttttaaaaagtaattgataagtaatctaattatatggtgtgtaaaaagacatataaatcatttattatgcaggtcatatttgtctttcttttataggatattattgttaagaggggtgcgtgtgtgtatgtgtgtgtccatgtgtctgcacgtgtgtgcaccttcattttgggtactttgaggcagttctattgcctttcacattgggcttgcaaccccagctgcatatgagaatcttgtggaagtttcaaaaatctttatgcccaggtagcaacctagacaaaataaatctgaatttccaataatagaactgagatatcaatacatctttaagcttcccaggttaaggaccactgataaaatacgtgaatacttagtaaagtatttacagcttgtacacatgtagataattgcatggagaagatgaacgaaaattttccttctcctaatacagaggagagttttttggagggttgtggtaggttgcttattgaaatagggtgaccagatagaacataatactgtaaaactttaggctgaaagagactttcatttagtatcctttccattagcagtgacttaagtgaaacacctgaagaaagatgtaaaacacccgcaattcacctggccatttgtgcagtgttttttcttgactccagctgctagccaacttatgacctgaatcttgatgattaatagctcttataatattttcttagctagtgtaacttcaatagcaatactttttcttctaatgtcttacccttataaaatagcactaaactatttttctcaataaattctactgacacatggtcccatagattaattataaattgcatagaagtactgccctttgtcagttttaaatgtgtagctttatcttctctttctccttgtctttccaagctaaatggaattagaagcttaaagaaacctgatttacatggaatctatttctgttctcttattttaaacaatagtgccattaattttaattctaggctctttggttcctctactattttcattattattgtaattaaaaaagagtcatctctatttttacaaatccctttattttacaacactgtataaacatatttttagggaataattttttcctcaaatgctgttattttttacctactgggctctctccataaattgaattaggaataccaaataacttttattcatcaccatcatcttttttttaaaggtgaagatgaagggggaatgagtatcaaaaaggacttagacaattatggaaataaatattgggcctctttggcatgggtatttgaaaacaccccaaagtagatggaatgagtaactttagggcttcatgctggcacagccccgcaaatatttccttacaggattttatagacatttcacaataaatgtattttgttaaaatggtcttaggtcctataaagcagagtctgtattctaggaggaattcttttggagttatttaatagtattcctttcacagtgcctcccttcttcatacttttgttcccattgcaatggtagtgtctttgaccagagggtagtgtatggtagatgcacctgacagcaacaacttaagcataccctgagaatgactgtatggcagacatactgaatgtgttcagcgttctgagctaaggagtctgggagtggccaacccagaaattcattccttatcagtgaagaacatctgagcccctggtctgtccctcatgtacaggggatcaaggccctttgtcttgggttaaatgaagtttgccaggtggaggtagttagtgggaagatgctaaatgaaaatgctatataaactgcatactgtgcgagggtagtgattctcctgaccagtgtgccgccaccagaccagtgcttctcctgcccagtccactatccctagactctcccctctgtatgtaagcccctggtaaaaccccatgtctcattcaatggctctgagtctcttcttcaaccccttgaacatagtgccatccccattggccttgataggggtttggcacaacaggtaaagacagcttacactgagtcttagctgttccctttaaatgattgaaaggaaagaaaatatggtcttcaatggttatatttaaatatggaaactattattactgagatgctgatcccgttaccctttgaaacagggcaaggtagtatcagaaaatgtagagaaagtgagttggtttggatgtaacgaagatgaaacactattataatcaataaaaggcagagccagttttgtttgtttttttgttttgttttgttttcggtttaggcagctcttgaaatggtatgatttaaggggtagctcagaagtttcaaactctcctccaagcatctccctaatacttcctgaagttctgtcaccagttaagaagcagttcttaccgaaatccctttttatagttgaaggttgccagataactcctgaaattatatataaaatttcgtgggaatgtgtgtaaatgtgtgtgctttttgagaagattcataactgtcatcatagctttatgtatccataaagatattcttaaaagcagatgtccatcatataattttagcttataatttattcatagttatttccttctggttatcttacaaagatgaggaattaacctctagatccaaaactataacttggatgttctgacccccaaatcttttgttctttcccaggaacccagaaggtgagggagtttagagtaaagggtaatacagatattggggcagttggacttgagtgaggcactacagattttaagtacctacctagaggctagcatgatggtagtaggtatggaaggctcagcaagtgaggtgggtcagaagatagaaaaggtgacgtgcataagaaggttgaaaggcagcaaagtcttaagatatttttcacaacttttagatcatctcatactaggggaaattggaattgcattcccaatagatatttattatataccacaaatctcatattttttcttttgcattctttcataaaatttctgaagatttatcatgacttctttccaacccttcactatctctgctctctaatatcctaatgatatataataacagtaactttgtcacattactgcctttaaaactattcaataccacttcagtttatgaattaattttatattttaacactgtagtttctagggcaggtgttagttttttttgttttttgttttgttttgttttgtttttaatatgggcaaacgcagggtgcttatattctagaggcacaggatctagtgaagaaaaaagaagagaagagtatgaacagcaagagcactcagctttagacagtagactccttatatttgtgattttctttgtttcttgagacagccccatgaagcaggtactctgtcttattttacagtagaaaatccaaagtgtagaaatcctaagcaccttgccagaggtcctacaggcagtcagatggcaaggctggcctctggccttggcccttggattggagaaccttcacatttcaccagtcttctggttttgcttccctggtcattgtaccatgtaatgtgcacaatctgtatgaggtacaccagaagtagagttaggacagggattgcagagaagacgacattggagctgtgccttggaggatggaaaagagttcctttgcctatctaacaggagcaggaaggtattttcatctcagggaatactctaagacatggcctgacttgtattttagaaaggcaatagttcctcatagcagtagcttggggtgtgactatctcagggtttgtgcacatggttagtgcaaagttagaaatcagattcacgtaatctgaattccttgctgcctctcaatacctcttaattttaattctttgtagttatgtaaacaaatgaactctgggaattaatcctgcattaattaggaattaattttcttcctgaaccctaaacctaacccatagttcctactattcatctatctggtctcttgcccagacattaccagccctgtatttaaacattaagattcttacctagtgtataattgcaaggattaatctgtgaaacctttatttgggccaacaaggcatccagaccctgagtaagttctggggacccaaagttgctgagtcctttgctacccaggaattttcacgatccatatttttaaattttatttatttatttatttattttgagatgaagtcttgctctgtcgcccaggctggagtgcagtggtgcgatctcggctcactgcaagcttcgcctcccaggttcacaccattctcctgcctcagcctcccaagtagctgggactacaggcatccgccaccatgcccggctaattttttgtatttttagcagagacggggtttccatgttagccaggatggtcttgatctcgtgacctcgtgatccacccacctcggcctcccaaagtgctgggattacaggcgtgagccactgcgcctggcccacaatccgtatttctatggctaatgcaaattcaacatcatagagcatagtttttgccaaacttgaaaaattgatatttgtgtttttatgaatgtttgtttacagccggaactggtataagacatatcctgtgttttaaaaatatttttagtttttaatctcggtaatagccagagagatacttagctttttggaatatggataaatctttacattcaacagttcatagttgaattttaaggtggaactcataaggggaactgattgatgtagtagttgcttactgtaacttttcagatgccatggcatttttatagcatgctacagagttgaagacagatgagaaaatattagttgatactacttgctgatacaaatgttgaaagacaataacacatttcaagtcatatgaaataccagattgttaggagacaggtgttgttttaaaaatgttagtgtactgcacggtggctcatgcttgtaatcccagcactttgggaggccgaggtgggcagatcacaaggtcaggagattgagaccatcctggctaacacgttgaaaccccctctctactaaaaatacaaaaaaattagccgggcgtggtggcgggcacctgtagtcccagctacttgggaggctgaggcaggagaatggtgtgaacccaggaggtggagcttatagcgagccaagagggcgccactgcactccagcctgggcaacagagtgagactctgtctcaaaaataaataaataaataaatgaataaataaattagtatactataggttttagataaatctcaagtactttaaaatacttcacattatatatgcattaacattttatgtatatgcatggaaaattgacatttgaaactcacattttacacagaaaacactaacttatcaacctgtcaaataaaaactcagctcacactgacctatttaaaagtcaaagtcagttatttatcataaggcaaacaagacactagcaaaagaattacaatgtttatcactcaaactttagtattttatgctatttaatgatgtaattatttattattgttagaaacttaatgtgcttagaaaattatgcattgccgtgttaatttcggagtctgaaagtttttatgttttataattttttcctagaggagttatatgggctgagttatgaagattaaaaaataagaaaagggactcacagataagagagctaggaaatggctagagttgacagactgaggaagtggaaatggaaaaatgaggtattgatgatttcacttggtgcttctgtgaggttgaatttgaaaaaaggagaggatatgagctgtgtggatcaggtgctagctgattacatgaaagtggaaaatgctaatctactgtcagcgtgaaaacagtgcagatcggagtgaagaacatttgctggagagtcaggataggtaggccctgctcacctgttaaatatatagaaggaaggaatgggcatttattactgactgtcaggtggtatgcggggtgctgtccataggagaacttcttttaaatagagaccggtattcaccaggcttcacttttttgacatttactcactgactgcttcacatgagatcttgaaaactattctagagtgtgctggtagtccctagagtgacaaaaccccaaaaacccaggaccctcaatagcatagaccatttgggaataaactttgaaggcagccctgaatctcaagtaagacctgagctcttgttctgactcgctgctctaaactacagttgggctcccttttcttatctgtaaaacggaaacaataatgttttccctattagcctcatgggattgtaatttgtatgaaagggatttaaaaattatgaagaaatgcacaatctacagtgatatgaagatacaaaaaatcaggagtagattgctcgagtatatttctcttgcatgtgctctctctctcaggttgagtggaacagctgaaatggttctgttttagctcatttgaacccacttcatagacatagggtatggcagtccactggtccttgaaggcattgtgtacgggagttctatttttgtaatctattgcctgtgaataagccccacattttaagatgtgcacagattacataaatttactaatggaaaaacatttttagaagggtagaaacaaaccatgatctggaactacatctgaatggtggaattaggatgattaaaaaatgtgttttctaccacacacacacacacatgcacacacacacacccctcacataaatctactcccccccacccccccaccccaacacacacataaaaatctcatatggaaactttattttggcaactcacagtttgccttacttgctgggttaaggttgactaatatataagcaaatacagatttttttttaaatttactagtagataaaacacttggcagaaattgctgacaccatagaatgttatggtgtacatatttatgtaaagagctgtgttttgcatggatatattttactaattcaacgtactactcatacaacttattactcactctccctggacagttactcaggagatttctgctcttccctgcttggtagtagcaactagaagaaacagacttgcagggtaatacattttatctccctgcctgtgagttactgcagttcctgatttcttttgccctgccctggagcagtttgccctgccatctctagtgaaagaatttctctgaataccatttgcttgcatttattattaaacttttgctcaactttgaccatgtagtattgtaacacacaaatcctggagaaagacatgatagccactcagttatgacctgtgtataacagagaagacaaataagacaaaagtgctgcagaaaggaatggcacaggtaagaaattattggtcccatgtttctgttgttttcattattttttccagtgacattgccaccaagcactttgaatgaacaaaaaagtgcttggagaaaacaaaaatagtgataatgaccaaaacataggtgtgtgaaaccacagggagcgatgtcctggtggatcatcactcttccaactgccaaactggcccttgcctacatttagtagtaagtgtgaaagaagtagaaacaaatgatgccacagttaattttttgggaggcaacctcactaggaaagaggagccttgaatggttttacagagaatcaagattggccaactttcatataaatttgtatgcaattttggctgtacaaaaccttgcttaaacttagccagagcattcttactttgaatcactaagaaagagacaaccaccgtagagatttcagtttttgttgttgttgttgttgttgttgttgttgtttttagacagggtctcgctctgtcacccaggctggagttccgtggtgtgatctcggcttactgcaacctccgcctcctgggttcaagcaattcttgtgcctcagcctccagagtagctgggagtacagttgtgtgccaccacagctggctaatttttttgtatttttagtagagagggggtttcacaatgttggccaggctagtctcaaactcctgacttaaagtgatccacccaccttgacctcccaaagtgctgggattacaatcatgagtcaccatgcctggcctgaattttcagatttttaaaactgctgtgaattccaatgattgattctgccttaacatatgcctgcagtatgttctggtgtattttgattcagagacctctgggatacaaatgccattttattaacctatcttctagttgctcatctaagctttgttctaataacaagtccgttatacaatatctcagaaggatatttaagctgaaatctaagtgcaacctcttgttttgttttgttttgttttgttttgttttgttttgtagtgtgggcactactcatgtgcatacaacacactcccataaaactcaaattttgtatttatagggaaatttctcctgagagttaaggtcttgtaaaacacgctcttgttctacagcatgagcaaattattatactcaagggcattgaaagtgaagtgtactgaagaaaagaattttttcattaaattacagtttatattgataaaacagattactagcatttgatgaaatgtgtaacttggagcaccccatatcactaaatcgccagtaggtttattttggcaagtggagccagcatgtatgtgacatataaggggccagacagtatacctgatagcactgcattagattaaattgtcttttggtaaagtcgtttaaaaacggaaaaaaagtatggtgtctgtgccttgacaagcaggctgtagtaactaagattattagaaaataaaagctgttgtgttatcagttttggcacagtcatttatcaatcagtattttaaacattgacaagtggtaatttaatagggaatgacccagttggcaggaagttctaatgacagatgatgcaaactcatttatcattaaggggctctgctgagcttcttacctttctctgtatcacagctcatattttctaagtctgggatgtgagaagccacaaagggcaaatcctgtggcaccaagcctgaaaccctctcccaagtagagaagaacattaacactttaggggcactcatctttgaaaatactactccacattgatgtttttcaatttaaaacataggtgagaactatgtgttgtggtctactatttacctagatttttatttaaagaaaaagtgaggcagataaaattttgaatgaagtgcagacagaggtgctttagaaattattaaggcaatgaaaaaggcaaacagattctgatgagaaatccactgttcaaactgttttcctctctgcagttaataaatcttgtctctgcctgctttcaagaatttttctgtctttagttttcagaagtctgaatatgatgtgtgttggcatggattctgggggatttacctggtttagagttttctcagtttcttcaatctacagatcttggcttttgccaaatttgggaaattttcagccagcatttctttgaatattttttcatcatcaccttcttctgttcttctgggagtgtaatgacacaaatgttagagcttttgttatagtcccatacatttctgaaacattggtcatttttcccccatctttttttttttccactgttgttcaaattggctaatttttcttgttctctgttcagggtcaccgattctttttgttatctcctccattctacagttgagctcattcattgtgtatattctactttttagttctaaaatttctatttggtttgtctttacttatcctttcttattttttttccctctttttttctgaaactttctgtttcacttgtttcagatatgtttatttcttgaatcattttatgttggctgcttgaattcgttgtgattctctcatctaggtaatcttagttggcatctgtcgattgccttttctaattcagtttggtattgtggttcttcgtatgatgagtgattgtctattgaaatctggacatttgggatcttatgttatgagactctggatcctacttaaatcttgggttttgagggtttttttacaggcctcctttgatatgtattgctctgatgtgtgaagggggtgctgccttattattgtgagatgggggtggacgtctgagttcttctgtaggcctttactgaccagagtcaaggggttggctccttgggaacttattaccactgagctatggtaaaagtctcaactctccattaagtcctctctgacatcgcccactggaaaaagggagggatacctcattactgcctggttggaatggaagtcccagttctcagtctgtgccttctttggcactggtgggggtggagaaataccttgatacagcacggcaaagctggaaatctaggttctctgcttaggcctttgctggaagggttagggcgtggttttcgccatggtgttgggcagagtagaagtgtttagataataactaaagctttctgtcttgctgttaccatccctttgcttgtcctttggctagagagaatagatttttctaggggctgttctttggctttgcccattgatgtttccaggttgctgacttctttaatatccagcctgggctgtatcagtcagaaagaaagccagggaactaattactgtatcattccttaggttcaaagttctctagctaatctgccttcttgtctccacttattagaattttctcatgtttgatttttatagataatgtccagtgtttttcgttgttacttagtgggagaaagagagacaagtacatctgtattatttccctcagttagattctgtagttggagctcttggtacttgtgtctcaaaatatagcagactttctagatattttgtgtcatttgttaaattgcttaactattttgaactggaaagctttgtgcaagaatcctagggattattcttttcaacctagtgcaatattataccaatgtaatactttctaggaataaagaaccaattaggttattcttcatttaaacataattgacaaatagtaagcttttcatgtgttgacctctttaagatggaaagtgtattaacaaacccgagtaaaatacttcactccttagtgatgaatatttgggtagtttagaagatatccatcatgattattttgcttattggtacttatcattttgaaaacatttcattgttttttaagcaggccgagcatctgaattccagtagaattaatagaaactatataagagcggttcctctgtccagtattatatagcagggatccaactgtataacatgctgagaactcttaatgttggaagagagtcaggagagagagcaagaaagagatttaaagataacaaatgctggcctgcccagagaatgtctggcagtctgaatcaccagcttccggagatgtagggaactcacatctgatcaggcactctgtctgaagctggacagatgcagttataaggcttccaagtgtcagtgttcagaccagtggagtctagcagagttcccataggtctgtgtcagaaggaaattcagtcctaggaaaggggtctcaaaagatccatatgtgaacatcagtgctatcactaccttacctatgttttagagcccaatttactgctatagttgtatttggaaatgagttggagccagagatccatggaaaaggcctgttgggtggaatggccccagaggtgtgaacccggtgaaataagggtacaggggaagaaacagcagttaggatggttatagccagggcttctcatggacatgctctagatgtgggaatcaaagcctaccttcttaccttattcacttcacagatatatctcacttgggctctccatgggcctgccgtggttttgggtatgacaggctctcagtacgaagctgtagatgagccaggccatagagggtgcaaatttatgccaagaatcaatttggtacataacacagtagggtgaagaaactgctcttggctgattttctttggattttttgcacttttcctatattaatagagtcaaaagacaactgggaattttagggaattttcttaatgtaggaaatagttcccctaggaatccaagcaattgtattcacaataatgcgagtgcactggaaaggccctgatgtgagaatcagagacttaagatcaggtgccagagggagactgcaggcaagtgtccctacttcatctaagtaagatgggaaagatgatatcactcctgctgccttacatgatggttttgaatggaaataagttgcaaagagtttaaaagtgctacataatttcgtaatgtaagatttcattatatatttgcacaaggttttttttttttgggggggggtcgatttttctcttctgttatgtggagaagaatagtccttccttattaggaaactgaatataggagaacaagtccatgaatattgggacagtcctattatgtagttttatattatttatttatttattttttattttttataacactttaagttctagggtgcatgtgcacaacgtgcaggtttgttacatatgtatacatgtgccatgttggtgtgctgcacctattaactcgccatttacattaggtatatctcctaatgctatccttcccccctcccctcaccctatgacaggccccattgtgtgatgttccccttcctgtgtccaagtgttctcattgttcagttcccacctatgagtgagaacatgcggtgttcggttttttgtccttgcaatagtttgctgagaatgatggtttccagcttcatccatgtccctacaaaggacatgaactcatccttttttatggctgcatagtattccatggtatatatgtgccacattttcttaatccagtctatcattgttggacatctgggttggttccaagtctttgctattgtgaatagtgcctcaataaacatacgtgtgcatgtgtctttatagcagcgtgatttataatcctctgggtatatacccagtaatgggatggctgggtcaaatgctatttctagttctagatccttgaggaatcgccacactgtcttccacaatggttgaactagtttacagtcccaccaacagtgtaaaagtgttcctatttctccacatcctctccagcaccagttgtttcctgaccttttaatgatcaccattctaactggtgtgagatggtatctcactgtggttttgatttgcatttctctgatggccagtgatgatgatcattttttcatgtgtcttttggctgcataaatgtcttcttttgagaagtgtctgttcatatcctttgcctactttttggtggggttgttttttttttcttgtaaatttgagttattgtagattctggatattagccctttgtcagatgagtagattgcaaaaattttctcccattctgtaggttgcctgttcactctgatggtgatttcttttgctgtgcagaagctctttagtttaattagatcccatttgtcaattttggcttttgttgccattgcttttggtgttctgaacatgaagtccttgcccatgcctatgtcctgaatggtattgcctaggttttcttctagggtttttatggtttttaggtctaacatttaagtctttaatccatcttgaattaatttttgtgtaaggtataaggaagggatccagtttcagctttctacatatggctagccagttttcccagcaccatttattaaatagggaatcctttccccatttcttgtttttgtcaggtttgtcaaagatcagatggttgtagatgtgtggtattatttctgagggctctgttctattacattggtctatttctctgttttggtaccagtaccatgctgttttggttactgtagccttgtagtatagtttgaagtcaggtagcatgatgcctccagatttgttcttttggcataggattgtcttttggttccatacgaactttaaagtagttttttccaattctgtgaagaaagtcattggtagcttgatggggatggcattgaatctataaattaccttgggcagtacgaccattttcatgatgttgattcttcctatccatgagcatggaatgttcttccattagtttttgtcctcttttatttctttgagtagtggtttgtagtttttcttgaagaggtccttcacatcccttgtaagttggattcctaggtattttattctctttgaagcaattgtgaataggagttcactcatgatttggctctctgttagtctgttattggtgtataagcatgcttgtgatttttgcacattgattttgtatcctgagactttgctgaagttgcttatcagcttaaggagattttcggctgagatgatggggttttcttttttttttttttaattgagacagagtcttgctctgtcgcccaggctggagggcagtggcgagatctcggctcactccaagctccgcctcccaggttcatgctattctcctgcctcagcctctccagtagctgggactacaggcacctgccaccactctggctaattttttgtatttttagtagagacagggtttcaccatgttagccaaggtggtctccatttcctgacctcgggatctgcccgccttggtctcccaaagtgctgggattacaggcatgagcaactgtgcctggccggggttttctaaatatacaatcatgtcatctgcaaacaggaacaatttgacttcctcttttcctaattgaataccctttatttctttctcctgcctgattgccctggccagaacttccaacactatgttgaataggagtggtgagagagggtatccctatcttgtgccagttttcaaagggaatgcttccagtttttgcccattcagtatgatattggctgtgggtttgtcataaatagctcttatgattttgatatacatcccgtcaatacctaatttatcgagagtttttagcatgaagggctgttgaattttgtcaaaggccttttctgcatctattgagataatcatgtggtttgtgtctttggttctgtttatatgctggattacgtttattgatttgcgtatgttgaaccagctttgcatcccagggatgaagcccacttgatcatgggggataagacttttgatgtgctgctggattcggtttgccagtattttattgaggatttttgcatcaatgttcatcagggatattgacctaaaattctctttttttgttgtgtctctgtcaggctttggtatcaggatgatgctggcctcataaaatgagttagggaggaatacctctttttctattgcttagaatagtttcagaaggaatggtaccagctcctccttgtacctctggtagaattcggctgtgaatccatctggtcctggacttttttgggttggtaagctatgaattattgcctcaatttcagagcctgttattggtctattcagagattcaacttcttctggtttagtcttgagggggtgtatgtgtccaggaatttatccatttcttctagattttctagtttattttcatagagttgtttgtagtattctctgatggtagtttgtatttctgtgggatcggtggtgatatcccctttatcattttttattgtgtctatttgattcttctctcttcttctttattagtcttgctagcagtatatcaattttgttgatgttttcaaaaaaccatctcctgcattcattgattttttgaagggttttttgtgtctctatttccttcagttctgctctgatcttagttatttcttgccttctgccagcttttgaacgtgtttgctcttgcttctctcgttattttaattgtgatgttagggtgtcaattttagatctttcctgctttctcttgtgggcatttagtgctataagtttccctttacacactgctttaaatgtgtcccagagattctggtatgttgtgtctttgttctcattggtttcaaagaacatctttatttctgccttcattttgttatgtacccagtagtcattcaggagcaggttgttcagtttccatgtagtagagaggttttgagtgagtttcttaatcctgatttctagtttgattgcactgtggtctgagagacagtttgttataatttctgttcttttacatttgctgaggagagctttacttccaactctgtggtcaattttggaataagtgtgatatggtgctgagaagaatgtatattctgttgatttggggtggagagttctgtagatgtctattaggtccacttggtgcagagctgagttcaattgctggatatccttgttaactttctgtctcgttgatctgtctaatgttgacagtggggtgttaatgtcttccattattattgtgtgggagtctaagtctctttgtaggtctgtaaggatttgctttatgaatctgggtgctcctgtattgggtgcatatatgtttaggatagttagctcttcttgttgaattgatccctttaccattatgtaatagccttctttgtctcttttgatctttgtaggtttaaagtctgttttatcagagactaggattgcaacccctgcctttttttgttttccatttgcttggtagatcttcctccatccctttattttgagcctatgtgtgtctctgcatgtgagatgggtctcctgaatgcagcacactgatgggtcttgactctttgtccgatttgccagtctgtgtcttttaattggagcatttagcccatttacatttaaggttaatattgttatgtgtgaatttgatcctgtcattatgatgttagctggtgattttgcttgttagttgatgcagtttcttcctagcatcgatggtctttacaatttggcatgtttttgcagtggctgataccggttgttcctttccatgtatagtgcttccttcaggagctcttttagggcaggcctggtggtgacaaaatctctcagcatttgcttgtctgtaaaggattttatttctccttcacttatgaagcttagtttggctggatatgaaattctgggttgaaaattattttctttaaaaatgttgaatattggccccccactctcttctggattgtagagtttctgccaagagattcactgttagtctaatgggcttccctttgtggttaacctgacctttctctctggctgcccttaacattttttccttcatttcaactttggtgaatctgacaattatgtgtcttggagttactcttctcgaggagtatctttgtggcattctctatatttcctgaatttgaatgttgccctgtcttgctagattggggaagttctcctggataatatcctgcagagtgttttccaacttggttccattctccctgtcacttccaggtacaccaatcagatgtcgatttggtcttttcacatagtcttatatttcttggaggctttgctcatttcttttgattcatttttctctgaacttctcttctctcttcatttcattcatttgatcttcaatcactgataccctttcttccagttgattgaatcggctactgaaacgtgtgcattcatcacgtagttctcgtgccatggtttttagctgcatcaggtcatttaaggacttctctacactggttattctagttagccattcgtctaatcttttttcaagtttttagcttctttgcaatgggtttgaacttcctcctttagctcggagaagtttgatcatctgaagccttcttctctcagctcttcaaagtcattctccgtccagctttgctctgttgctggcgaggagctgcgttcctttggagggggagaggcgctctgatttttagaattttcagcttttctgctctgtttttcccatctctgtggttttatctaccttcgatctttgatgatggtaatgtacaggtggtgttttgctgtggatgtcctttctgtttgttagttttccttctaacagtcaggaccctcagctgcaggtcggttggagtttgctggaggtccactccagaccctgtttgccttggtatcagcagtggaggctgcagagcagcgaatattgctgaacagcaaaggttgctgcctgatcgttcccctggaagcttcgtctcagagggttacctggccatgtgaggtgtcagtctgcccctactggggggtgcctcccagttaggctactcggggatcagggacccacttgaggaggcagtctgtccgttctcagatctcaaactccatggttggagaaccactactctcttcaaagctgttagacagggacatttatgtctgcagaggtttcttctgccttttgtttggctatgccctgcccccagaggtggagtctacagaggcaggcaggcctccttgagctgccttgggctccacccagttcgagcttcctggctgctttgtttaccttgtcaagcctcagcaattgtgggcgcccctcccccagcctcactgccaccttacagtttgatctcagactgctgtgctagcaatgagcaaggctccgtgagcgtgggaccctccaagccaggcgcaggatataatctcctggtgtgccgtttgctaagacctttggaaaagtgcagcgttagggtgggagtgacccgattttccaggtgccatccatcaccgcttcccttggctaggaaagggaattccctgaccccttgcacttcccaggtgaggggatgcctcgccctgcttcggctcatgcttggtgggctgcacccactgttctgcccccactgtccgacaagccccagttagatgaacccagtacctcagttggaaatgcagaaatcacccatcttctgcattgctcacgctgggagctgtagactggacctattcctatttggccatcttggaaccgccaccgcccctcccccggctttatttatttattttttgagatggagtcttgctctgttgcccagactggagtgcagtggtgctgtcttggctcactgcaacccctgcttcccaggttcaagcatttctcgtgcctcagcctcctgagtcactgggattacaggtgtgcaccaccacacctggctaattttttaatttttagtagagacagggttttgccatgttggccaggctgctcttgagctcctgacctcaagtgatccacccacctccacctcccaaagtgctgggattacaggtgtgagccaccctgcctggccctattatgtagttttaataagacctaactgtatattaatagaatttttggacagtgacaaaatttgtatttttgatattttccttcagattaccatttctaaattgtttctacaaattgagtatcagcatttcaaggttttattttattttgttttattttattttattttaattttggtagctataaataccatttactgataatgatgtccttacaactaagggaacttagaaaaattactgtagccctcactaaccagtttttactgtagcagtgtggctagaattctaaaaattgttatgtaaatagagttggtctgtgatacatttcattctccttttcctcttgctgcacctcagatgttctattagaaggtaagctctatgcagggcacctagaaggcactccagaattatttgttgcatgaatgcatgaacagatgaacagatactcactgtcctttgagtcagtttcacatggcgatcctccctcttgtgctccagtggcccccggcctccagttttacatagcattgtattccccacgtctccatctactaacaaaatggcagccagttatctaatacactagtttgtgtaaacctgttatgtccaatggggaacctatcaaaaatgtgttagtaaggggtttctatattagccttatggtaagcattcagtaaatgctagttgttattattgtcatcatcttcatcatcaccaccatccaatatattcccctataacgactggttttcagattttcttccaaaggatcattaggactctcagaattttctcaggtgatagtgaaagtttggtggggtttggggaaaagtggtgggagggagggacagatatggagagataatgaagctgcactcccctcatggttttccttacctcttttgccaaataagctgtgcctttatttgttttatatatttgtatttcgggtaaattttattttcaaaaggattctactgcttaattttgtttttcgaaagaaacactgtaagcaatgtgctgggtgctagagagtacaagatgaatatagctcttttcttgtaaatgcacagatgacagtgacaaggaaaagaagagaaaaatcactgaccacatttcagagtgtattcttaagcagataatttgtacagtccttaaaatgaatgtgctgctgtctggaagccagcatatccaacagtgcacatgtcatgacatgtcaaagcaacctcagcatcctttgtaacagagctgctaggttagtggatagggtggggctggatcacttaccagctatttgacctggaacagtcacttgagtgctgtgggcgtcagtgtcctcagctgtaaaacgtcaaaagtaaaacaaccccataaagttacttaaataaaactttttttaaacacaaaatgcctagtatacctgtaagcctcaaacatgcatatacactgtatctatttactttatagaaagtatttgatgacatcagcagggcatttcacaaaccaacttcgtaatagccttacaacgaagatgggtaggtagatttgtaattagctaaccatctttcccggactgataggtactcaggaattgcttttatcctaaagacagatcccatattgtaatggaaaaaacatagctctggattcagagaaactttatttaaagaccaagctctgtcatttaccagaccattgagccagttactcagttgtttaagtctcacttagtattgtttatttcctcagttataaactaggtgatcacaaggggttttgtgagaattaaattatgggaaacagtaagtgtgaggtactaatcaaggtgcttcacatatggtagatgctcaagaaactttccttctttcagtctggtggggtgccataaacaaaaacctgaagcaaatgtcctagaattttgaatgacacagaacaaaagatgattgaaagaataatgagtgataagcatgacatttcaaaaccaaaatgtttattttgacagaccaaggtagtggctgaaatgtataaaatggtatttgacagaataatgttaatttttacattcaaaaagggaatatatatataacatttattgatattatatatatttatttatatgtgtaaaacaaaacttctaaacatacttgaagagtcttgaggtacttaacctggagaattctgtggggaggcagaatagctgtattcacattatagaatcatagaaccttggagtttgaaagattgttatgtgccagtgtgagtataaatgtgtggtcttgttcccaagtaaagaatcctaacatgaacatgagaagcgtggggtaagcatatcatttcactataaggctatctttttaacaattagatacatttcacagtaaagtagtgtgtgtgtgtgtgtgtgtgagagagagatagacatgatttgaataaatatgttggatattactgatcaagttgtagagattcttgtgtcagaggtggctaaggtacaaaggtccatgggatttagaggtgggggagatgtcacatttcacctgatttggcaactcctgaataaaactttggaaaatgtcttgaactcccctgttgcaaatattctttgcaccctttcacagaaagaagactaaatgggccgggcacggtggctcaagcctgtaatcccagcactgtgggaggccaaggcgggcggatcacgaggtcaggagatcgagaccatcctggctaacatggtgaaaccccatctgtactaaaaatacaaaaaattagccagcgtggtggcaggtgcctgtagtcccagctactggggaggctgaggcaggagaatggcatcaacccgggaggcggagcttgcagtgagctgagattgtgccactgcagtccagcctgggcgacagagcaggactccatctcaaaaaaaaaaaaaaaaaaaaaaaaaaaagaaagaaagactaaatgaaagtgaattagcaatcagtatgtgaaatattgtagccaagtcttttcaaggaattcctgaatagatgagacattaagcaagttaatttctaagttcatgtctaattaattctctgatagcctacctgtataagtaagtcaacacgatgtgcatatagaaatcagtaagattaatactggatgtctccaagtataaattcagaatatattgataacattggatattatcctgtttctaaaatgtgtattttagaggaggaggaatttcaggaacttcctgtataaggaagaaaatttaagttccaatggttattttagccccaattcaattcaattattagttgaataacagccaaagtgatttggtgatgtatatgacttacaagaatcaagaataaatcatttttctatgcttattctagtgttacttaatttactgtgaacagggctgtatttaatctttcttatttgagtggcatacacaagcaagaaaacttggtgagtcatttgaataatctggctggtgtaactgtgaatattcttgggaatgatggaaaggttaaatgctttgaaacacgtgtattctgaggggagcactgagctgctgctctctagtttcactgagagcagaacttgggccagaagtactagctgtgttttatagagcttaatacactcccatttcaaggtgattgccagttattatgtgatcatgagaagatagactttaatttcagggagcattagcgtcatcagcaacaagcctttttgcatgtggtgtaccaggtgctgcataaaatatgttaaactcgcattccacttgctctctacacacgacgttaagagtgagacagactattttagatataagcaactctgaagggtaaagtgactaataacagcagctgagtcacggcttacacttgtataccatgttctagtttacaaagctcttaagagagcagaacattcctacctgtaggtgatagattctgtgaggcagaaatgtttctggtaccagtttccttgaagggaattgagtctatttttattgaagaatcataagatgcagcttaaaagatgtggtcacagaagtgtaccccaaccagagaggaaattccaactggaaataaggagctagaccattttggtgagttttgatgtggaaagggcttgaggaagatcaaggtacaggatacatggaagatttaatgaagcatacaatgtggaaagaaggagacgtacacaattacggcttgaaatgcagtctgccaagtttattcaggtgtccagtgcgttatcagtagtggaaaaaacaacccacatttccttgcttgaatacttgtttttccctcataccctagtcctttcgttactctggacagagagtacatgactctcctttttgattataagactttgcatcttttatccctgttgttttccaactctcttcctacttagatctagaataacattctgtcttctatttactacatttgcatctttaagaaaaacagtacttactggtttttgaaaagtaccatactcttcaaaaagtgttgtgaataatatcacttgtattagactactgagtcatttattttatatgatacattgtggtgagatactgtctttgttttatgtctccattgcttactttactgctgtcccagacagatgtataggggaagcttttaaattaaatatagaattataaatgcagatgcatatgtcatgtatatgcatgcctattgtcagttgacttatgtatattcagccatttgattgttaggtgcttatatatggagattctgtctttgatgcctttttaacactctacagcatcaacatcactcctttcttgattttcagtaaatattattagggagcaagcaatgtgtaaaacactggaaagggaaatcagtgcggagctgtagcaccatcactaagcttggcttagcactcagcttaagtcagtttttttttttttttctaagagaaataggttgtaatttctcctcatcatctatcttgtttatgttaagtgccgtttaccttagggaataatttctctaaagtgagaaagtcagagttacattttgactccttacttttttttttttttgagacagagtcttgctctgttgcccaggctggagtgcagtggtgcgatctcggctcactgcaacgtccgcctcccaggttcaagcgattctcctgcctcagcctcccgagtagctgggactacaggtgcatgccgccacatctggctaattttttgtattttagtagagatggggtttcaccgtgttgcccaggctggtctcgaatttctgagcttagacaatctgcccgcctcggcctcccaaaatgctaggattacaggcatgagccactgcacccggccttgactccttactgttaaaggaactttaaaaaacagttggcaaatgtatggttagattgaacctggatagaatcagcgtccttctatgtactttactcacattgttgagctatgttagcacattaacaaatgaggtttatctcttcgaaaggtgacatggaagtattgggtgtggcttatgtaattactgtctaaacttttgaaaacctagcttggacccttaactgaaaattttgacgtattggttgtgagccttgcttacagaatgcctcagaataaacttggaacttgaaggtcagtgtagaaactcattgtcaattcagtgtggagaagcttacatagcacctccgcagccaggtctggctcacattagtgctactagagcctcagccttgtgagtgctgcagcttcttgtcagagaggaaggaaactgaagtgcagagagacagagtatacagatgacaaggcaagccttcagaccgcatggaggacttagagatgcttgagagaaaactagagagtcttgaaatataagcttcagtgtaaacatccccaaagaccaagtggatgaaattgaaggaaaagatgaggaacttggaagaggtagacagacaaatttgaaacaagtgtttctgtgactggaggagcaagcataaagtggtttaaaagcattgctgaggaagccagatatgtcaaaatcagagtttcttgacagaggacttaaagctgggggcagtggggagagtatttttaaaaccagaaggaagttgcactcatcaccctattgagagtattcagcacctatattattgcagtggttgcacatgtgtatgacatcaagatcgttccctccccttcccaccctccagccctcagtgatgggaggaattccgaataggtttgaaaacaagtgcgtgagttggaacttcaaactcaaacagacacactggggacaagaaaccacagagacagttaagcagaaagagggtgatgaagtgaaaacccccactgagtggtcagtaactgcagtagctgaacctgtcaactcctcatggagtaggagtcaagtatttctatggttaaagaataccagaggtcaagtgaagagaatctgtagaagaacaagggtggatgaatgggaataaatatttttgaaatgctttaagtagtaagtaatttgagtattggaattcgaagtaaatgtgttagcagatagaacataatactgtgaacagagaaaggaaaatcctgtgagcatagaattaggaatcattgcattagaaatctcaagtaatgtgtggattgtatgtgtgtatagggctaaaataagaacaagtggcatatttccttatcaattcacacttaaaagcatgtaaaaggtaattcatattcctaggataaaataatacaactttagatgttggctgtattggaaattatatagatgattatgtatctgtatgaacaaaactgattttgaattcgtttattctctctaaagaaacttactattctctgcacatcacttcattttggccgacaataagtccaactcagtcagtgcactgctgtggaatgttttaaactgaaatgtgcattggaatctgtttgtttacagcagatgatttgactaagctttgatgcgcagtcactctctgacatttgtgtatttcagcagtgaacaatgtaaactcattttctgagcactttgattgcttgcacatagcagtgcccatggcatgtgacagagaagagcactctctccactaatcagatagatatgcttcaagcgtatttacacaaaataatgaaaacagctgttagatacctttaaacttgagtgtgttttgttattaatctactagcctgtacacatgacactataattcttcactcactcaagttgcctttaatgacacagtaataaaactgagagggatgaaagtaatggaattgtagaatgtaatgcctcaattgttctacagtgtcttcctttttgccaaaataaaccacaattaggtccatatggtgttttgaagttttcaagcaatgaccctaataaaaagtaatgaatttctgacaaaagaaagcgtggctctcttttaagtggatatcttcactattgatctagatatgattgtagaccaatatgctaatagaagaaaaaggattcagtgtgcttagtacaagtactttcatttgtggtttgttttactcataagaaattcaaattttaaaggtagaaatattataatccattagttatgactcctctgttcaaaagatctgttatttaaagcaaagaaatattcttcaagaatgggaaattttacaaacatctataataatggagtttgtcacaaagaaagggctgagagagtttgttttagagagtatcttgttcttgtgtagattgagcttttgaggttctggttttgcttgtataagatttttatgtatttcagactgcttcaagggagagtgacattttattccaagtacttctaccacattctgaaacttgtgtatgtaacacaagttatttggttggagattggtttaaaaatatcagagtaggcaaaatccttagactatctttaatattaataaagcattataggtagcctagaatcttgaaaatagattaaattagaaaaaccataaaaccgagcaatagattgatttcataattgcaatgctggcggaagtgggagggaaagaaattaaaaggaaaatatataaggaatcagatttaagatctttttaaccaggaatacctagatttgaatctatgctcaaaagcataccagcgttttccctctgggtattatacctaatttttctgagtcttgatttcctcattttcaagagataggagttatgacaaggattaaaatgatgtcatgatgcatctaacagattgtgtggcaggtgctaggcactcaataaatatggtttaactttattattgtttattattattgagaccaacctcctaaagtagctcattagaatgacttagagtgtgctgtgtgtgagaatataggtgtgcaaataagtatgtgttgaattcagttagacaattcagtgcatacttacagagtccctactatgtgccaagaatgttcatggtattataaaaaatgcaatactaaataaaattctgttttaagaatttctaatgtaatggacatataaaagtgagactgggcaagacaagtgtagagaaacaaacaagtttcattggaaatataggagaaggtgaaaataattcaccctgagtaggacatgggaaagctagatagggaaggataggggagaatgacaagcatctgaagtaaaggggctggggcttttaaaaaggagtttaacttttgggagtatggaaggtagtgttgtgggagagtggggaaagccacatgcacagcatcattggatgactgttgtgctgtgtcatactaggtgctaggtttacaaagtgaataagatgtgatcctgtcctcaagggtaaaaaatttccaccaaaatattatgagaacgagactgccccactatgtctcatgcacccagttcatcttgccaaggggcaactttgactcttaaaattatgaataattcattgacattctgtttgctgttcatttgtttcgatatatactttgggttaatatggtgaatgatatggtttggctgtgtgtccccacccaaatctcaccttgaactgtaatctccataatcttcacatgtcaagggcaggaccaggtgaagatcattgaatcacgggggtggtttcactcatgctgttcttgtgataatgagtgagtttcatgagatctgatggttatatatgtgtctggtatttcccctgcttgcacttattctccctcctgctgtgctgtgaagaagtgccttctgccatgattataagtttcctgaggcctccccggttaagtggaactgtgagtcaattaaacctcttcttaaaagaaattactcagtcttggatatttcttcgtagcagtatgagaacggactaataccagtgagtgaatgaatgacaaatatatttgcttagtattttcccattttaatgtaaataccgagaagataaatttcaacctattatcaggctacattatctgaaattccaaattagttaactgaatttgtaatgtttaattgtttgattattgatcaaaaagtatttccttacttgcaaagctcttctcacttctctaatattttcttaatctgttttttgaaaaactaaaccaaaatcacatcttgacatttaatgcgcagtttattgtataattgatcaaaagttaccattgtacagtcccgatgtttcttaactcattgagatatgaattacaacgtagatcatcaccatttcttactaacattttaggatattttgagagattatggctctacacttgaaatgggaaacatcctttaaaccttgtttggagattggtcatgccttctcaaataagataattacattgcattctaaaataatatcctgcttataaatgtgtatatatattcaccatttcaaagattagtagagtgtaggttgtgtaccaagcactgggtagggtactggatataaaggatggacagtaacacacacaccaacatatccacataaatattgcttcccttagagcaatccactgactttcttcatccatgataacaactcccctgacccttctgcagctcttgtttactaactactttcaggtccatgtaacttatttttatgtcagtagttattagcagaactttgttctttaaaaagtatatttaattttgagaattagccaaatataccatgtgtagccaagttttggattctgaaggacaggatattctacgattataatacagtcgtatgatttgtttgtttgtttgttttttaactttagttattacttggttgcacttaacttggtagtgaagcccattttggaaacaataagaacaccaattcccaagatgattgattgctttgcaaatgtcagcccttcatggggtatacaccttcaagtttgctacctttttaaaaaagttcatttgattttaaaaatttgctactcttttatgtcacagcaggtgtattcatgtcaagagtatttgtgggtatctcggctttagccaggcagttccctttgctgctcttgattgtatgcattattccttcatcttagaactttagaactctttctaaagtaatcatatagataaaaatcatctctgaaaacacgagatttcagagtcctgtaaatccattatgaccagcatgctttctcatcaatctcttcatgttgtctagtgttgaatgtgttaaagaaaaatgcggtcatgtaattttttccaccatataaataacttgatttttttccttgctgtcccaaataatttttcttcactttatgtccaatagctactagaataggactttcatatgttgtttattcctggtggttttccccagatactcagtgtttcctacacacacacacacacacacacacacacacacacacacaccccaaaagtttatttattcaacttgtcttttatttatagatagtgttctttaagtaccataaagccctatgatatataatatgtttgtgataagaatttgtatgacctatgagtggctaaaattaggatcttgtggcagatatgggttttggttaggaaactactacctcaagatcacttagactcccttctccttccccagtatatggttagttgtgtgaaaaataacttgtactctcaacttttctgtttttccaacagttcaaaatgactaaaactattgcttttgttaacctcatacaatgtaaaaccacattcttttgttagattatgtttttaacagctttattgaggtaaattggtagacagtaaactacatataagatgtacagttttggccaggcgtggtggctcatgcctgtaatcccagcactttgggaggccgaggtgggcggatcacaaggtcaggagatcaagaccatcctggttaacacagtgaaaccctgtctctactaaaagtacaaaaaattagccaggcacggtggtgggcgcctgtagtcccagctacttgagaggctgaggcaggagaatggcgtgaacctgggaggcggagcttgcagtgagccgagatcatgccactgcactccagcctgggtgacagagtaagactctgtctcagaaaaaaaaaaaaaagatgtacaattttataaatgttgacgtatgtatacacctgtgtaaccatcaccacagacaagataatgaacatatccatcactctaaaagcttccttatgattcctgtaattgttctccatcaatcctcacttccctacttctatcccaattcacattctctggcactgctgataagctttctgtcactatcagttagttttttttatatataacttcatctaaacaaaaacatatagtatgcacttctttttatctgacttctttcactcagcataattattttagatccagttttgtttggtgtctaatagtccattcttttttttattgctgattagtatgtcgttgtatggatataccacaatttgtttatccacgtgttgatgagcatttgagtcagttttagtttttaaatattaccaattaagttactgtgaacatttgcatgcaagtctttgtatggtcataatgccttcattccccttgggtaaatacctaggagtggaatagcgggatcatatggtagatttgtgtctttattttttaaataaatcaccaaagtctgccaaagcagttctattactttgcattcccacctgcagtacatgagagttctagtttctccacatcctcaccagcacttgataaggtcaatcttttctaattttagatagatgtgtataacattttcctctattctttgccttgtctttaatagtaccttttgaagaaaataagttcttaattctgatgaagttcaattcattcattcattttattttatacatcacattattgtatctgagtaacctttatataacccaaggccatacacattttctcccaggtttttcctagatgttttacatttagattttcacaatttagaattaggttttacatttagatttaggttttacaatttagaattaggttttacatttagatttatgatccattttgaattcatttttatatatggtgggaggtatgaatccaaatttttttttttaacatatagatatccaattgttccagcaccatatgttggaacaaaactatattttctcaggctagtcgcctctacttaattacctttagaactttgttgaaaatcaatggagtgtgtgtgtgtgtgtctgtttctcaactctttattctgttccgttgatctatttgtcttttttgatgtcaatactacactgatgatgattattctagttataataagtcttgaaggcaggtagtgtgagtcccccaaattttttctttttaactttgctttggctattctaagttctttgcatttccagctgaattttagaataaggttgtcagtttcctaggggaaaaaaaagccctctgagattttgaatgggattggtttgaaatggtaactcaattgaagagacacgacgtattaacagtattgaatcttctgatccatgaatatactatatatttccattaacatatacatcaatatatacaaaagatgtataagatatatttaatacatcttttgtttgatgtatacttcaatatttacctttttttgatgctgttatggtttcctttgatactttcagtttctgactgttccttgcccggacagggaaatacaattaacttttatatttttatcttgtatccatcagtttcgcatttttaaagtaacttaaaaataacttttttttgtagattttatcagattttctacatagttaataatgtcatgccaaaatagaaatagttttacttcttcctttccaatatcaatgccttttatttattttaattttcttattacatggggtaattcctctagtatcacgttgaatagaaatagtaagagcagacgtttttgccttttcctgattttagagggaaagcatttagtctttcactgttaagcatgacattagggcttagatttttcttatgtgtcccttaccggattgaggaaattcccttttatgcctagtgcactgagagttttatcaggagtggatattggatgtcatcaaatccttttttttgcatctagagataatcttacctttgcttgtttgtttctctattagatggtgatgatggtggattacatcgattgcttttttaatgttaactatcctttcattcccgaaataagtcacacttggacatatattttttaaattttttatttgtacaaatttacggggtatatgtgaaattttgttacatgtatatactgcgtagtgatcaagtcattgtatttagtgtgtccatgaactgactacagtatattcttgttaagtatatagccctactctggtttcaaacattgaatttattccttctatcttaccatatgtttgtactctgtaacccacttctgttcatcctcccctctcccccactctcccttcccagtctttgttatctttcaactgtccacctccatgtgatcaaactttttacttcccacatataagtaaaaacatgcaatatttgtctttttgtgcctggagagagacctccagttccatgtatgttgttgcaaatgacatattctttttttatgaccaaatagtatctcattgtgaatatacaccacattttctttatatattcatctcttgatgaacacttaagttgactccgtatctttgccatggtgaagtagtgctgcaataaacctgccagtacagttattgctttgatattgagtttttactctaggtagatacctagtagtgggaatgctcaattaaatggtaattctatgtttagttttttgagaaatctccatagggctttctttagtggctgtactagtttacattcctaccaatagtgtataggagttcccttttctctgcttccttgccaacttcacttattttttgtctttttaataatagccattctgactggggtaggtagctttttgcattcctctgatgcttgatgatgttcatcatttttcacatacctgttgacctgttgcatgtcttcttttgagaaatgtctactcatgtcctttgcctactttttaataggattattacttttttcctgttgagttgcttgagttccttgtatattctggatattagtctcctgtcagatgaataggttgcagatattttctctcattcaacaggttgtctcttcacactgttgaatatttcttttgctgtgtagaagttttttagtttaagtaagtcctatttttgttttaattgcttgtgctttttaggtcttagccataaatttttgccttggccagtgtccaggagagtttttcctaggcttactcctaatatttttatagtttcaggtcttatgtttaaatctttaatccattttgtcttgatttttgtgtatgttgagagatagtcatctagttttatttttctgcctgtagctatccagttttctcagcatcatttattgaagagaatgtcctttccccaatgtaagttcttgtcagctttgttgaagaccagttggctatgaatatgtggctttatttctgggttctcaattctattccattgatctatatgccaatttttataccaataccatgctgttctgtttactgtagacttgtaatatgtattgaaatcagatagtgtgatgccaccagctttattgtttttgcctaggaatgttttggctatttaggctcttttttagttccatataaatttagaattgttttttctaattctgtgaagaatgacattggtatttggatagggattgcatttaatatgtagactgctttgggctatgtggtcattttatcaatattaattcttccaatccataagtgtgggatgtttttccatctgtctgttttatcttcacacctcttttatcagtgttttgtagttatccttgtagagatctttcacttccttggtcaaatagttaaatttattcttagggttttttgtttgtttgtttgtttttgtagcagttataaatgggattgctttcttgattttttttcttggctagataattcttggtgtaaagaaagactactaattttggtacattgattttgtgtcctgcaactttactgaattcatttatctaatagaggtttttggtaaagtctttaggttttctacacataagatcatatcagcaaagagggacaatttcactgcctctttctggtttggatgccttttattttttcctattgtctgactgctctggctggaacttccaggactagtactatgttgaataagaatggagaaattgggtgtccttgtcttgttccagttattaaaggaaaggctttctttcagcttttctctattcactatgaagtgagctgtggatttgttgtatatgactttattattttgggggtatgtcccttctatgcctagattggtgagtttttataacgaaaggactttgaattttattaaatgtatcttctgcgtctgtcgaggtgattatatagttttttgttgttgttgatgtgatatatgatgtttattgatttctggtataaatccttcttgattgtataaatccttcttgaaggtataaatcctttttgatgtgctgttggattcagtttgctagtattttgttgaggatttttgcatctatctgtgttcatcagggatattgtcctgtagtttttttgttgttgtcattgtgtctttgtctggttttggtatcatggggatgctggcctcatagaatgagttaggaagtttcctttctcttcagttttgtggaagagtttgtatagaattgttattatttatcccttaaatgtttgatagaattaacagttaaactatctaggcctaatgatttatttgtgggaatgtttttaactacaaactaattttgaatattg

SEQ ID NO: 387 - DNA, 762 bp, Homo sapiens
atggaaattaggttatcacaagcgggtcaagggtctgttcaggaaaatcagttaagcaggaccctctttgcaagttcagtgcttaacctgaccgaactggctgcccttcggcctgaccttgggaaactgaaaaagattctgtattttcacgagaaccagttgatatatcctgtcaagaaatgtcaggagagggatttccaatatggatacaaccaaattctttcatgcctggtggctgatgtggttgtattcaactcagtttttaatatggaatcatttctcacttccatgggaaaatttatgaagctgattcctgatcacagacccaaggatctggaaagcatcatcagacccaagtgccaagttatttactttcccatcaggtttcctgatgtgagcagagcccaatttactgctatagttgtatttggaaatgagttggagccagagatccatggaaaaggcctgttgggtggaatggccccagagccctcagtgatgggaggaattccgaataggtttgaaaacaagtgcgtgagttggaacttcaaactcaaacagacacactggggacaagaaaccacagagacagttaagcagaaagagggtgatgaagtgaaaacccccactgagtggtcagtaactgcagtagctgaacctgtcaactcctcatggagtaggagtcaagtatttctatggttaaagaataccagaggtcaagtgaagagaatctgtagaagaacaagggtggatgaatgggaa

SEQ ID NO: 388 - protein, 254 aa, Homo sapiens
MEIRLSQAGQGSVQENQLSRTLFASSVLNLTELAALRPDLGKLKKILYFHENQLIYPVKKCQERDFQYGYNQILSCLVADVVVFNSVFNMESFLTSMGKFMKLIPDHRPKDLESIIRPKCQVIYFPIRFPDVSRAQFTAIVVFGNELEPEIHGKGLLGGMAPEPSVMGGIPNRFENKCVSWNFKLKQTHWGQETTETVKQKEGDEVKTPTEWSVTAVAEPVNSSWSRSQVFLWLKNTRGQVKRICRRTRVDEWE

SEQ ID NO: 389 - DNA, 726017 bp, Homo sapiens
  misc_feature (1)...(726017): n = A,T,C or G
gagcagcgccggctcggccgccagtaggaagcgccagcccagagcctgggaagtggccgcagaggctgctcggccccgctgcccgccaggtcgtgggctcccgctccgggcccggggccaccggctgtgtaagtgcaaagcgggggggctcccggtcaggcaattcggaccggctgcggggagggctgcgcggctggccgtggagtcggcgcgtcccgcggaggggctcgcccggccctcacctgtccgggcggagcccgccacacctgtccgggtccgctgccgggccggggttcagcgtgcacctgctcgaggcgcccttgctcctgttggcgctctgcttacatctgtccaaggccgtgtcccacacccgctgaagactcggcggacacctgtccgggacccggcccacacctgctgcccgggccggctctgctctcccgagctcgcggcgggggtccccttcccctctgtgcctccgagctgtctccgcctggcttcccctcccgggccgtccgcggcgctggagccccccgcccctgggcctggctaagcccactggagcccgcggggtctgggacgcgcggctggggcctggggcccagcacagcccacgcccccggcgctttccccgccctgagttcccggacttctcccctagccctttccctcctgtctcctggattcaaagtgcctgcgatctagctgggcggcatcaggcggtgctctctgggataagcgcgctgtcaactccaacttatcccagggaaccctggggagaggaagtcaggctactggcctgtggtcttctccctgtcagcccaccccaatcccctccacccctgcgaaccttcccaacgtgaatgtctgttaaccgaaagttttcccgtgttaggatgcgttgtctgtcttcaaatgtttctatagagagaggaattaaaacgctggaagcaaggcccagttgaaaggtatgggggagtgacttcccttccatccctcacggccccagtttaaactggtgactgtcccgtgtttctaaggtagtcatagctacctatgacatctttatttgttaacctgaaacaaagcaccgggtggatgatgttggaggcccaggaacattgccgtcctaaagatctggctaggttttgttgtgtgtgtttgttcgtttttttaattgtgtggaggactagtagtgtagagggaaaaacagttgtccggaaacatgtaaacaataaatgtttcagaaatctagtgtgtcaaaaataacagcttcattgagcctcgattacctgccataaaatccactgctttaaagtgtacaattcagtgatttttctttttttttttttttgagacggagtctcgcactgtcgcctgggctggagtgcaatggcacgatcttggctcactgcaccctccgcctcctgggttcaagcgattctcctgcctcagcctcctgagtagctgggattacaggtgcctgccaccacgcccggctacattttttttgtatttttagtagagacggggtttcactatgttggccaggctgctctcgaactcctgacctcgtgatccacccgccttggcctcccaaagtactgggattacaggcgtgagccaccatgcctggccaattcagtaatttttagtatattcacacttgtgttaccattgtcattccagaacattttcatcaccccagaaagaaactccatacccattagcagtcactcctcattcccccctcccacagcccctggcggccaccggtttactttcgatatatatagatttgcatattcagggcatttcctattaatggaatcatacaacatgtggccttttgtatttagcttctttcattcagcacagtgctctaaagttattcatgttgtggcttacatcagcactttgttcctttctgtggctgaataatattccattgtatagatttaacattttgtgtatcaggcagttgatggacatttgtgttgttttcactccttagctattaagaataatgctgtgcctggccaggcatggtggctcacgcctgtaatcccagcactttgggaggccgaggcgggcagatcacgaggtcaagagatcgagaccatcccggccaacatggtgaaaccccctctctactaaaaatacaaaaattagctgggcatggtggtgggcgcctgtagtcccagctactcgggaggctgaggcagtagaatcccttgaacctgggaggcggagtttgcagtgagccgagatcgcgccactgctttccagcctggcgacagagtgagactccatctcaaaacaacaaacaaacaaaaaacaagaataatgttgtgcctgtaatcccagcactttgggaggctgaggcgggtggatcacctgagatcatgagttcgagaccagcctggacaacatggcaaaaccctatctccacggaaaatacaaaaattagccgagcatggtggctcacgcctgtagtcccagctacccgggaggccgaggcatgagaatcgcttgaacctgggaggcagaggttgaggtgagctgaaatcctgccactgtactccagcctgggtgacagagcgaaactccatctcagaaaaagaggaataatactgctatgtacattcctgtacatgtttctggtgtggacacatgttttcagatctcttggattgctggttttatagtagctctatggaggaactaccaagttgaagatacatatttttgctgttttaatacctgtattagcttagtctcagataccagaactggctcagtggcaggtgtctttttttttttttttttaaagagtcttactttgtcacccaggctggagtgcagtggtgtgatctcagttcactgtaacctcctcctccctgggttcaagcgattcccgtgcctcagcctcccaagtagctggaattataggtgcatgccaccaagcctggctaatttttgtatttttagtagagaaagggttttgccatgttggccaggctggtctcgaactcctgacctcaggcgatccactcgacttggcctcccaaagtgttgagatcacaggtgtgaggtcaggttgtgtttttttttttttttttttttgagagggagtcttactcttattgcccaggctggagtgcagtggcgtgatctcagctcactgcaacccccatctcctgggttcaagcgattctcctgcctcagcctcctgagtagctgggatcacaggcatgcgccaccacgcctggctaattttttgtatttttattagagaccgggtttctccatgttggtcaggctggtctccaactcctgacctcaagtgatctgcctgcctccgcctcccaaagtgctgggattacaggtgtgagccaccacacccggctgattatgctgctttttagatgagacgatagtttttatttttaaatcatttttatttattaatttttttgagatggagtctcgctctgttacccaagctggagtgcagtgttgtgatcttggctcactgcctcctccacctcctgagttcaagcaattctcctgcctcagcctctggagtagctgggactgcgggtgtgtgctaccactcctggctaatttttgtatttttaatagagatggggttttgtcatgttgaccaggctggtctctaactgctgacctcaagtgatcctcccgcctctgtctcccaaagtgttgggattacaggtgtgagccaccgtgtctggccgagatgatacttctaaaataaggccctttcttacctgcggtgggccgcactctcctcctctgtagaatgaaggcttcggtgtttctcagcttctgttaaacctgtgcctacttttgagaaacattagcgctccagtctcccccgctcagtattttgatatgtcctccgaggggttttatgcctctttgttggaaggtgatgtcattttggttctttcgaaggtggtttttgtgtgcagaaaagactctttagggaatcgttgtggggaaagggcaggagagagtggggcgtcgtccttgagagcgtgagcactggagtcagggacttgggctgagtcacacacatgtaatatacttgtgaaccgtttagatcctgggcagaagcaagacatgttgggaggctagggtttcctttttttaaaatttaattttgttcatacttctctatccatgtgtatttttgaagtctgtagaggtggggttgtgatgtatagtccaggggctctgcatatgcagaatgggatagcccccgacacacagtcctcctcctctccgtgcaggtgagaagcttgccattagaatttcacagaggtcttatagcaatgtcactttaatcttagtgtcacctgggagggttttactgccacgatctctgcagtcaggctttggtgacctgaaggttatgcagttttgggcttcctatttaagaaaaagaaaacaaaattaaaaatgcaaaattagatagagggccatggaaggggcctgaagctgaaccccattagctcatggtacagctgcctctggccatggggaccatggccaaatcccctcaggaagtgtcagcccactgatggggacagtggaggtgtgtatcgaggcatctttttcttatttgatacagagagctcatttaatctccctaacctttaaaaaaattagactttttatttgagactatagtagttgtagctccatgtgcatttgtcagaaataatactgagggatcctatataccttttgcccagtttccccccgtggtgccatgttacaaaaccacagtatgttatcacaaccagaatgttgacttgctgacaccttgaggtatgtgttactatcctcatttttattcacaatgaaactagggttcagggaagcacacaggcttgctccaggtcacccagatcgtgcgtgtagagctgggagttgaatatcggccctgacttccaggcagtgggatttccatcatgaccgtctgtaggctgggggcagcattcattggattgttcatttgtttgtttgttcactaatcccttcaacaaacatgtattgaggatctcctatgagccagattctttcacgtgggtcatctaatttaatttttccccagctctggggaatcaggtaataacgttttctttttatatctgacaaaattggctcagagaggttatggcaactctcccatttataaaggaaaggtggtatatttgtgtaatctctccttttatgttaggcacaatgctaggccctttacattcgcaacctcctcaatctagatacagttttataaggcaagttctttttcttttaattctttttttttttttttttttttgagatgcagtctggctctgtcgcccaggctggagtgcagtggcgccatctgggctcactgcaagctctgcctccctggttcatgccattctcctgcctcagcctcccaagtagctgggactacaggtgcctgccaccacgccgggctaattttttgtatttttagtaaagatggggtttcaccatgttagccaggatgatctcgatcttctgaccttgtgatctgcctgcctcagcttcccaaagtgctgggattacaggtgtgagccactgcgccccgcctcttttttttttttttttgagacggagtctcactctgtcacccaggctggagtgcagtggcgcaatcttggctcactgcagctttcacctcccgggttccagtgattttcctgcctcagcctcctgggtaactgggattacaggcacgtgccaccacacccggctaatttttgtatttttagtataggtggggtttcaccatgttggccaggctggtctcgaattcctgacctcaagtgatccgccagcttcggccttccaaagtgttaggattacaggcatgagccaccatgcccggccaagacaagttctattatcaccactattttgtagctgaggagttccagggagcccggaattcaaatccagatgtgattgcatggtggatttttcttaatatcctgttgaggggatgggggagcaattacacacgtgtttattcattcactcaacagacatttttgagcactgactcttactactcctggttaggtggtgagaatagaaagacaagaaacagccccatttctgtagaagctccatgctgaggccaagggactgaaggtcaacagttacagcattatgatcagagctgcgacagccacgtgtagagccctaagacctgttgatgccacggctttccttggggcttcccctgcctctgggtagtgaaggtcacagtcactgcctcccagggtaggctctcagcactcaggactctgtgtctcacagcctcatttcttctctctgaacagggacttcaaaatgagcgtccctgactacatgcagtgtgctgaggaccaccagacgctgctcgtggtggtccagcctgtgggcatcgtctccgaggagaacttcttcaggatctataagaggatttgctctgtgagtcagatcagcgtgcgggactcccagcgagtcctctacatccgctacaggcaccactacccacccgagaacaacgagtggggcgacttccagacccaccgcaaagtcgtgggcctcatcaccatcacagactgcttctcggccaaggactggccacagaccttcgagaagttccacgtgcagaaggagatctacggctccacactgtatgactcccggctctttgtcttcgggctgcagggggagatcgtggagcagccgcgcaccgacgtggctttctaccccaattacgaggactgccagacggtggagaagagaatcgaggacttcatcgagtcactgttcatcgtgctggagtccaagcgtctggacagagccacagacaagtctggggataagatcccccttctctgtgtcccgtttgagaaaaaggactttgtaggactggacacagacagcaggtaagcttacctagagacccaggccccttggcttccctgcatcagaaagggaaagcacagggcagaatttcattgcagcaaggagtagaaaggtgttgtccattggtttttaaaactaatgactttctgtcagaatctgtttgagtgctgctaaaaaaaccaaccaaacaaaaaccagtgacttttaaagacagagacagcctttggttgggggagtcctttagagttgtcttgtacactcccctctttttagtggggctcccctcgtgggactcctggagctctgtcccatacagcagccacagccagttgtggcttttgggcactagacacgaggctagttttagttgagatgggctgtgaataaaacccacgccagattttgagacttacttctgaaaaaataaactttcttgctaatttttttttgagacagagtcttactctgtctctcaggctggagtgcagtggcgcgatcttggctcagtgcaacctgcacctcccgggttcaagtgattctcatgcctcagcctcccaagtagctgggactacaggcaggtgccaccatgcctggctaagttttgtatctttaatagagacaggatcttgccacgttggccaggctggtcttgaactcctggccttgagtgatctgcctgccttggcctcccaaagtgctgggattacaggtgtgagcctctgtgcctggccaactttcttgctaatatgttttatacagattacatgttgaaatgatagtattttacatatcttaggttaaataaactatattttaaaaatcagtatcaactgtttcattcttacttttaaaaatgtggcaactagaaactgaaatgtacttacgtggcttgcattttatttctgttggacagcactgtgctagagcacagtttgaacacttttattcagtctcgtccctttggttcacagatgagagggtgaatctggagaggtaagggctaggtcctagctgagctagaagtagagcccacgtctccggattgccaggctgtgcaccctgcgtatgtggctactttttccctcctgatggccacagtgtcgaattcctcacttacagagcagccaagcatggatatcaggatgccagaaataccacctgggagctcctaaacagctaccttatacaaatgaaaagtatgtctgttctctctgtgtacaaggagtgttggatagagcaggaaaaggtcagcttcccatcttgcctgttattaagtcaaaaactttatttcaaatcaaaattgcagatgagctcttccttgccacttccttccactctctgcttgctgctgtgtcttgccatggtggctgttctgcagagctggatgagatgcaagcctaggcagcagctgtttgccaagagggcgtccccatttgccagggaaagtgatgtgtcactgtgtcagtcactggcctcctggcttggacagggctctccctcctcctgtataggattggctgatgagccacaggtgaggattcagtgatgtaaggtgcatgccaccatagtgcctgctgcaaagtaggtgctcagtatgtttctgaaatttatctaaggtcacacggtgtcgttctggttgttggtaagtatgaggagagatgatcacagaattgagacacagtagtcttaaatccagccctcagagttggaagcatggaatagcctcagtcgcacctgcctgtggtgctttgcagggtctggaaggaaggaattttcatttcttcacccaaatgtgcatatttggcttaaggaaaggaaaaggcatgctgtagacctgctctgtgtttaatcctcacggcagccctgtgatctacacggggttgctgtgctggctgatgtggggctgaggcagcaaggtttagagacccgggcagccaccaagcagcagagctgatataagcaccaggtctgtctctgaggcccggggcctttctacctcacctcgttgccttctgctgcgcctcctgtgcctcgtgaatagcgcacactgctgtccagccagcaggcactgtgggagtcatccctgataaggtgttgctgtatggtgtgcacagcttggcggccacctgccaggttggcagggagtggcctgcccctgctttacagagaaggggtgaggggttgaagctcacaggcagcatgggtcaggaatcctgctctgaccccttgactcatgccttcctcctttgccacatgggcatcagtgacatttttcagtcatccacttcttggctgtgaggttgcagatccaccttcaaatgccaggtcttttttgccttttgaaatctgagctcacaactctgcaggaggagcgggagtgtgctgtgacgcagtgcgtcacgcatagtggataatgactgacaagtgtttgttagagccttcatatgccaggcatggctccaggcactgaaaatacagtggcacataaagctgcttgctcactgtagtgggacagccgcaattagacatcagttagcatttgaacttcagtgagataatgacaccagtgaactcaaatcaaatacatcctcctctcataatgggtaacctgttgttgcttttgtttctccatggttctctaatttttttttttttttttttttgagatggtgtcttgctctgtcacccaggctggagtgtggtggtgcagtctcggctcactgcaacctccacctcctgggctcaagcgattctttgtgcctcagcctcctgagtagctgggattacaggcgtgcgccaccacactcagctaatttttgtatttttagtagagacagggtttcaccatgttggccaggctggtctcgaactcctgacctcaagtgatccacctgcctcggcctcccaaagtgctgggattacaggtgtgagccacagtgcctggccggttctctaatttttgaaggaatgctttggtgcaggaacaaagccttgtctcccctgcagctcttggtaggagtgaggaagtgtccaacctgaaatggggtggtattttgtagctcaacaggaaatgtccagatgtaaggccagttttggtttgacacattgaccatactgataggcctcctgacaggtcattctaccttcgggacctggagttccccggtacacgaggtgtaggtgtaatttacttaccagctcacatgtgcccctcatgaaaacccatggcccattcttgtccatgtagtgttgtagttatcaaaattatttctgttcttatatgtttctaatttttgcttgttcctctttcttttctttttctttttctttttttctgtcatactgccctgtgagtgtgttattgggtctgaaaaggtaggctgtcaacatgttgcattaaaaatagctagatttccctatgtgctgccttctcatagccttcactgctttaaaaaacaaacactgctgtctaaatctatatgttaactggatagtcttttcatttttttaaaatatgttttttaattttagcttttttttagcaggtaacccattggcgtttggtgtttgctaaaatatttgctctgggggatcttgttcagtctgtagcatttagtgacacaccagcctttattctttggtttgtttgttttgaggaagtgaattgctaattgatttaggcggctttagggggttttcctgggatagcttaactgcaaaagtcccaggctgcagcgccatgcttgatcctgggcttctgagcgaacgtttctggcctgtgattcccggctgtggctgtgggccgtgcatgaaggcaaggaatgctggagctggagtgtgctggtggccaggggagctgcgggagggtgcggctgtcttttcttttgcttctgcctggagcatgccatttcccatttccttcacctcagcgactttccaccataaaggagacacaggccattctaaaacccacaccaggctgggcgcggtggttcacatctgaaatcccagcactttggaaggcggaggtgggtggatcacctgaggtcaacatggtgaaaccctgtctgtaccaaaaataaaaaagttagccgggcgtggtgtcatgtgcctgtagtcccagcttacttgagaggctgaggcaagagaattacttgaatctgggaggcagaagttgcagtgagccgagctcatgccattgcactctagcctgggcgacaagagcgaaactccatctcaaaataaaaaacaaaaaaacccacaccagtcttttgcgccccttatgagggctcaagggcaatttgtttaagtgtcagggaaatacggccttctagttcacttgcatcttgcagacacaaggccctgtataagtgaccactttcctttttgcttctgccaatgagcattcagaaccagagaggcagttcaaccttagctattgtacagactttccatttaacctcatgtaggtaagacatagaaataactgtgtctgcttttttttttttttttttttgagacagagtcttactctttcgcccaggctggagtgcagtggcgcgatcctggctcactgcaaactccacctcctgggttgaagcaattctcctgcttcagcctctcaagtagctgggattacaggcatgtgccaccacaccaggctagttttttgtatttttagtacagacagggtttcactatgttggccaggctggtctcgaactcctgacctcaagtgatccacctgccttggcctcccaaagtgctgggattataggcatgagccactgcaccaagccagtgtctgcatttgttgacgctaatgtccctcactggtggcacatcatttgtttgcattactgatctagagtctccaacaccaagggcagccctgcaggacactctttggctggcctagtcccctgtggtttcatccccctcagggaaaggttctcgctctgtgacctgctgccaccacctcactgcccaggggccttgtttcttcctcagtgctctggtccaagtaccaacactttctttcttcatttgctttgtcccagttgagacaggctgggctttctgaaagatttcatcacattctagggtggtggaacagaagagacatgaatgtattaagtacaggaagtcgtagctgtccagcttggaaaatgcagggcagggatccagtggtggctggtttaaccctgggttgtgggccttttctgccgccactggctcccaggatccatggggacagcctggcccgggctccctcctcccctgctctcctggcagccgagtctcggagttcacaacccaggtgctctcctggaccgcaggcccttcagagttcagaccacaggagagtcttgagtccttgtcctgggctgtcctctccacctcctgtgtgagagacaagcgcctttcctaagtgacctgtgccaggagagacctccctcattagcaggtgacctccagaggtgactcagcacacatttacgggaagcttgccatgtgctgtgctaggtgctggggcacgaagctgtgatatactttagagacagaggtggggaagagatgatggacagaaaggagaaatctgtctgagagtgtgactcgaacagagtagccggtgggctgtttcttaccatgggggaaactgggaggccatgggggaagtgtttttgagatgcctgttgggcattcaaacggagagattaaagaggcaatcggatgtgagtccggagctcaggggcaggaggtggactagagagacacatggttgttggcagtatgtagcctgtgttgaaaaccctgaaggtggatgagctgagcgagggagaatgcagatggaggtaggaggaaggccccgggctgacccctgggtgcttgctgtgaccaggagactggaggacagcccagatcctgttttttttttttttcctgagattggagtttcactcttgttgcccgtgctggaatgcagtggtaccatctcagctcactgcaacctccgcctccccggttcaagtgattctccagccttgcctcctaagtagctaggattacaagcatctgcaaccatgccccactaattttgtatttttagtagagatggggggggtctcaccatgttggctaggctggtcttgaacgcctgacctcaggtgatcctcctgcttcagtctcccaaagtgttgaggttacaggcgtgagccactgctcctgactggggttttctatattattccacggagttaggggttttaggtgcagctgccacttcttctaaaggtactgggggtggggctgctactaaagaaatccgaagggaatgatgtggccagatttgcccttcaccgcctccgtcctggcagcaggatggagtcccagctgaacagactgtctttcccatggacccagaagggcagatcaggaagggcatcttgaggagagaggtgctggggaattgggggagggactgttggatagttctggaatagctctttttaacaaaagataaaaaacacaaaacaaaaccctcttatgaacattgtagttactattgaggaagcagttcttttttttttttttttttgagacagagtctcactctgttgcccaggctggagggcagtggcatgttctctgctcactgcaacctctgcatcccaggttcaagcaattcttttgcctcagcctcctgagtagctgggactacaggtgtgtgccaccatgcccggctaatctttttttttttttttttttttttttgagatggagtctagctctgtcgcccaggctggagtgcagtggcgtgatcttggctcactgcaagctccgcctccccggttcaggccattctcctgcctcagtctcccgagtagctgggattacaggagcccgccaccacgcctggctaattttgtgtttttagtagagatggggtttcaccatgttggccaggctggtctcaaactcctgacctcaggtgatctgcccgcctcggcctcccagaatgctggtattacaggcgtgagccaccatgcccggcctaattttagtatttttagtagagacagggttttgctatgttggacaggctgttctcgaactcctggcttcaaatgatctgcctgcctcggcttcccaaagtgctgagatttcaggtgtgagccactgcgcccagctgctctggcatcttaagtttgtctgctttggtgctttagctctaccatgtgggcaccttttagtatacttactgtatttacatcaggcacgtagtcaaaaggctccccaccccaaaacattgtagtgcaaaattatgggctgtagccattatttaagtatacaaagacttctttttttttttttgagatggagtcttgctctgtcgcccacgctggagtgcagtggcgcgatcttggctcactgcaagctccgcctcccgggttcacaccattctcctgcctcagcctcctgattagctgggactacaggcgcccaccaccacgcctggctaattttttgtattttttagtagagacggggtttcatcatgttagccaggatggtctcgatctcctgactttgtgatctgcccgcctcggcctcccaaagtgctgggattacaggtgtgagccaccgcgcctggctttttttttttttttttttttttgagatggagtctcgctccgttgccaggccagagtgcagtggtgccatctcagctcactgcaacctctgccttccgggttcaagcgattctcctgcctcagcctcctgagtagctgggactacaggcacgtgccaccatgcccagctaattcttgtatttttagtagagatggggtttcaccatgttggccaggatggtctctatctcttaactttgtgatccgcctgcctcggcctcccatagtgctgggattacaggcatgagccacctcgccaggcccaaagacttcttaaactgtgtaataccatccccgaccctgcaaaagagattctctctatccaggttcccttggattttaattgcaaactgttgttgttgagcagctttagcttttctttggatttgaatgtagaaatttatttgccagataaattgttttttggactagaataccaagctcttgttttccataagccatataaatagtaccaaaatcagaaaaatattaagcattttcttcttttttttttttttttgacagaggctcgctctgtcgaccaggttggagtgcagtggtgcaatcttagctcactgcaagctccgcctcccaggttcacaccattctcctgcctcagcctcccgagtagctgggactacggcgcctgccaccacgcccggctaattttttgtattttcagtagacacggggttttgccgtgttagccaggatggtctcaatctcctgaccttgtgatccacccgcctcggcctcccaaagtgctgggattacaggtgtaagccactgtgcctggcctcattttgtttttatacaatttaaaatatttgtatggttttattgtattatgactttcatatgaaaaactataagagtatttatatgactttttgtaaaagtcctatgttttcaaaacaaattgtttatcataatgtttgcacttttaaaaacaagttatgtatttagaagatgctactagaaaaatatttttgaaattttgtgggttatattttgctacagcaggtgtacacttttgtgaagttcatgtgaagatgtaataatttactcctttctttttttaagggacaggatcttggtctgttgcccagattagagagcagtggcaaaatcatggctcactgcagtctcgaattccagggctcaagtgatcctcctgcctctgcctcctgagtagctgggactacaggtgggagccaccatgccaagctacttaaaacaattttttttgtaggctgggcacagtggctgactcctataaatctagcactgtgggaggccaaggcaggtggattgcttgggcccaggagttccagaccagcctgggcaacatggtgagaccttgtctctacaaaaaatataaatattagctgagcaaggggttgtgtgcctgtagtcccagttacttgggaggctgaggtgggaggatcacctgagcctttgtagagacatggtcttgctctgttgcccagccgtctcgaagtcctagccttaagtgatcctcctgccttggcctcccaaagtggtggtattacaggtatgagccaccatgcctgacctaatttacttctttaggatgctttaaagcaaatcttttctaattggttaggagtaaagttttgttgttgctttaaagtctaatttaaaatatattaaactaatatacagtagtatttgtaaacttattcatgtattaagagttgacagttatgttactggtggaggaaaatgtccatttggatactgagtttttttttcccatttggaacaggataacataccaaggaagtgagcaaaacactgtctacctttgagagtaagagctggctgggcaaagaactgtaatcccagctctttgggaggctgaggcaagaggatcacttgagcccaggagttcgagaccagcttgagcaacataaggagaccctatctctacaaaaaataaaaaacaattagccaggtgttgtggtgcacacctgtggtcccagttactggggaggctgaggtgggaggatctcttgagcccaggacttggaggttgcagtgagctgtgattgtgccactgggctccagcctgggcagcagaataagaccttgtctccaaaaaaaaaaaaaaaaaaaaaaagtaacagtgttctagaaacacatcaaggacacttaacccaaagtgcagaggttggagtcagggaaggcttccttgagaacctggtcattgagatgagcctaaaagagagtggaagttgtgaggcggatagagcctgaggttgggggacttcagcgttgcagcaaggttgcctgtggagtgcaaagccacagtggtaggaggggaagccagagccgtgggaggggctagctatggactgcatgcctctccctacgactgaattgagcatcctgtgaaaggtttgcagtgggggagggacacagactgatttgtgctttgggaaggacactctggctgtgtgtgtatagaagcaatgaaggggaagggggtgcagggtgaggagtcagagactaggcggaggctgctgaggtgactgctgttgggatgggaagagcagctcagatgcctttcttttcttttcttttttttttgggagtctcaccctgtcccccaggctggagtgcagtggcatgatctcggctcactgcaacctccgcctcccgggttcaagtgattctcctgcctcagcctcctgagtagctgggactacaggcgcgtgccaccacgcccggctaattttttgtatttttagtagagatggggtttcaccgtgttagccaggatggtctcgatctcctgaccttgtgatccgcccgcctcggtctcccaaagtgctgggattacaggcgtgagccactgcaccctgctagatgctgtattttcttatggggagggtctgttagcaggggccatcctgacactgccttgtggccaggaaggagacaaacgaaggctggcgtttctttttctttctgcgtctgccttacgttgtgatctttgtttaaaacttattcagaatggaaatgctaaattccagagtaacaaagagtttgttgaactcgttagagttacacatgataggatttaacattgtattgagatgtgtcaataacattcatttacttagaaacgtcacatcttctggatttccagaggagttttattcttgataagtttgctttcttgatgagggaaagtttaatccagctgcagtttttctttaaaaaaaaaatcatctatcttaagaaatataacatttaaaggttagatgtatttaaaaatgataaaaggaatactttggtacagtttctttggtttctgagttgattagggactcagaagcctttgcattatttagtggtatatccttgccaatatttaaagagctgttagtgagcaccccaggccctgctctctggaagctttcctaaagcttgccctgaaatagcgaggatgaacgtcttgtttgctaaagccaaatggttggctaataagactcagcatagctgtctttataaaataataagaggtttgatgttaagaagtggaagataattgatttttttaaaaagctgaaacataaacttccttatgctaatgttacaactggaaaatctaaaaagaaaaatccaactgtaacattgcctacgtgaaagacatggtagaagtccttacgtaccgatcacctttaaacaaattgcttggcagtacatttttgaaattaagaccactccagctcacataactggcaatgattattgctgacttaaaattatagagcctacagttgccttcttagcatttttagtagtgagagaattgaatagtgcttagtcagagtgctttctgggtgggagttgtatagtaataaagatacattttcatgtattttctagacattacaagaagcggtgccaaggccgcatgcggaagcacgtgggggacctgtgcctgcaggcagggatgctgcaggactccctggtgcattaccacatgtcggtggagctgctgcgttctgtgaatgactttctgtggcttggaggtaagatgagctgatgaagatgatctgatatgtaattgtttcaactgttaattaaaatgagaggctgggtgcggtggctcacgcctgtaatcccagcactttgggaggctacggcaggccaaatatgaggtcaagagattgagaccatcctggccaacatggtgaaaccacgtctctactaaaaatacaaaaattagctgggcgtggtggcacgcgcctatagtcccagctactcgggaggcggaggcagcagaatttcttgaaccaggaggcagaagttgcagtgagcagaggttgcacaactgcactccagcctggcaacagagcgagactccatctcaaaaaaaaataaaataaaataaaaaaagaaatgagaggaaacggcagaagaaattccccaaaaagaagggatgagggaggaaaagcagccagcctgtgctggttgccacgagcagtggcctgggatgcttccctgctgtatctgctgccctcctcccaccctgccatgcgtcctctgaaggaggccctgcccacactttcccttttcctctgttcttagtataccttgccctctgctttggatgccgttccccatgatcttcacctcttagactcctccctcaaaacctcctccatgtgtcacatgatgaatggataaacgaaatgtggtatgggcatacagcggaatattattcagccatgaaaaggagtgaaattgtgataccactgcagcacggatgaaccttgacaactttgtgctaagtgagagaaggcaggcatgaaaaaggccgcagattgtatgattctatatatatgaagtggctagaataggcaaatctatagaagcagaaagtagacaactggttctaggggctgggaggagggggaatgggaagtgacagttaacgggcataaggtttctttctggggtgatgaaaatgttccagagtcagttagtggtgatggttgcacagttgtgaatatactaaaaactgctgacttgcacactttaagtgggtgaattatatggtatgtgaactctatgtcaatcttaaaaattaaaagaaagggaagaagaaatcctacttcaaagcacagccatctctgatcccccgcagcagtcggcagagcgggtgccctgcctgagatgttgctgacacttcgtggtggaatcggatgtctgtgtgtggtcttccctttggggactgcgcctcctggaggtggtcctgggaggatggactggctgagtccattgtgtgggtaaggactaaaacagggttctttcgttgaggttgacagtttagcaaggacacctgtcagccacttatgataatacaagtcggaatgaagtaatgaggtgagttctgtaacagaagtttaacgaggtgccgtagaacatattaaatataacaaattctttcgttcttggggacggagtctcgctctgttgcccaggctggagtgcagtggcatgatcttggctcactgcaatctccgcctcctgggttcaagcgattctcctgcctcagccttccgagtagctgggacttacaggcatgcactaccacacccggctaaattttctatttttagtagagacggggttttgcgatgttggccgagctgctcttgaactcgacctcagctgatatgcctgccttggcctcccagagtgctgggattacaggcataagccactgtgcccagccaaatataagaaatacttcaaacggccaggcatggtggctcatgcctgtaatcccaacacttctacaaaaaataaaaaataaaaaaatcttacttcacctcacttctacaaaacaaaattaaaaaacattaactgggtggagaccagcctgagcaacatagggagacctcacttctaccaaaaaaaaaataaaataaaataaaataaaaagacattagctgggcttggtggtctgtgcctgtagtcccagctacttgtgagggtgaggcaggaggatcgcttgggctcaggaggtcaaggctgcagtgagccacgatcgcaccactgcactccatcctgagcaagagtgagactttgtctcttaagaaaaaaccaaaataaaacttaaaatggacttaaatttagttttttaaagaggctagggaaatagaagtggggaaagaaagggagtaagaattagggatggaaaagaaaagagaatcagataaaggattatgcaggctgagaaagacatagttttacttggttttcttgaaagagcgttgtctccctaagtactccttattgtatcaattagagaatctgtgcatctcccagtgggctctgagactagggcatgtgcagcaggtgcttctccagaaagactggtactgcccatatgccttccccatgcggcgctggactggatgaggagggctcctaaagggcacacagagaaggacggtgctgtgtgccgtgggcctcttccatgctcagcctctcagaagtggacagtggagttgtccacaagctacttaggcctgacatcacagcagactgaatgtagaagctgatagaagatccagctgacttgtattaactctgatattaaagaaatgtgtgaacatgtcaaataatgccattcctccagtactttatttttgttttggaaaacaattatttttcataaaactgttaacacatgacaagcttattattttattttttatttttatttttttgagtcagtctcactctgtcgcccaggctggagtgcaatggcgtgatttcagctcactgaaacttccatttcccaggttcaagcgattctcttgcctcagcctcccgagtagctggggctacaggtgtgttttatcatgcctggccaatttttgtatttttagtagagtcagggtttcaccatgttggccaggctggtcttgaactcctgacctcaagtgatccacccaccttggcttcccaaagtgctgggattactggcatgagccactgcgtctggcctattttaagaggaattaatacataaatacttaaatccttttctcagttttattttccaatatggtaaatatctacaggtgtaacccacatcacaaaaaaagctctttgtgatcctaagtcatttttaagagcatcaaggagtttttagaccaaaagtttaaggagcactgagttaatggataaagatgatagagatgaatactgtggcacaccttctaaggcatgtggcatagctggagattattaggttgttacgtcatgagagaagaacggactgtgtagcgagttaatatggctgtttttgaggaagagggaggactacaacctcaaaaggagcagatgcctatggggtgcatggtctggaaaggcattctggtcttgctttggtgctattactgtgaaatattttcaatccagggcactttctgttatacatctctgtagctccagaacctggcgcagtctgccacacagtttgtgcaggaatgccggccacgtgaatggatgaacgcagaggctggcctgttttacgtgtgcagtcagccctgcagggaaaccttgagtgtggtgagagtgttctgcattgcctgcctggacatgggcatgggaaagacaggtggcaagttcccatttgcaaaaaactagtgatctttaggtttgatctttgttttgggagaaaaattggcatttccaaataatccacctgtttaaatcattgttagttactgcagtttgagctaatgaagggtcactgacttgactaatgatgctggtttttgttttttgttttcttaatgcccagctgccctggaaggattgtgttcagcttctgtcatctatcactatcctggtggaactggtgggaagagtggagctcggaggttccagggcagcacccttcctgctgaagcagccaatagacaccggccaggtgagctctgccctttttccggcctctgctcacttgcagtctttaaataaagcagactcatttgttactttttcctttgagttaggactaatatttaaataaactgtaaaatctgttgagtcagtaatttttttttttttttgagacagagtcttgcactgttgcccgggctggagtgcagtggcgcaatctcggctcaccacagcctccacctcccaggttcaagcaattctcctccctcagcctcctgactagttgggattacaggcgcccgccaccacacatggctaattttttgtatttttaatagaggcggggtttcactatgttggccaggctggtctcgaatgcttgacctcgtgatccacccgcctcggcctcccaaagtgctgggattacaggcgtgagccaccatgccctgcccagaaatcttgtatgagacattttgttctgattttattgaatactttcaatcttactgaataccactaatgggttagaatgattggttgatttctggaatacttgtgtaaaatttcctggtagaacagacttgaggttctgtgtctaagtcttttttataattttatgtattaggagaagctagtcccagaggtcaattttaataagctgattcagggcctgggagcagtttcttattttattggctgatgacattctctcaatgagttgtttgatttgcttatgcttggtagaaccaatgaagagtgagaaaacttcttgggtagagcagacccacgaatgctgaatgaacatgaacgttttggtccttgatgaatgaacctgcctttaatggctcaggatttagtcatcatgttgcataggtcacaaagaaggaagcaacaaaataatgaaagcagggatttattgaaaacgaaagtacactccacagtgtgggagtgggccgagcagcgggctcaagggcacggatacagaatcttcttgggtctaaatacccactagaagtttcccattggccacttcatgctcacctcttgtaaatgaagtggtagcctgcagttagtctgattggttgcggaaagcagccactcagaggctaaggtgaagttacaaagttatgcttctatgcaaatgaaaagtagacaaagttatacttctctgcaaactaagactccaccagcaatcagtctgagtggttccggacagccagtttcccacctgccatgcagaaaaggtcaaagggagcagcctctggtccttttgttacttagtcatggaaagttagggttttcctttcaatgtagttgtaggaagtctgtgtgaaacaaccttaagttctttgcctctagatcctattcttctgcctcaggcttatcttttttgtgattgagaaaattttgatttttttcctgtatctgtaatagatgagaaaagtaaaaacgttgatttgacatcagttacttttcctttatagattgactacaaggggacattgttgaatagattatgtgtgtttttgttgttgttgttgttgttttttgagacagagtctcgctctgtcacctgggctggagtgcagtggctcaatctcggctcactgcaacttctacttcttgggttttagtggttctcctgcctcagcctcccgagtagctgggattacaggtgcccgtcaccacacctggctaatttttgtaaatttcagtagagatgcggtttcaccatgttggccaggctggtcttgaactccagaccataagtgatctgcctgcctcggcctcccaaagtgttgggattacaggtgtgagccaccgctcctggcctgtgtgttgttttttgagacagagtcttgctctgttgcccaggctgaagtgcagcagcatgatctcggctcactataacctctgcctcccgggctcaagtgattcttgtgtctcagcctcctgagtaacaggattacaagtgtgtgctaccatgcccagctaatttttgtagagacgaggtttcgccatgttggccaggctagtctccaactcctgactcaagtgatccacccgcttcggcctcccaaagtgctgggattacaggtgtgagcactgtgcttggccgattatgctgttttaatatataaataaatgtgtttgtatttcaacaaaattgtatgattaatagttggcagtcctttgggaagtatttttttgtaagacacttaggctatttactgactgaaatatagagacatgactttttttttttttgatacagagtcttgctctgttgcccaggctggagtgcagtggcgcgatctcggctcactgcaacctccgcctcccgggttcacgtcattctcctgcctcagcctcccgagtagctgggactacaggcgtccgccaccacgcctggctaattttttgtatttttagtagagacaggatttcaccgtgttagccaggatggtatcgatctcctgacttcatgatctgcccgcctcggcctcccaaagtgctgggattacaggcgtgagccactgtgcccggccagacgtgacttttatgattatagggttggtatagattaaggtggcttttggtatagtgcaaaatccaaggactaggagaaagctttgccactgattgctagaagaacaaattctctgggtctcaacctcactacctgtagaatgaagagagtgggccagatgctcgagttttcttcctgttctaagattagtttctatgagcctgtgtcttctgtttatatttaggggtgttaaagtttttggattaaatactgaatactgttcccttccttgaagcagatttcagtatgtgctagttacacttttagttatggtctctgagcatcgtattttaaaaagccctgttgatcatttcttattatgccaacaattaaatttgttacctttttttttcagcaacctggaaagacctttctggccataggtggcgctgttgtacacatatatttttaatgtcctaatttccctgttggtgaaagaagacttagacaaggcttccttcatttgaattttgctgttgttgttgtttaatgctttagaatagcactatgcccattatatttggatacctggaaaagtattctagttatttttattatgtcatttcagcatgaaaatttcagatgtgcaatgtggacagtggtgaaattggacttttcttccaatgtcagaaggcagtcagccatgatttataaaagagatagaaactgtctggagcaccttaaagctgaaaagaatctggaactccctgagtattgcacccagttttgcatgtttgctagtgggtggtgttgtggtgtcatggaaaagcctcgttcagctggcttgtgtctgaatgcaagtcctacagttctttctcaggtgccccccacctcctcgctctgcatctatgagcaggggctcctaatttctgctttgtagaattgtgagaattagagagaatgtgtgcaaaatgtttagcgtggcagtcatctcataaaatatctcacgaccattagctattattttatatgaagtcatcattttatagtgtttggaaattactaaggcattgaaataggaaaaatgttttcgtgaagagagactcaggaaatgaaggaaatatttgaggtgggtcagtagtttttatttttatttttttttttgagacagagtctcactctgtcgccgaggccggagtgcagtagctcactgcaacctctgtctcctgggttcaagcaattctcctgcctcagcctcccgagtagctgggattacaggcacccaccactacgcccggctagtttttatatttttagtagagacggggtttcaccatgttggccaggctggtcttgaactcctgacctcaggtgatccgcctgccttggcctcccaaagtgctgggattacaggcgtgagccaccgcgcccggcgaggagggtcagtagttcttatacccataatttagctgcaggtttagagacatggccgttatgtagccatcttgacctacccaagccacagaattatttgtggattagtatatgttggggcttaaaggggcccaataaaaacacccctgttttcttcaacaaccaactgagagacgagacaagagtaaggtagagaataaaaattccgcccttattagtgatgaaaccacattctctgccgggcatggtggctcacacctgtaatcctagcactttgggaggccacagtgcatggatcgcttgagcccaggaatttgagaccagcctgggcaacatggtgaaatcctatctctacaaaaaatacaaaaaattagcctgggatgttggcgcgtgcctgtagtcccagctactcaagaggctgagttgggaggattgcttgagcccaggaggcagaggttgcagtgagctgagattctgccactgcactccagcctgggctacagggcaagaccttgtcttaaaaaacaaaaaacaacccccacattttccatgaacttgagggatgcagaaaaatgggcatcctactactgtgtgtccaagatctggtggctctgggccacagcagaccttcctacgaggggccctctccctgtcagccataggcatggcggagcagaacatcccgtgtgcttcctgagtgcagcacccaagggcaaaagaaggggttcacatgcccagcttgtctcccaaactcatcttacacctcactccacttgggtgggggaggaatgggggtgggcaagaggtcagtggtgcttaggacaaagcctttattatggaaaccagaggagtgaagagcaagtgccatcttccccctcagtttaaataggtcatggggtgacagttctttctttgtaacacagaaataaggatatcctttgctatttagactagtaaggaaatacaaaggatgattagaagggacatttgtaaaatcactgtaacagataacattttttttttttttttgggatggagtctcactctgtcatccaggctggagtgcaatgtcgtgatctcggctcactgcaacctctgcgtcccgggttcgagtgattctcctgcctcagcctcccaagtagctgggattacaggcgcctgccacctcgcccagctaatttttgtatgtttagtggagacacggtttcgctatgttggccaagctggtctcgaactcctgacatcaggtgatctgcccacctcggcctcccaaagtgctggaattacaggcgtgagccaccacacctggctgataacatctgttgaacatttaaaatgtgctacacacattttatttatttttatttttttgagatagagtctcactctgttgccaggctggagtgcaatggcacaatcttggctcactgcaaccgctgcctcccgggttcaagcaattctcgtgcctcagcctccccagtagctgggattacaggtgtgcaccaccatgaccagctaattttcgtatttttagtagagatgtgggttcaccatgttggccaggctggtcgcaaactcctgacctcaagtgatccacccacctcggcctctacacacattttatatacaccaatttaaccctttaatcttcacaacaaccagataaggtaggttggattattatcccagttttacagatgtggaaactgaggcatagacaggttgaggaacttgaccaaggttatggagctagtaagtggcagagctgggatttaaatcctggcagttggccaggtgcagtggctcacacctgtaatcccagcactgggaggccacggtgggcagatcacgaggtcaggagttcaagaccagcctggccaatatggtaaaaccccgtgtctactgaaaatacaacaacaacaaaaaattagctggacgtggtggtgcgcacctgtagtcccagccacttgggaggctgaggcagaagaattgcttgaacccgggaagcggaggttgcagtgagccaggattgtgccactgcactccagcctgggcgacagagtgagactctgtctcaaaaaaaaaaaaacaaaaacagaaaaacaaaaaacaaaacaaaaaacccctggcagtcgggctgagcttcagtagattggcttccggggtttagaggtatcagcatatctacagttccatgtatacatctatacatcagtcagggggttggccagtgtggaaagggtgggacagagagagttatgcagcgctggcatttgtgtcttggccactgtccacagagagtgcactgcggtttgcattaatcatttgtgtaggcagcaggtttctccctgtaacagaactttagtccatcaaattcatctagaaaactcctgttcagagaaagtggagttttctagatgaacttgatttgtatttcaacaaaatacaactactgaattctgtttcagggaagggagtggtattcagttccccatctgaacactttaatgcccctaaatataaacaaaagatgaggctcacagaggcttaccttagaacaggaacaaactgaagcatcggcccactctcttcattttacaggcaggggtgatggtgtgaggctttgttattcaggtgtcaggatcctgctgtagaggtgacaaccactaggaaagggcctagaaaccagcatttggtgtgtgagggcatcctctgtaatggtcccaaatgagacgtatggacctgatttctacttatctcctgcctgtgatttggcctttgaagagaaaatgtgctgatcgttgaaccctgatattttggtctgattgataattttgtgtctcccgttacattaatagttaaacctccagttttcctacactggtctcttacaagtttggttaatgtgaaatcagtccactagaggctgatgatactaatagtcaaatgattgatgattgtgataataactctggggcatcaaaagtttaactcatatcccctacctaaaggacatggcatagtataatatatttggccaggttcttcacagaacaaaacgtttctaggttatctggaaatccagacttcctcaaggtctgtgcagctgaacgtctgctcagtgcagaccttggacctggtgttgtggcgtgtgtggcggtggggcttcccttggctcctctgggcttcagtctccccataggcagggagggttaatatctgtttattttgtagggttgctctgaaggtcatacatgatatttgttaagcatcatgcttggcagaaaggtgttattcaatggaaaacacctgttttttattttaatggtggcgtcaagattgcagtgatttttagtctgcgtttacaaacagatggctgtacacaaaatagctcttaaatagcaccataatcatggggcctcttctctgtgtagacaattgaatacatgtgctatttccataagattattgggacatacctttttgaatcttcttaacatgtttaaaaatgaaaatagctaatgataaacatgactcttggaaccagtaccccttgaggtgtgttttgccatgatgggaaattgcattctatagagaagttgaattggatcacacagatgtttgggtagtttagcagaccaccaaggctttcaaaagtttcttcataatagtgaagttaatagttttgtattttaagctaactacaaagctaccttctaaaagctggaaatctttaacttgatgaagtgtccaattattctgtgtgtgtatgtgtgtgtgtgtgtgtgtgtgtgtgagagagagatatatatatagagagatgtattttaggggggttgtgaaaagttccacagagccactggcaccttttctcccccattctaggctgctgacatacatttgcacaaataataatcctttgtcacttggcttatttgtggaaataaggaattgtcatacttgtttaagaagagctggcaggccgggcatggtgggtcatgcctgtaatcccagcagtttgagaccagcctggctaacatggtgaaacccgtctctactaaaaatacaaaaaaaaaaaaaaaattagccggtcgtggtggcgcacgcctgtagtcccagctacttgggaggctgaggcaggagaattgctggaacctgggaggcagaggatgaagtgagctgagatcacgccactgcactccagcctgggcaacagagcaagactctgtctcagaaaagaaaaaaaaaaaaagaactgggagcatgaacatagaaagtgggaaggcagagaggtgaggaggcacttaacaatttgtttagggtatgagtaatagtagcttttcttttctcttttcctgtctgaagcaaaaaggcaccaaacttgtaacatactgttcctcagaattgcttttctgatcagatacaagtcagatttttctctaggctatgtgaattatgaaatgtgttttagtagttatttttaaaagtagttttgttttccaaataaaataccataatctgttctttcttccaggggcacaggaagttctcattgatccaggtacatgatctatgtgtttagtttcttttggttatttttttaagtgcttgtttcatggtgatgtgaatgaatggttaaaatttctggatgatgatctttggaacattctgatttaagtaactttaaatcagaactgttaaaagcttgatgattgattggtgggtccttgcttgatgggcaccccgttgctttatgttgtctgttgaagaggaggcttcttcctctagcatggctaagtgaatgatttgagaattgtgcctttaattctttgaatgcattgagcatgtttgtcctgttaattttgaattcatttgtaatcacgactttgctctgatttgtggcttgtgctcccttccacgtgagttaattctctactgcatttcgtctgtgtgttcttaacagggaaagaaatctcgtagtttttacaaaggcaggtttttcttccccttgtaatatcttctgtaattaatacagcaaaaacctcttttattacagtgcttaattatttcatgatgagctctattattttctgacttaatgagaaacaatgacagggtaaataatacaaaatgaaaacagtctagaattgaaatcagatggctgtgcttacacagcctttgtgactaacacattcgctttcatcgcctcgtgcatcttggctctgaaatgaagttgccccaggtttgcaggcgttggttttaacatttgcgttcactcctttctctaggccgtggctaagtttcctgatggagtttgtggaatgtgtagagaaaggacaacaaatgcttagttttggtttcaggagacctgagttgctgatgagaaggcatctgggggacagtcaggcgggcagactttatgccactgaagagctgaaagccccgccaacactgatgacaaatgaaatggatgttgaatgtactggtatttgaccagtatgagttgctgagccccagtttggctggttatgcctgctataaaatactgaattgcagtgtgtcaatcacattagttgtaggagaattagatgtgtacaccatatagaagtagcttagagctataagaaaaatcaggcgtttgttgagataaggcattttaaaaagatttccgacgcttttcaagataaggttgtgtagaggtgaaattgagtttagagtgttgggaggaaaagtgaggagattctgtggggctttgttattcaagggtgcatcaaggttctgctgtagaggtgaaaactgccaggaaggacccagaaaccagtgtttggtatgtgaggacatcctctgtaatggtcccaaatgagaaacgtgtggacctgacttctctttaccaatgggagagcgagtaaagagaatgagatgccgtcctggccccacattctggttcctgccttccaggccacgccagttcctgctaatgccttctggcctctgctcttggggacctttgtatcaggactgactcgctactgaaatcatatctgtctttcaagcgttggtcctttctaaacccttgcaaatgtgttagcagtgacagtgctggtagggaatcttcctagctcctaggagcaatgcaatttgattcttcacagcctctctatctgaatagctaacactctctcaggggttgtaaaattgttcagctcccggaaaacccattcatgtgaagctatcacaaaattacatcactttcatttgatttttgagttttaaatggacataatgtttgaagcaaactgtttccaaatttttttcctacccgctttcctcaccaccgtttccaaaaccggaagaagagtttcacggttttcgggggctcctccatctctcatcctaagaactaagcttcccctcccagcatttctagcagctaggcctttgtgttctttatctgcatttttaaagtggaatgattcttaaaactcttttttcttgtgtttttttctttcatttctttcattttttttttttttttggagacaggttctcactctgccgccaaggctggagtgcagtggctattcacaggcgcgatcctagctcactgcgcccttgaactccaggcaattctgccacctcagtctctggagtagctgggactacaggtgtgtgccaccatgcccagctaattttttaattttttcatagagatggagtctctctctgtgttgacccagctggtcctggcctcaagcaatcctctcacctttgcctcccaaagtgattacaaacatgagccactgtgcctggcatcttttttttttttaatttaatttctaaacatttcgtgtacattcagcaactactttacgtaaaatgatcttttggataattttagttgactcataattgctttttccgttttcatgtggaggagagtttcttcttcctgtaataaaaatgagcagtttgcacttattatgtgagagacactgttctaaggtgcttttttttaaaaaaacaaacaaacaaacaaacaaactagttttaatgcagtttacctatttaaagggtaaaatccagtcatttttagtatatttacaaagttgtgcaaccctcaccacaatcagttttaggacattctcataaccccagcaggaagccatatacctgttagcagtcactctcctttgcctatgtccttcccttacccccaagcaactagtaagctattttctttctctattatttgcctgttctggacatctcatataaatggcatcatacatataatggtatgtggtttttgtgactggcctctttcacttactgtatgtttcaagcttcatgcgtatagcacgtgtcagtatgcatttctttttcttcttgcagaataatattccattctgtgtatatatatatgtatatatatgtgtgtatatgtatatatgtgtatatatgtatatatgtgtatacatgtgtatatgtgtatatatgtgtatatgtgtatatatgtgtgtatgtatatgtgttatatatgtgtatgtatatgtgtatatatgtgatgtgtgtgtgtgtgtgtgtgtgtgtgtgtgtatgccacattttgtttttccatattccatcagttgatggacatttgtatcatttgtaccttttggctattatgaataatgatgttataagcatttgtgtggacatgtgtttgttttatttatttatttatttgttttttgagatggagtttcattcttgttgcccaggctggagtgcaatggtgcggtcttggctcactgcaacctccgcctcctgggttcaagcgattctcctgcttcagcctcccaaatagctgggattacaggtgcccaccaccatgcctggctaattttttttgtatttttagtagagaaggggtttcaccatgttggccaggctggtcctgaactcctgacctcaggtgatcctgcctcagcctcccaaagtgctagtattataggtgtgagccactgtgcctggcccatatgttttaaattctattatgtgtatgtctaggaaggggagttgctgggtcatgtggtaactcaacgtttaactttttcagaaactgccagattgttttccaaagtggctgtaccactttacattactactagcaatgaatgcaagttctaatttctctgcatccttgtcaatacttgttacctttttgattgtggccatcctggtggatgtgacctggtgtctcattgtagttttggtttgcatgtccctcgtagctaatgatgtgcatctcttcatgtgattattgtcatctctatattttctttgaaaaaatatctatttagatagttaccaatttttaaattgggttgtctttttgtctttttattgttgagttgtaacagtttttttttttttttttgagacagaatcttgctttgtcgcccaggctggagtgcagtggtgtgatctcggctcactgcaacccctgccacccgggttcgagcgattctcttgcctcagcctcctgagcagctgggattatagacacatgccaccacgcccggctaatttttgtatttttagtagagatgaggtttcaccattttgaccaggctggtctcaaactcctgacctcaggtgatccgcccacctcggcctcccaaagtgttgggattacaggcgtgagccactgcacctggctagtaacagttttttatatattctatatatgagtcctttgatatatgattcgcaaaatttttctttcattctgtgtgttatcttttcattttcttgatatggtgtcctttgaagccaatacaagttttaaatttggatgaaatccagtttatgttttctttgttcctgtgcttttgatgtcatatctacgacttaaggtgctctatataaactttacacctaaagcaatttaatcttcacgattctaggagacaggtactgttgttatccctagtctataaatggggaaactgagatgcaggaaggttttctgactcgctgagggtcatagctagtaagtggtgatgtgggcattcaaactcatgagtttgcacccaggatttatcctcttaaccaccatactctattgctttttttagggaatcatttactgaaaactatttgcttgtttgatttcttgcccgttttttttttttttttttttttttgtcatgagggaccttatctcttcattcaccttgcagagttcggcgtaggtttatttttggtcgaatgtaggcagaatcattgctatcagttaatttctgcattacttactctgcagtggtgatcactgctagttgagctaacaaagtcatttaaggcttttctggtcatcacactaataaaggtagtgtcatgactacagaaagttcaaaaacagtatttgattgattccatttcgttaactaaaggaaaaaaatccccagtgttgacacagattgtaagcctttccagaatacggtcgttgtcttcctttttttcctgttgttccctcgcacagtgcctggcatagtgcctcattgtccagcggattagctagagtatggcggtcttcagtcactgtgtacaatgacagaattttgacaacagtatctgttgtttgtttcacaaggtaaaaatcatatagaaatatctctcagatgtatagaaaaagcctggaattttgtaaagacttccagaaaacaaaaacatacaaaggtattttcactgcttttagatgtcttagacgtattatggttacacaacagagtaaattcgttaactagatttgacaagtcatgtaatattgattacctgtcataatttaaaatattctggctccattaaagtaattagtgcccatgagtaagcaaaaataagctaacatttatatgcagcatgggggtagactttatatatatgtgtgttcatgcatgtatttccgtctttcagaggctttggcagcttttcaacaatattctaactttagaattctatttaaaaaatcatcactgtggctagtgcactttgggctgagtttatcctgtcttatgcacagaattccactgtctcctagggaaaggtttccttccattatattgagttaatatctgaattacaggagctgtgatttcttgaactcctggccttaagtgagcctcttgcctcaacctcccaaaacgctaggaatttaggcgtgatccacattacctggctggggctgtaatttctaggccttttcctctccatgtgtttaaagttgactatcaaatgtgattttccctttgtttgttgggttttcattggtcaactagaacttttgaaaatgaatttgtttttatatgttatacaaatttccctaggaacttgatgggtttttgcttttaagttttcaatttatgaaaaacttaaatatactcttatttataagttatttttcactagatatttgtttatctctttatacatttttttaagcagtaggtgtgcatgtttaaaaaataacttatacatgtaacaaacctgcacatgtaccccttgaacataaaagttggaaagaaaaaaaaatgtaaaaacaaaatcatgttttttccttattgtaaaagtcatcttcattatagagaatttagaaaataaaggtaaagaaaataaataaatttaaaaattacccatacctcccccaccccaggtaggttgtagtaaattttgaaattgggaagtgtaagtcttctgaatttgttcttttcttctcaagatagttttggttattctggatcctttgaatttccgtatgaattttaggatcagatggtcattttctaccaagaatccagctgggattttgatagagatttgatagagattctccaaactgttgatcagtttggagaatattgccattttaagaagattatatcttgtaatccatggacatggatgtcttttcaacatttaccttctttaattttttttagccaatgttttgagttttcagaacatcattttatactttttatgggggttaaattttttgggttaaataaaaagtattttattctttttcatgctattgtaaatggaattgttttcttaatttcattgtcacatggttcattgcaagtatatggaaacacaattttttgtgtattggttttatatccttcaaatttgtggaactcatttcttagctctaaaagttttttagtggattttttaggattttctagaggcaggatcatgtcatctgaaaagagacagagtttttcatcgtttctcttttttttttgagacggagtctcactctgtcccccgatctggagtgcagtggcgcaatctcggctcactgcaagctccgccttccgggttcacgccattctcttgcctcagcctcccgagtagctgggactataggcgcccgccaccacgcccggctaatttttttgtatttttagtagagacggggtttcaccgtgttagccaggatggttttgatctcctgacctcgtgatctccttgcctcggcctcccaaagtgttggaattacaagcgtgagccaccgcacccggcctcttcctttctaatttggatgacttgtcttatccttgattgtagggagagtcttttatcatgaagcatgatggtagctgtgggtttttcacagatgccctttatcaggttgagaacattcccttctatgcctcgttttttgttttgttttgttttttttttttttttttttttttgagacggagtctcactctgtcgcccaggctggagtgcagtggtgcgatctcagctcactgcaagctccacctccgaggttcacgccattctcctgcctcagcctcccgagtagctgggactacaggtgcccgccaccacgcgcggctaatttttttgtattttcagtagagacggggtttcaccgtgttagccaggatggtctcaatctcctgacctcctgatccacccgcctcggcctcccaaagtgctgggattacaggcgcgagtcaccgcgcccggccaattttgttgtatttttagtagagacggggtttcaccgtgttagccaggatgatctcgatctcctgaccttgtgatccacccgcctccgcctcccaaagtgttgggattacaggcgtgagccaccgcgcctggttagcctagtttgttgagtgccatcacgaaagggtgttgaatttatcaaatgctttctttgtgtctgttgagatgatcatgtggttttgtcctttattctactaattttcagacattaaactaaccttagattcctgagctgaatcccacttgatcatgttgtataaacctttttatatcatgctggattcagtgtgctaatattttattgaggatatttgcatctgtctgtctgtctgtctatctatctatctatctatctatctatctatctatctatctatctatctttttgagatggagtctcgctttgtcgcccaggctggagtgcagttgcatatctcggctcactgcaacctctgcctcccaggttcaagcgattctactgcctcagcctcccgagtagctgggactacaggcatgtgccactgctcccagctaatttttgtatttttagtagagacagggttttatcatgttggctaggctgctcttgaactcctgacctcagtcagtccacctgccttggcctcccaaagtgctgggattacaggcgtgagccactgcgcccggccttgcgtctatattcataagaaatgtggatctgtagttttcttttgatgtctgtttctggttttggtattagggcaacattagcctcatataatgaattggttaacgttccttcctcttatgttttctggaatagtttatgaagaattggtgttaatttgtccttaaatatttggtagaattcaccattgaagacagctgtacctggcctttctttatttttattttttattatactttaagttctgggatacacgtgcagaatgtgcaggtttgttatataggtatacacgtgccatggtggtttgctgcacccatcaacccgtcatctacattaagtatttctcctaatgctgtccttcccctagccccccattccctgacaggccctggtgtgtgatgttcccctccctgtgtccatgtgttaccattgttcagctcccacttatgagtgagaacatgtggtgtttggttttctgttcctgtgttagtttgctgagaatgatggtttctagctgcatccatgtccctgcaaaggacatgaagtcatccttttttatggctgcatagtattccatggtgtatatgtgccacattttcttaatccagtctatcattgttggacatttgggttggttccaagtctttgctattgtgaacagtgctgcaataaacatacatgtgcatgtgtctttatagtagaatgatttataatcctttgggtatatacccagtaatgggattgctgggtcaaatgatatttctggttctagatccttgaggaatcgctacactgtcttccacaatagttgaactaatttacactcccaccaacagtataaaggcattcctatttctccacatcctctccagcatctgttgtttcctgactttttaatgatcgccagtctaactagcgtgagatggtatctcattgtggttttgatttgcatttctctaatgaccagtgatgatgagcttttttcgtatgtttgttggccgcataaatgtcttctcttgagaagtgtctgttcatatccttcgcctttgcttactttttgatggggttgtttttttcttgtaaatttgtttaagttctttatagattctggatattagccctttgtcagatagattgcaaaaattttctcccattctgtaggttgcctgttgactctgaagatagtttcttttcctgtgtagaagctctttagtttaattagatcccatttctcaattttggcttttgttgccactgctgttttagttatgaagtctttgcccatgcctgtgtcctgaatggtattgtctaggttttcttctaagatttttatgattttaggtcctacgtttaagtctttaatccatcttgagttaatttttgtataaggtgtaaggaagaggtccagtttcagttttctgcatatggctagccagttttcccaacaccatttattaaatagggaatcttttcctcattgcttgtttttgtcaggtttgtcaaaaatcagatggttgtagatgtgtggcgttatttctgaggcctctgttctgttccattggtctatatatctgttttggtaccagtaccatgctgttttggttactgtagacttgtagtatagtttgaagtcaggtagcgtgatgcctccagctttgttctttttgtttaggattgtcttggctatttgggctcttttttggttccatatgaaatttaaagtagttttttaaaattttgtgaagaaagttaatggtagcttgatggggatagcattgaatctataaattacttggggcagtatgaccattttcatgatattgattcttcctatccatgagcatgggatgtttttccatttgtttgtgtcctcttttattttgttgagcagtggtttatagttctccttgaagaggtccttcacatcccttgtaagttgtattcctaggtattttattctctttgaagcaattgtgaatgggagttcactcatgatttggctctctgtctattattgtgtccctggcttttctttctgggagattttttgattattgattcaatcactttacttgttatgggtctatttagattttctagatcttcttgagttgggtttagtagtttgtgtctttctgggaatttgcccaactcatctaaattagataattcattggtgtataattgttcataatattgtcttacaatttatttatgtaaggttggtagtaatgtctattctttaagctctgattttagtaacttgattcttctctcttcttagctagttcataattttgtggttgttttaagaatgaactttggtttttgttgacttttctctattgtttttcaattccccctttcatttatttctgctctaatctttatttccttctttctgtttgctttgaatttaattttctcttctttttctagtttcttaggttgttgacatgagctctttcttctggtttaagagacagggtcttgctctgtcgcccagggtagagtgcaatggtacagtcatagttcactatagtcgtctcctgtgctcaagtgatccttcagcttcggcctctgagtagctaggacttcaggtatgcaccatgcctgcctactttttaaatttttgtagagatggggtctctctatgttaccaagcccggtcttggactcctggcctcaagtgatcttctcacctctgcttcccaaacttctgggattatagatgtgagccactgcacctggcctgtttttaaaaaatgtaagtatttatagctacaaattgccctctatgcactgcttttgtggcatatcatttttagtatattatggcttttttttcagctcaaagtattctttttcttttctttttttttgtgtgacagagactcactctgtcacccaggctggagtgcagtgccatgatctcggctcacttgcaacctccacctcctgggttcaagctattctcctgcctcagctttccgagtaactgggattacaggcgtgcaccaccacgcccggctaattttttgtatttttagtagagatggggtttcaccatgttggcctaggtcatcttgaactcctgaccgcaagtgatctggccaccttggcctcctaaaatgctgggattataggtgtgagccactgtacctggccagttttcagctcaaagtattttttttccaattatttttatttttattttcttcttcttatttttagacaaggttctactctgttgcccaggctggagtgcagtggcgattacagctcactgcagcctagaattcctgggctcaagagatcctcctgctttcgcctcccaagtagctgagactataggcacatgacatcatacccagctaatcaaagtattttctaatttctaggccaggcgtggtggctcatgcctgtaatcccagtactttgggaggctgaggcaggcagatcatttgaggtcaggagttcaagaccagcctggccaacatggtgaaaccccatctctactaaaaatacaaaaattagttgggcatgttggcacgtctgtaatcccagctcctggggaggctgaggcaggagaattgcttgaacctgggaggcagaggttgcaatgagccaagatcgcaccactgcactccagactgggggacagagagagaacctgtctcaaattaaaaaaaaaaagtgttttctaatttgtcttgtgatttcttctttgacccattggttatttagctgtgtgctatttaatttccaagtatttgtgaattccccaaatttcattctgttgttgatatctaaaatagttctgttataaaaaaagaattctgttgtggttggagaacacatttaaatgatttcagttatttatttgtttatttattcatttattttgagacagggtctctctctgtcacccaggctggagtgcagtggcatgatcatggctcattgcagcctcaacctctcaggctcaagcaatccttccatctcagcctctaaagtagctgggactacagggccatgacaccatgcctggttaagttttagattttttgtagagttaggatctcactatgttgcccatgctggtctcgaactcctaggctcaagtgatcttcctgccttagcctcccaaagtgctgggatttttggtgtaagtcactgctcctggccttctttttatttttattttttaaaaatttctactgtagaatattttttggtcatgcttcctttatcttctttcagcttgcttaaaaaccacaacttcttcatatttcttcttgggtcaatttccctttaattcttttgatgatgtatctccagtcttattccagaatttttatgttcctggggaagaaaaagaatcagaccttccttcaagacttggttccttactgggtatatacccaaaggactataaatcatgctgctataaagacacatgcacacgtatgtttattgcggcactattcacaatagcaaagacttggaaccaacccaaatgtccaacaatgatagattggattaagaaaatgtggcacatatacaccatggaatactatgcagccataaaaaatgatgagttcatgtcctttgtagggacatggatgaaattggaaatcatcattctcagtaaactatcgcaagaactaaaaaccaaacaccgcatattctcactcataggtgggaattgaacaatgagaacatatggacacaggaaggggaatatcacactctgaggactgttgtggggtggggggaggggggagggatagcattaggagatatacctaatgctaaatgacgagttaatgggtgcagtacaccagcatggcacatgtatacatatgtaactaacctgcacattgtgcacatgtaccctgaaacttaaagtataaaaaaaaaaaaaaaagactttgttcttcagtaggtgtctggcagctgtcagtaaagccaaaggctggcctgacgcttatgttcctttcatcatggtgtccagatgatgactatttatttatttattattattttttttgagacagtctcgcttttgttgcccaggctggagtgcaatgtgtgatctcagctcactgcaacctctgcttccctggttcaagcgattctcttgcctcagcctcctgagtagctgggattacaggcatgtgccaccacacccaactaatttttgtatttttagtagagatggggtttcaccgtgttggccaggctggtcttgaactcctgacctcaggtgatctacctgcctcggcctcccaaagtgctgggattacagacgtgagccaccgtgcccgacccgggtggtgactttttaattattgcacacactgctgtggcagtggattccccgtgcccagctcagcacctgacacttagcgagtgttatgagtgtgtaagtgatgaagtgactcattctgctcatggcctatgtcctttcctttcctttttcctttcctttcccagacacaaagaccagtggatcatggcctatgatcttaatttgtaatttatcttccccattttcatttcatttatattcccagttgtatatgttttagcgcttttgtctttacgaaatacatcctgtttttaatataatagaattgttttgtagcttaatgagtttactgtaattctaatttttttaaactgttgattttgaaataatttaaaacttataaatcttataaaagagtggtaaagataattctgatgtactcttcacccgtatttcccagttgttatcatttgctttattatttgatctctgtgcatatacaaagttttttttgagcgatttgacagtgagttgcagacctgaggccctgtcctgaatacctcggtgtgcatttcctaaggacaaggtcattcacataaacagtacagtgattaaaatcagagaatttaacgttgatgcattcaatacctttatctaccccccagaccttatttgcattccaccagctgttccaatacagcagttctatttcctgatgcgggatccagtccaggatcacacacggcatttagtgtttatggcacttagtatcgtctcagcctatcttcgtttttcatgataattgatatttctgaagaatgcaggccatttattttgtggaatgttctcactttgtgtttgcctgaagttgctttttgattatgaggttttgcattttggcagggcagaaggaggggtcaagtgatccatcatgcattaaatcagaggcacatgaggttcatttgtcccattactggtgaggctaactttgataattggttaaagtggagtctgatggagttttccactgtaaagttactatttttctcgatgtaaataataagtaatttgtgggaaatagtttgagactgtatacatcttgtttgtcatcacactttcacccactggttctggctgattcagtgaagagtttcacctgagtcagttattactgtgctggctgccaaatggcgattttcttgcttcatcattccttatgtgtttattcgcattttactataagcaggagctttttttttcttttctccttctttctttccatccatccacttattgttatggacttatggatcattatttttttagtaggttctaatccattgctattattctttattttgtagctcattggctagatttggccaatggaagctcttcaagctgattcttaaaaccttttgacatgttcctcaatcagttattgaacatatgtttactttcaggctcaagatattttaggttcaggccgggcacggtggctcatacctgtaatcccagcactttgggaatttgaggcaggcagatcacctgaagtcaggagttcaagaccagcctggccaacatggcaaaaccccgtctctactaaaaatacaaaaattagctgagcgtggtggtgggtgcctgtagtcccagctacttgggaggctgaggcaggagaatcgctggaacctgggaggcggaggttgcagtgagccaagatttcgccactgcactccagcctgggcgacaagaatgagactccatctcaaaaacatagaaagatattttaggttcattttgtactttccctgttccagctctggaatcggacgtttttctaaggagttttagtttcttttgttggaaagtggtatttagaaaccaaggtctggtcactaagcatgctcattgctcctaaggttcattgattctaggccctttgagaagttctactgttatgtcaagttcatactaactaactaacaaaacccgtacctagagttagagttcaaggattggttgtggttcttttggttatttatccttggtcatgataccaaggataaatacacagggtgctgcagtcagaggttacttgaatttgtcctttaatgcttcctgtcagtgtgattatgttatttgaaatgtaattattgctgtttatatatcattaatgagtttccccatctttgctgatttttaaaatcttttttcctttttttatttttacagttctttgagttgctgttttatatttctaaatctatataattttttttttttttgagacagtctcgctctgtcacccaggctagaatgcagtggtacagtctcagctcactgcaagctctgcctcctgtgttcacgccattctcctgcctcagcctcccgagtagctgggactacaggtgcccgccaccacgcctggctaattttttgtatttttagtagagatggagtttcaccatgttagccaggatggttttgatctcctgaccttgtggtccgcccgcctcggccttccgaagtgctgggattacaggcgtgagccactgcgcccggcctttttttttgttgttgttttatttttgagatggagtcttgctctgttgcccaggctggagtgcagtggcatgatcttggctcactgcaatctctgcttcccgggttgaagcaattcttgtgcctcagcctcctgagtagttgggactacaggcgcatgccaccatgtctggctaaattttgtatttttaatagagctggggttttaccatgttggccaggctggtcttgaactcctggcctcaggcgatctgtctgccgcagcctcctaaagggcagggcttacaggcatgagccattgcgcctggtcaaatctatataaaatgttaatatgattccaaaaatcaaaactatataaaaagggttacccagagaagtgccacttcctctcctattttttttttttttttttttttttttttggagacaaggtctcatgccctcacccaggctggagtgcagtggcatgatcacagctcactgcagccttggccttctgggctcaagcagtcctcctgcctcagcctcccaagtagctgggaatcacaggcgtgtgccaccatgcctggctaattttcatgtgtttttttgtggagatgggattttgccacgttgatcaggctagtcttgaactcttgggctcaacccaggagccttccttggcctcccaaagtgctggggttataggtgtgagccactgcgcccagcgcctctcctattctttccacctcatttccctacccttatatcatttgttcctggccttttcttcttcttattttttaaataaacacattaatgttcttaattctttttcttgtgcaaaaggtaagatattacatatattcttttgtacttggtgttttttgttctattttggttgctaatgtatcctggagatcagtccatatcagcttatggagatctttctcatccactttcacagctgcgtggcacactaagtgtgcaggtaccgggttttatttcaccactcttctgcatgtggatgtttgattgtttccagtgtttgggagttacagataatatatcagcaaatcacattgcataggtatgtttctgtactgttgaaggtgtgtcttcagtgtaaattcctagaagtggaattactgggtcaaaaagtaaacataaatgtagtgttactagatcctgccaaagtcttcttcataaaggccgcatcattcgcactcacagtagcagtgcatgcgagtgttttctacatatatacaccaacactgtgtgttgtcaggcttttaacatttttgccaactagatacgtgacaaatggcatctcttaccattaatgaagttgaatatctttttaaatgcttaagggtcatttttatgtttttcttttatgaattatctgcccaaatcttttggccattttttttttctgttggatttttagttgtgtttttctttttcaacttttgtgaccttgatgtatgtggaattagccgtttgtgatatatgttgcatatatttttaaatcagattatcatttatgttttgctgtgtttatagtaattttgctgagtttttatgtggttgaatatattagtcttttattgcgtttaggtttgtgtgatagagagccttttcctttgtccaggttttagaggaatttacctgtgttttttgaactatggttttctgttttacattcagatctcagatccatttggagtttactcttgtgtctcctgtgaggtgtgggtttgattttttttttttttttttccaaatggccactcaggtgtcccagaccattattaaaaagtccatcttggccccagtgattccaggcactgtgtcctggtgctggaggactcgatcccaccctgtggcttatggatgccttgtcttcctgccattcctctgcaaaataaagcctacagtgcccacgtagcagggtttttgctttgtagttggacagcagatgttagtgacccaggctggtgctagcctgttagccattgctgaaattattgccacactggttcttggtgtatctaagccctttttgtgcttctctctaggagagaaaggcaaacctttctcaagcggcatccatctctgctgtcttccttcttttttttgctttatcttatgtgtatgtctgggtttccagttttgtgccttgtatacagtcttgtgtggtagcagctcagtacctatctctttagtgaatgatgaaagcattgttgggctgatacttgagaacctttttggtggtgcctttttcaaccttcccccctccccgtgacttctcatccatgctctttctttgtctctcctcccatctgggtcttagcctcctgtggcattgattttcctgcctgtaatctacaggctatgggtcttgatggctctggtccactagttcatgatgacatctcatacgggctgtcacaactttacagatgtcaagaaagatcaaatctatggcttactagtgtttctagaacttattagtcttttgttgaatgaaattaaattggtctgacccactaagctctcttgggagcgatgctcttgttattttcctatggtttatatttttcttggttgctccacatagaaatttttcctctagccttgatgttgaaattaagtttatcagctagacgcagtggctcacacctgtaattctagcactttgggaggtcgagttggacagatcgcttgaggtcaggagttcaagaccagcttggctaacatggtgaaaccccatctctactaaaaatacaaaaattagtggggcttgctggtgggtgcctgtcatcccagctacttgggaggctgaggcaggagaatcacttgattgtagcgaggaggggggttgtagcgagctgagatcgtgccactgcactccagtaccactgcactccagcctgggtgacagagagagagactctgtttcaaagaaaaaagaaattaagttgatcaaattagccctcatgactggagatgccctttctttaaaaggtggagggagcacttgttccttctccgtcggggggatttccctcttatgctttgatcatttactcctcagagaagagatgagataccatgtgaagaatgaaaaacccacctcattctgacccgcccccccccaccatttctccaagggaaaaaaagagagtaaaactcaacaatgtgaagataattcattatagctaatgaaataaatcaagactccttgtcacttattaaatattaacttatgctagaaacaaatgtattataagcatgaaaagcacacaaagcactacacttctgtcgttaagaacataggcccaagatggcctcctacttggggtcaccagctctgtaattgtgagaactagtaaggagatttaatctctgtaggatcttgtctcctcccctgcagagatggggtacactaagaatactctcatagagttgctgtagatgatgacacgtgtggatgttcctgacgtaggtcctgcttccgctgagtgtgaaaaaatgtcgcttttgcccctatggcattataacaacctgtgtgaatgctcactgctcgaaggggtgcctggtacctgggggatggagttctcaattctctacccacagtttatgtcaccgggtcgtgctgatttggatctattctttaaaaagtgcatatttgagatatatttttccaagcatgcccttttctattatcatttatagttcttccctcttgtctcttgctgtgattttcacaaaatcagcaggaaacaaagtcctaaaccacctgcctctccacagttctgttacagttctttcttccctcaccagaagaggattttgcacatgaaatgcttcgttctccttttcttagagttctccttccatctgtccatccatctctccacttacctgtttattcttctgtcttgttccaaaaaaccttttgaggcagcttacagaattagagaacaaacaataagcagatgaaaaaactggaccaagattagaaaacaagggtaagaagtgagctgcacaggggatgagggcagtgtgagatgcacgtctttggccttgtgaggttatacagatgggtggcaggctcatccctgagcctcccaacagtgcaagggaaacaggatttgtgggagatgctcactctctgtaagctaaacaagtggtttcatagaagcccagctttccctgctattgagatttaggagaatattttttgagtgttctgtgaagtcaatgaatattttatctttattttttttctgccagagttctctgtttagttggttatattctttaaatggaagttgctccaaaatgcttgtccatgtgggtttggtggctggggaatcagatgcttctgcttattgataggagttggtcagaaatagaaaaaggcatagaaagcatactatcatttataattttttttttcaatgccgtgtggttcagaaaatgcttttgcgtagttgacctcctttgaggatgcggggtggtttcttgctaacatgaagagcttcaagctatgagagaatgtgtgctgacttcaccattgccttcaagacaattgagctagttactgtaaatatgttacttttatgtaatgcatttcatgttcttcaataaaaaatttcaaaagggaggaaaacttattttgagttaaccaacatttaatacaatgctttgatagcaaggctattataggaagcatataagctgtgaagactaaacacttacattatttaaatttcagtagggcatatttaagttttgtcttattcatgctcctctttaacaaagaaataatacagaaaaagcaaaagattatttcttttcttcctcttggtttgcaggtgccctcaccaccaatggcatcaaccctgacaccagtactgagatcggacgtgctaagaactgccttagccctgaagacataattgacaagtataaagaggcgatttcctattacagcaaggtgattttatggctttgtgattttttttacacagttgtgttgtttaatcagaagtttccattttacattgtgtaatgctgcagtgtctcttaattatttatttctgtaagtattcatgtcttgctctctaatgcatagtactatatgcctaaaatgttttctttttctgattcaaaacagtgtaggtttagtataataaatttggaaaagagagaaaaaaggctctcatggcctgcgtactcacagataatgattgttaatattttatatctattttctggttcttttatcaatgtatattatttatattttaagaaatggagcatacttatgtactgtgtggtgacccattttagtctgtgttttctatgctgttgaaatcttccaaggcataattttcagtgacctgtagagcattccatcttatggaggcacccttctttttagtttggattgaaaacaattttgcattccaaatgtacttactaaaatactggaaaagaaaagttgtgccgaagagtggcatcaagtaaaaaaatgaaagtcctctacctcctctactcttattaacaacttggtttattatcaacaacttggtccatagcctccatgacctttatgcctatgagacacacacacacacacacacacacacacacacacacacgcatgctcacacacacgtgcacacatgcacttacacgcgcatgctcacacccgcacacaggcacgtacacacgcatgctcacacacatgcacatacacacatgttcacacacacatacatacaagcatgctcacacacgcacacacatgcacgtacacacatgctcacgcgtgcacacatgcatgtacacacatgctcacatgtgcgcacacatgcacgtacacacacatgctcacatacacgcgcacatcttatttatgaaaatgggatcatagtatgttattctgcacttgctttacccactcagcagtatctcatagaccacaggtgtactctcgcctccggacctgcttgcttctttcagagcatgtggaaaggttttctaaaatcctgcttgcttctttcagagagtgtggaaaggttttccaaaatgtggatgtagtcatgtattcatcaagacattttgtgagacatgctcataaacagcacctagaacaagatgaaatgcctgctcttaagatttcacagcttgccttaatttgcttaattattctctcgtggatggatacttaggctttctcactttttcaccgtgaattagaaaaaatgctttactgaacatttttgcccctatattcttgtgttcttgtatccttattcctttaggttcaatttttctagaaatttatcctggatatgatattaacatttatcataggttatgttcaagttactctccaaattcctcctctgatagagagtgaaaagatgtagaattatttatttcaccaatcctgttactgattattatttatttctgttttttcttccccctattgtaaacagttctctgataaatgcccctatgcatacatctttttggattgattttttttaagggaacaattcctagaagttgacttgagttaaagagtatatgttttttttggcatggtacagtggctcacgcccgccagtaattccagcactttgggaggctgatataggcagattgcctgagctcaggagtttgagaccaccccgggcaacatggtgaaaccctgtctctactaaaatacaaaaaattagccagatgtggtggtgtgcacctgtagtcccagctactcgggaggctgaggctcaagaatcacttgagccctggaggcggaagttgcagtgagccgagatcacaccactgcactgcagcttaggctacagagtgagactccgtctcaaaaaaaaaaaaaagtatacttttcttaaagtgttatatattcctgtattgtcctccaaaaaggttattaacaatttactcctccataaacaaacactagctattatttttgaaaaatatttgccaatacagctgagtgcattggctcatgcctgtaatcccagcactttgggaagcctaggtgggtgggtcacttgaggccaggagtttggcattatgcttagaaatatctttttttttttttatggagacagagtctcgctctgttgcccaggctcgagtgtagcagcatgatctgggctcactgcaacctccgcctcctggattcaagtgattctcctgtcttagcctcctgagtagcgggactacaggtgcgagccaccatgcccggctaattttttatatttttagtagacacagagcttcaccatgttggccaggctggtctcgaactcctgacctcaagtgatctgctcaccttggcctcccaaagttctgggattacaggcgttggccactgcacctggcctgcttagaaatactttcttaatgatagaataaaactcttttccttagttttttaatctctaaaatgaggatgataacagtacccatcatctcatagagctgtagttaagataagctgagataatctatgcaaacatatatctgtattcaccgttattagcatttaaaatatttttataattatctaattatctgtaatttattttgtgtgtattatgacataagaatacaatttattttttccaggtcattacctcattgtcgcaccacaatgtattgaattcatatttttttctttttgatttgaattcttacctgtactaaatactttcacatattaacttttcattcctttctatgaatctttcttttcttcagcaccatattttatctattttagtagtttacttgatatctaagagtgtttctttctttctttcttttttttttttgagacagggttttgttctgttgcccaggctggagtgcagtggcgtgatcacggttcattgcagcctttatctcccaggttcaggtgatccccccacctctggcttcctgtgtgctgggactacaggtgtgcaacaccatgcccagctattttttttgtattttttgtagagatggggttttaccatgttgcccaggcttgtcttgaacttctggctcaagcaatctgcctgcttcgggcctcccaaagtgctggggttacaggcgtgagccactgcacccacccatttttttttttttgagacagggtcttgctctgttgcccagtctggagtgcagtagcatgatcacagctcactgtaacctcaaaatccttcactcaaccaatcctcccaccctcatcctcctacctcacttggcctcactcagatgaccaagtagctgtaactacaggtgcatcccaccgcacctggctaattttttattttttatttgtaatgacagggtctgtccatgttgcccaggcttgtctggaactcctggcctgaagcaatcctcccaccatggcctcctgagacgctgcgattacaggcctaagccactacacataacctcccagaataaaacatattgaaagccccatcaaaactccagtctgtttttttttaacttgaacaaattattttagaatttttgaggaataatatattaatcatactggccatgaaaatttggatggtaggaaagaattaattaaaaaaaaaaaaaaagaggttgagtgcaatggctcatgcctgtaattccagcactttgggaggctgaggtgggaggatcacttgagctcaggagttccagaccagcctgggtaacatggcaaaaccccgcctctacaaaatatacaaaaaaattagccgggtgtggtggtgcacacctgctgtctcaggtaccagtgaggctgaagtgggaggatcacctgagcctgggagattgaggctacgatgagctgtgatcaagcaactgcactccagcctgggcaacagagcaagactctgtctcaaaaaaaaataatttttcatgatttcattttaaatctctttgtaatatacattaaaatatgtaaatttaaccaaaaatatgtgggaaaaatttgtgatgacttttattctcacgtcaatagaaactgttttaagagatttgaaggaaaaatggcatttccatagaatcaagtccctgtgttagttttttcttgtgtcatgaaacagtatatacaattgatagatttctgacttcattgttggtatttaagcaggtataagtagctcctttttctgatcgtctgtgataacttatatttaatataacagattacatgtacattatatgtgtggaaaaggggaggaatgaagcctaccctttctgacatagtaattataaaactgcttgtcccaccttgtacatgattttagtgagaaagataaccagttgcgcctttgcttcttcatgattggtaaatagactgcatgttcattagcagtgatgccacaccaggccactagtgggtctcagcaaaggcttgtcgattatatgcattggttttcacatgacctaatgccccagcaaaagaatattagtgtgtttttcctcccaacctctgtttctcttcaggtactagtatacatggacaacctctataaaccctttctttaattttaaattatgcaacatcagttgaaaatcagtccagttgggataactaggaaaaaaaataaaaataaggtttggagtagaaaacaaaaatgcagaatggctagcatggaggattttgcagtggaggcttgggagggagaagggcattggagggaaggaaggagatccatccatctgaactcttcttttttggaagggttctggaacctgaatccttcctcctttccctgctcccgggtctggagccacatggtgtgtaagagggggtggggatggctctcctggcttgaagctaggagaactggggatgaagcttaagagatactccccagtttattgcatagttgaatgaaattccacgaaggcttttctgttccaaacgccctcatttgttcttcatctcaggaaccataataggaactgagaagtaggaacaagcaactctgagacaaagtcagaaagcattgagcacacagggagccggatgttttgcaaccaagtaaaatgaatttacaacaactgcattacagccgcaggtgtgagagtttctaaaaatgtttgagagtactacaagggatgataagcagaaatgaatagcaaagcatccattgataatattttgaaattttgcaaaatagcaagctactgtggtcatattattttaatgaatgcatacacatttatgtggcattcatagactcactcagccacaccaatcgcttttgcttccataaaggatagactttctcacaaacaaattctctggctttggtggggaggtgtattagtccattttcatgctgctgataaagacgtactggagactggcaatttacaaaagaaagaggtttaattggacttacagttctgtgtggctggggaagcctcacaatcatggtggaaggcaaggaggagtaagtcccgtcttacatggatggcagcaggcaaagagagaatgaggagaggactccaaagcggaagctcctgataaaaacacagatctcatgagacttattcactaccacaagaacagtatgggggaaaccacatccacaattcaattatctcccactggatccctcccacaacatgtgggaattgtgggagtacaatttaagatgagatttgggtggggacacagagtcagattattgtcattccacccctggcccctcaaatctcatgtcctcacatttcaaaaccaatcatgccttcccagcagttccccaaagttttaactcatttcagcagtgactcagaagtccacacttcaaagtctcatctgagacaaggcaagtcccttctgcctatgagcctataaaatcaaaagcagctgcttatttcctagatacaatgggggtatacacattgggtaaatacaaccattccaaatgggagaaattggcaaaacaaaggggttacagggcccatgtaagtccgaaacccagaggggcagtcaaatcttaaagctctaaaatgatctcctttgattccatgtctcgtatccaggtcatgctgatgcaagaggtgggttcccatggtcttgggcaaccctgcccctgtggctttgcagggtacagcccctgtcctggctgctttcatgggctggcattgagtgtctgtggcttttctaagtgcacagtgcaagctgtcagtggatctgccattctggggtctgcaggatggtggctttcttctcacagctccactaggcagtgccccagtagggactctgtgtgggggctccaaccccatatttcccttttgcactgccctagcagaggttctccatgagagccccactcctgaagcaaacttctgcctgggcatccagctgtttccatacatctcctgaaatctaggcggaaacttcccaaacttcagttattgacttcggtgcacccacacactcaacaccacatggaagctgccaaggcttggggcttgcaccctctgaagccatggcccgagctgtatgttggctcctttcagccttggctggagtggctgggacacaggcaccaagtcgctaggctgtacacagcatggtgaccctgggcccggcccacgaaaccactttttcctcctaggcctccaggcctgtgatgggagggactgctgtgaagacctctgacattttccccattgtcttggggattaacatttggctgcctcttacttatgcaaattaccacagttggcttgaatttctcctaagaaaatctgattttcttttctatctcattgtcaggctgcaaatttttcaaacttttatgctgtttcccttttaaaactgaatgcttttaacagcacccaagatatctcttgaatgctttgctgcttagaaatttcttctgccagatatcctaaatcatctctctcaagttcagagttccacaaatctccagggcaggggcaaaatgccaccagtttctttgctaaaacgtaacaagagtcacctttgctccagttcccaacaagaactgagatctccatccgagaccacctcagccctctttcgttgtccatatcattgttcatttcattgtccatatcattatcagcattttggtcaaagccattcgacaagcctctaggaagttccaaactttcccacattttcctgtcttcttctgagccctccaaactgttccaacctctgtctgttacccagttccaaagtcgcttccacattttcaggtattttttcagcaacactccattctgggtaccaatttactgtattagtctgttttcatgctgctgataaagacatacctgagactgggcaatttacaaaagaaagaggtttaactggacttacagttctgtgtggctggggaagcctcacaatcatggcagaaggcaaggaggagcaagtcaggtcttacatggatgacagcaggcaaagagagaatgaggaaatgcaaaagcagaaacccctgataaaaccatcagatcttatgagacttattcactatcatgagaacaatatgggggaaaccacccccatgattcagtgatctcccaccaggtccctcctacaatgtgggaattatgggagtacaattcaagatgagatttgggtggggacacagaaccaaaccatatcaggaggggtatctggagccctgtgatgggggaagtgctgttgtagttattgagtcccagtagcacagcctttagaatgtgacagaaacatctgaactcttttttgactgaggcatttcctttacaccctgcagtataagaatgcgggagtgattgagttggaagcgtgcatcaaggctgtacgtgtccttgcaattcagaaacggagcatggaagcatcagaatttcttcagaatgcagtttacattaaccttcgacaggtgagtgtatgtctacctgtaagtggaagagttcatccagttcttacggaattgattcactatgaattcagcttatttcgttttgctgaggttcagcatgccatgataaaaactgttgaatcttaacttgatttctaattaacatggttatttgtatattttacttctttcattgtggtatttaactttcaaaattcagaacttgctgtcctttgcattttttttgtttgttttttggagaagtaactgtgttttaccagcttggcaaccttcaacaagctttacgcctcttgtcttgatattgtcactcatgaagtacttgccatttgtaaccctgtttggggtgttgggtttataaaacatgcagtttgtgaaagcacttatatagctcctttgacacagtggtaacccagcaaataatactttaatctgaatctaaatggatttttaataaaacaatcattaaaacctttagttgtggattgataatgctaaatcctaaaattgatagtcttagaaggattttagatatttagttagtttaacttggatctttatagatagggaaactgagaccaagttaaacaatttgcttaaggacaccagacgagtatgagaacgtaggtcactgtaattcagcagatacttaggagggcgttgtgctaagggtgggggaaagagagctgaggcaggtgggtcctgtcctcatccatctgacagttttgtgggaaaggcagacattgagcagtgggtaagtggaaaaaaattggaggtacaggtgccaagggaggaagtggcaaaaggatttaacttagtttaatggaggtggagggtgtgggggccagggacagtctctaagtcagtgagattggaactgggccttgaaggatgaataggagatagccaggtaaagaagagatgggagaaggtcattcaggaagaaaatggctcagcatgagtgatgcccagaaacagaacacatcactgggagagaccaaataaagtcagagatggcggtgggggtagaaagatggggagatggagaggtaggggaggagagggagggagggagaggaagagaggggtagggaggacagagtctgagcgggagggctttctcggccaggtgaagcatttggggctgcttctaagagcggcgggttttaaaagcaaggtcttggccaggcgcagtggctcacgcctgtaatcccagcactttgggaggctgaggcgggcagatcacgaggtcaggagatcgagaccatcctggataacatggtgaaaccccatctctactgaaaatacaaaaaattagccaggcgtggtggcgggtgcttgtagtcccagctactcaggaggctgaggcaggagaatggcgtgaacctgggaggcagagcttgcagtgagccaagatcacaccactgcactcctgtctgggtgacagagtgagactcttgtctcaaaaaaaaaaaaaaaaaaaaggcaaggtcttaacatcagggactgatgtgaccagatttgtatggagtggagggagaggaagggagggggcccattgcagaggcccttggggagcccaggcgagcagtgctgacagcttccccaaaggactggggctgttggcaggaaggccagcccgctggaaacgtgcttgggagtctacgtggaaagggtcagcggccggctgtgggtcgggtggaatggagtgttgctctgttaggtgcccgatggtcaggccgggctccgaggagggcaagctgcaaggcagtggtggagggaaagaggagaggttcagcttctcacataacgagagaggtgtgggtctgggggctcaggcgagagacagggcagggggtggaggagagaggagagagactttcaaatcagtttctcttttgaacacacaaagaagtatgactaataataagacactcatgcttatcatccagatttaatatgttgaaatgttgccgcattgactacagagattcttaattttttcaattgaaagcagataacctaagtagaaacaaaataacagtcaccaccatctcagagttggtccatattttggtactttataatgtttatagccatagtctataaaaagagaggcgctttagcatgagagttgagcacacagactggatacagactgctcgggttggcattccagcttcacttgccttgacgagatgtttaacctctgtgtgcctcagttccctcttctgtaaagtgtatttactgccccttggacccgtcatcttggctaatttcctagattagacgttggtagggaggccgataagtcaaagtggcaagtgtcagtgtcacaccaaagggagcgaccagaacagagtaaagcccataaaccgagtaaaaacaaacaacaccacagtccctcaaagctgtaggccacgtagtatgagggaaacagcaccaccgctggggcagtgtgtcatcagaagagcattaggaagaggtccgtatcttgcagtttatgttgaagtttctggtaaagatggtcagaagcgggaacctgacacttcaaagtggaagcttcagttacctgggcgcccaaggggaggtgttctccccagtgatgccgggcaaatgaaccaacagctggatcatacttctcatttgacatgctttttgggggacctacgtggggttcagcactgcgccgggccacagatttgcagggccaatgaggatgtggtccctgccccggagcctgatgctctaagtgctgagggtggagggcttcccggaggaggtgttctctgaggagagtgaaaagtacccggcagagtggtgctgaggagcctctgagcagagagactgggtgtaaacatgtggctgggtgtgagctctgagcacagaagtcacttggggatcatagcagttttgtttgtgagggacagtgtggggaagagaggccccaacgcaggctgaggtcagttcctgtcacaggtcttgcataaaagtcatcaggtgggcaagagagaatccctgaaggaatctaagctgggagtcgcagtggagtcgcgctgtcagatgggctcaggttcacacccctgtgttgccacctgttcgctgcataaccttgagcacaatcactctgtgtctctgcctcttaatagtatggtctgtaaaatgacaggataacaagttcatgtggtcactggaaggactggccttgacacctcctgtccagtactgtcttgatgcctgccccataaagtgactctgcgatgggcaagtgttatgatcagattggagggtgtaaagagacatcttttgtgacagtggagggtggactgtgcttttaaacggaccctccgaaagcctgaagcagtggaattgcagacaatttggttgggagctgggggcagggctttgagactggcttgccgttaacaactggagttgcctttgcaagttaatgctgctcaattgggcatgcagggaatctcttttcactggtgggtatagaaacacacatttcataaaataaaatgttttcacttaaaatgtgaggacattttgttctttggagcagcctgtccttttgctgtttgctctttcttcctgtggaccactagaggtcagcaaagacacggcgaaaggggaacagcgctcccatgctgggcgggcggggacagtgcagatgtggttccgtggccctgtgagttttccccagcacgacgcttggcttgagttgactcatctccatgtttgtttgccagatgagcaggcagcaagataatgagttctggtgggattttataagaacaataaagaagaggggtctgtagtttttctgaaatagaacaagcttttggttcttgatcaagtatgttccattgtagaattgatgagttgtatctattcctggaaatgactttggctaatatggaaattttgaaaggaactgagatatgattattgcaggttccttctgctttaagaatccctgtgcaaatacaaaaactgataaataatacatctggatttagtggtattggaaagggttttttcgttttacggaattcactgctgagttccttctctttgtgtgcagggatatggattgacctgtcttttctttagttgtttaggtgaatggtttatgataattatctatctaagataattcacaaatggcagcaaatacctcatttaatagctgtctacctgtacatttatgggttggacatgtggatttttacaagcaaatagtgaagtagaggtgaggtggaagaagcatggactttggccccccagatttaggttgaagttgccatttcctcactgtgcgacctggaatagttatgtaacctcattagcctgtttccaagtctataaaatgggaatgatagctgggtgtggtggggggcacctgtaataccagctactcgggaggctgagggaggagaatcgcttgaacccaggaggtggaggttgcagtgcgccgagatggcgccactgcactccagcctgggtgacaagagcaaaactccatctaaaaaaataaaataaaataaaataaaataaaataaaataaaataaaataaaataaaaataaaatgggaatgataatattcacttctttctagagttgctgtaagttgtgaatgatagaataatgcatataaagtgctaagcactgtgcttggcttttagaaagcattcagcaaacatgtctgcctcacggctcactggttgtatcaaagggatgcaggcagctcctgtttgttgaggacccattaacagacagtttacaggcttgtgaatttggttattttctttaatccttataattctgtgtttccagtacagatattcttgtttgtagaggaggaacctcaggctaaggaaaggttgtacaacttgtccaaagccagaccataatttcagaggcgaagggcctctgggaggcgtgctggttctctctttcctgccctcactcacttgttccacaccaaaggccaggcactcggcgctgtgtccgtcgtctgctagccttgagcgttcagcgggcagcaaaacagacgtggtctcatgctgactgagcttcaggtctacagggggaaatgggtactgagcagataaacataaacatagataattgtgaatttgatccaaggaaaagaacatgttctgccttgtagacctggggaattttctagtcaggcctgctctagcagtattaatcctgtaaaataagctctgttggcacacaaaaaagatgaaaaggcagaacctctccattatcggataagctgaaactcattgataatatgagtgattaagcagccagcttgttgcatgcatttagctagatgcttttcagatattggccataatcatcacaacaactttgcaaagtagtttattacgctccattttaaggatgagaaattgaggagaggagtttgccgtgtctccaggattgtcttgtagataccaccattggtatttaaaccatttgggttctaaaatccaagctctatgtaccacatcaggtagtttccctcaaactacccaaatgattgaaattcactttcttaattctttttttttttttgagacggagtttcactcttgtagcccaggttggagtgcagtggcgcgatctcagctcactgcaacttctgcctcttgggttcaagcaattctcctgcctcaccctcccgagtagctgggattacaggtgcccgcaccacacccggctaatttttgtatttttggtagagatggggtttcaccatgttggccaggctggtctcaaactcctgacctcaggtgatccacctgccttggcctcccaaagtgctgggattacaggcgtgagccaccatgccctgctcactttcttaattcttttttttttttttttttgagacagagtttcgctgttgttgcccaggctagagtgcaatggcacgatctcggctcaccacaacctctgcctcctgggttcaagcgattctcctgcctcagcctcctgagtagctgagattacaggcatgtgccaccacacccggctaattttgtatttttagtggggacagggtttctccatgttggtcaggctggtctcgaactcccgaccttaggtgatccacctgccttggccttccaaagtgctgggattacaggcgtgagccactgcacccggctcactttcttaactcttaattagtcaaaaatggcaagtgacagtaagagaaagtggtagtaaggaattgtttgaaaaactagaaaataatctgactttaccagattagagaacatactctaggatcaactctcattgaatccaacaccctttgcctcccacaaaccaaatattcaggaatgattccgagccatttgaaaacattttggcttatgatactgctgactaagacctgccacctctttgttcctggttaattttctcttcaaaaccattcaaattttatgcaggctactctgttcagatgtaagaatagcctctttaaaatttttgatgcagttccttaatgaagctgttgctaaggaaacccaggaaaagcctgctagatatgcacataataattgcaacctcaaactttatgtcaatttaagctgaaaatcagaggcacggggagatttgggaaaggctttttaagatagaagggggaaagtagtaggaatgcagcttagctatggctgaaacagttcagtccagccagcagggtgcgtggctttcagagattgtttgtgaggatttcatagttctcacaaagaaactgttggatggggaaggaggaaagtaagttccttattagagatgtaaaaggagagagagggaactgagacatttctgcatgaacaagagtctggtatattgcaccttgtctttaggagagagtaagaggcatataaggaaatctctcttgagtgagcagtcaaagctgcagagatatgagcaagccaggtgggcctctgatgccccgctgggctgtggatgatggcagctgcctgcaaagcggtgggaatctttgacccagtccttaggctggagtttcagatctccatttgaagcccaataaagtgaggaaagagggagaggactaaaataaaggaaaagccagagcctggagaatgagccccatatccgtgctgtgggttgttctgtttaacccaggaaggcattgagaatgatgctccaggatgagaatggtgcttcacagcttcctgcctggggacatgcctgcagttggtgcagatacttatttcgtgggagttgatatttatctctttttatttatttatttatttagagacagggtctcactttcttccctagactggagtgcagtggccggatctcctctcactgcaacctctgcctcccaggcttaagcgattctcctgcctcagcctcacaagtagctggggttactggcacccgccactactgcccggctaatttttgtatttttagtacagatggggtttcatcatgttggccaggctggtcttgaactcctgacttcaaatgatccacctgcctcggcctcccaaagtgctgggattacaggcatgagccaccacgcctggccttcatctttatcgttttgctttagctgttaggagccttagagctgagtctctagcttacccttaataattacatctacttcatggcagacatttttgtgatttaaccttcccctggtttcctttaactagaattctcattttctttttacactgatttttatcttttttttttttttttggttattgttgttaaattgtatgtgtttaaaaaattgattttagatccttttttacaatgaggcagaatgtaaataaatgcataaacggagcatattacagacacttattgcttttagaaattctaagctctttaccttaggggttaccttagagctgagctgaatattaaagtgatacatttttaataggaaagtttggtaatgcatgcagattctagactggggactgtatcttattcatttttttagccactgtgctaagcacaatacttgtcatagaccaggcactttttaatgtttgttggatgcatgaagtggagtcagctatgactcatgttccatcctgtggcactcgccagcatcagcaccactcgcctgagtggccgtgacggcagtgaccattggtgggtgtgcacacctgtgtctgcacttaatccataaccccccctatgagggattgcttttattgttttatatttgtaatgtataatatactttatttttacctggaaagacttcaaaccttcagaaaagctgcaggagtagttcaatgaacacttatatgccctttacctaaaaggacagtgccaggcacggtggctcacgcctgtagtcccagcactttgggaggctgaggcaggcagatcacctgaggtcggaagtttgagaccagcctgaccaacatgtagaaaccccgtctctactaaaaatacaaaattaaccaggcatagtagcgcatgcctgtaatcccagctacttgggaggctgaggcaggagaatcgcttgaacctgggaggcggaggttgcagtgagctgagatcgcgccattgcactccagcctgggtgacaagagcaaaactccatcaaaaaaaaaaaaaaaaaaaagacagtgtttgtccttctgtgtctagattactcacttagcgtcatgttttcatggttcatccatgttgtagcacgaatcagtccttcattcctttttttttttttttttgatggagtctcactctgctgttcaggctggagtgtgcaatggcgccatctctgctcactgcaacctccgcctcccaggttcaagcaattcttccacctcagcctcccaagtagctgggattacaggcatgcaccaccacgcccaactaatttttgtatttttttttgagatggagtcttgctctgtcacccaggttgagtgcaatggtgtgatctcagctcaccacagcctctgcctcctgggttcaagcgattcttctgcctcagcctcctgagtagctgggattacaggcatgtgccaccacgcccgactaattttgtatttttaatagagatggggtttctccatgttggtcaggctggtctcaaactcccaacttcaggtgatccgcccgccttggcctcccaaagtgctgggattacaggtgtaagccaccgcactcggcccccttcattccttctttttttttttttttactgtaagttctagggtacatgtgcacaacgtgcaggtttgttacgtatgtatacatgtgccatgttggtgtgctgcacccattaacttgtcatttacattaggtatgtctcctaatgctatccctcccacctcccccctccccaccccacaacaggccccggtgtgtgatgttccccttcctgtgtccaagtgttctcattgttcagttcccacctatgagtgagaacatgcggtgtttgtttttttgtccttgcgatagtttgctgagaatgatggtttccagcttcatccatgtccctacaaaggacatgaactcatccttttttatggctgcatagtattccatggtgtacatgtgctacatttcttaatccagtctatcattgttggacatttgggttggttccgagtctctgctgttgtgaatagtgctgcaataaacatacgtgtgcatttgtctttatagcagcatgacttataatcctttcggtatatacccagtagtggtatggctgggtcaaatggtatttctagttctagatccctgaggaatcaccacactgtcttccacaatggttgaactagtttacagtcccaccaacagtgtaaaagtgttcctattctccacgtcctctccagcacctgttgtttcctgactttttaatgatcaccattctgaatggtgtgagatggtatctcattgtggttttgatttgcatttctctgatggccagtgatgatgagcattttttcatgtgtctgttggctgcataaatgtcttcttttgagaagtgtctgttcatatccttcgcccacttgttgatggggttgtttgtttttttcttgtaaatttgtttgagttcattgtagattctggatattagccctttgtcagatgagtagattgcaaaaattttctcctattctgtaggttgcctgttcactctgatggtagtttcttttgctgtgtagaagctcttcagtttaattagatcccatttgtcaattttggcttttgttgccattgcttttggtattttagacatgaagtccttgcccgtgcctatgtcctgaatggtattgcctaggttttcttctagggtttttatggttttaacttaacattaaagtttagttaaagacttagcttaaagtttagttaaaaacattaaagacttaacatttaagtctttaatccatcttgaattaatttttgtataaggtgtaaggaaaggatccagtttcagctttctaaatatggctggccagttttcccagcaccatttgttaaatagggaatcctttccccatttcttgtttttgtcaggtttgtaaaaaatcagatggttgtagatgtgtggtattatttctgagggctctgttctgttccattggtctatatctctgttttggtaccagtaccatgctgttttggttactgtagccttgtagtatagtttgaagtcaggtagcgtgatgcctccagctttgttcttttggcttacgactgacttggcaatgcaggctcttttttggttccatatgaactttagagtagttttttccaattctgtgaagaaagtcattggtagcttgatggggatggcattgaatctataaattaccttgggcagtatggccattttcacgatattgattcttcctatctgtgaacatggaatgttcttccatttgtttgtatcctcttttatttccttgagcagtggtttgtagttctccttgaagaggtccttcacatcccttgtaagttggattcctaggtattttattctctttgaagcaattgtgaatgggagttcactcatgatttggctctctgtttgtctgttattggtgtataggaatgcttgtgatttttgcacattgattttctatcctgagactttgctgaagttgcttatcagcttaaggagattttgggctgagacaatgaggttttctagatacacaatcatgtcatctgcaaacagggacaatttgacttcctcttttcctaattaaataccctttatttctttctcctgcccgtttgccctggccagaacttccaactatgttgaataggagtggtgagagaaggcatccctgtcttgtgccagttttcaaagggaatgcttccagtttttgcccattcagtatgatgttggctgtgggtttgtcataaatagctcttattattttgagatacatcccatcaatacctaatttattgagagttcttagcatgaagggctgttgaattttgtcaaaggccttttcggcatctattgagataatcaggtagtttttgtctttggttctgtttatatgctggattacatttattgatttgcatatattgaaccagccttgcatcccagggatgaagcccacttgatcatggtggctaagctttttgatgtgctgctggattcggtttgccagtattttattgaggatttttgcattgatgttcatcagggatattggtctaaaattctctttttttgttgtgtctctgccaggctatggtatcaggatgatgctggcctcataaaatgagttagggaggattccctctttttctattgattggaatagtttcagaaggaatgataccagctcctccttatacctctggtagaattcggctgtgaatccgtctggtcctggactttttttggttggtaagctattaattattgcttcaatttcagctcctgttattggtctattcagagattcaactttttactggtttagtcttgggagggtgtatgtgtccaggaatttatccatttcttctagattttctagtttatttgcatagaggtgtttatagtattctctgatggtagtttgtatttctgtgggattggtggtgatatcccctttgtcattttttatttcgtctatttgattcttctctcttttcttcttattagtcttgctagtggtctatcaattttgttgatcttttcaaaaaaccagctcctggattcattgatttttaaaggttttttgtgtctctatctccttcagttctgctctgatcttagttatttcttgctttctgctagcttttgaatgtgtttgctcttgcttctctagttcttttaattacgatgttagggtgtcaattttagatctttcctgctttctcttgtggacatttagtgctataaatttccctctacacactgctttgaatgtgtcccagagattctggtatgttgtgtctttgttctcattggtttcaaagaacatctttatttccgccttcatttcgttatgtacccagtagtcattcaggagcaggttgttcagtttccatgtagttgagtggttttgagtgagtttcttaatcctgagttctagtttgattgcactgtggtctgagagacagtttgttataatttctgttcttttacctttgctgaggagtgctttatttccaaccatgtggtcaattttggaataagtgcgatgtggtgctgagaagaatgtatattctgttgatttggggtggagagttctgtagatgtctattaggtctgcttggtgcagagctgagttcaattcctggttatccttgttaactttctgtctcgttgatctgtctaatgttgacagtggggtgttaaagtctcccattattactgtgtgggagtctaagtctctttgtaggtctctgaagacttgctttatgaatctggatgctcctgtattgggtgcatgtatatttaggatagttagctcttcttgttgaattgatacctttaccattatgccattatgtaatggccttctttgtctcttttgatctttgttggtttaaagtctgttttatcagagactaggattgcaacccctgcctttttttgttttccatttccttggtagatcctcctccatccctttattttgagcctatgtgtgtctctgcatgtgagatgggtttcctgaatacagcacactgatgggtcttgactctttatccaatttgccagtctgtgtcttttaattggagcatttagcccatttacatttaaggttaatattgttatgtggaatttgatactgtcattatgatgttagctggttattttgctcgttaattgatgcagtttcttcctagtctcggtggtctttacaatttggcatgtttttgcagtgactgttactggttgttcctttccatgtttagtgcttccttcaggagctcttgtagggcaggcctggtggtgacaaaatctcagcatttgcttgtctgtaaaggattttatttctccttcacttatgaagcttagtttggctggatatgaaattctgggttgaaacttcttttctttaagcatgttgaatattggcccctactctcttctggcttgtagagtttctgccgagagatccgctgttagtctgatgggtttccctttgagggtaacccgacctttctctctggctgcccttaacattttttccttcatttcaactttggtgaatctgacaattatgtgtcttggagttgctcttcttgaggagtatctttgtggtgttctctgtatttcgtgaatttgaatgttggcctgctttgctaggttggggaagttcttgtggataatatcctgcagagtgttttccaacttggttccattctccctgtcactttcaggtacaccaatcaaacgttgatttggtctgttcacatagtcccgtatttcttggaggctttgttcatttctttttattcttttttctctaaacttctcttctcccttcatttcattcatttgatcttcaatcactgataccctttcttccagttgatcgaatcggctactgaagcatgtgcattcgtcacgtagttctcgtgccatcgttttcagctccatcaggtcatttaaggacttttctacactggttattctagttagccatttgtctaatcttttttcaaggtgtttaagttctttgcaatgggttcgaacttcctcctttagcttggagaagtttggtcatctgaagccttcttctctcaactcatcaaagtcattctctgtctagctttgctccgttgctggtgaggagctgtgttcctttggaggaggagaggtgctccgatttttagaattttcagtttttctgctctgttttttccccatctttgtggttttttctacctttggtctttgatgatggtgatatacagatggggttttgatgtggatgtcctttctgtttgttagttttccttctaacagtcaggaccctcagctgcaggtctgttggagtttgctggaggtccactctagaccctgtttgcctgggtatcagcagcggaggctgcagaacagctaatattgctgaacagcaaatgttgctgcctgatcgttcctctggaagtttcgtcttagagggctacccggccatgtgaggtgtcagtctgttcctactggggggtgcctccccccaagttaggctacttgggggtcagggacccacttgaggaggtagtctgtccgttctcagatctcaaactccgtgctgggagaaccactactctcttcaaagctatcagacagggacatttaagtctgcagaggtttctgctgccttttgtttggctatgccctgtccccagaggtggagtctacagaggcaggcaggcctccttgagctgtgttgggctccacccagttcaagcttcccggccactttgtttacctactgaagcctcagcaatggtgggtgcctccccccagcctcactgccaccttgcagtttgatctcagactgctgtgctagcaatgagcgaggctccgtgggcgtgggaccctcccagccgggcgtgggaccctcccagccatgcgcgggatataatctcctggtgtgccgtttgctaagaccattggaaaagcacagtgttagggtgggagtgacccgattttccaggtgtcatctgtcacagctttgcttggctaggaaagggaattccctgaccctttgcgcttcctgggtgaggcgatgcctcatcctgcttcggcccatgctcgatgcactgcacccactgtcctgcacccactgtccaacaagccccagtgaaatgaacccggtacctcagttggaaatgcagaaatcactcatcttctgtgtcgctcacgctgggagctgtagactggagctgttcctattcggccatcttggaaccgccacttcattccttcttatggccacttagtatccgctatatggagataccatgttttatttatccatgcattggttgatggactttaggttgtttccaccctttgggtattaagaataatgctgcaatgaacactcatgtacatgtattttgtgggaacaaagttttgtgggaatgtacaagtgtttgtgggaacacatattttcagttctcttgggtatatacttagcagtgaaattgctgggtttaactttttgaggaactgtgaaacttttccaaagcagctgcaccattttacatttctaccagcaatgtctgaaggttccagtttctctatatcctcattaacacttgttattgtccatcttttgatgagagccattctagtgggtgtgaagtgatgtctcattttggttttgatttacatttccctcatggctgatgctgttgagcatttttcccatgtgcttttttttttttttttttttttttgagacagagtctcactctgttgtccaggctggagtgcagtggcacaatctcgactcactgcagcctccgcctcctgggttcaagtgattctcctgcctcagcctcctgagtagctgggactacaggcgcatgccaccacacccagctaatttttttgcacttttaatagagatggggtttcaccatgttggccaagatggactcgatctcctgacctcatgatccgcccaccttggcctcccaaagtgctggaattacaggcgcgagccactgcgcctggtcctctttgtcaagttttaaattggggtttactttctttttgttatttagctgtaagagttcattatatattctggatactagtcccttaccagatccatgctttgcagaatttctctcccattttgttattgtcatttcactttctttctttttcttttcttcttcttttttttttttttttgagatggagtttggctctgttgcccaagcttgagtgcagtggcacagtctcagctcactgcaacctccgcctcccgggttcaagcaattctcctgcctcagcctcccaagtagctgggattacaggcatacaccaccacacatggctaatttttgtatttttagtaaagacagggtttcataatgttggccaggctggtattgaactcctcgcctcaagtgatccacctgcctcggcctcccaggttgctaagattacaggcatgaaccaccatgcccggcccatttcactttcttgatggtgtccttggcagcacaaaagtttttaattttggtgaagtctaatttatttattttttcttcacgtgtttttggtgttatatatttaaaagattgctaacccgaggtcattaagatttcttgttttcttttaggaactttatagggttagtttttgcatttaggtctgtgacccattttgagttaatttttgttcatcatgtgagttagggggtccaatttattctttttttttttttttttttttttttgagacagagtctctctttgtcacccaggctggagtacagtggcacgatcttggctcactgtagcccccgcctcccgggttcaagtgattctcctgcctcagtctcctgagtagttgggattacaggcacctgccacaaggcctggctaattttttctatgtttagtagagacagggtttcactgtgttggccaggctggtcttgaactcctgacctcaggcgatccacccaccccggcctcccaaagcgctgggattacagccgtgagccgccatgccagggctaactttatttgtttgcatatgaatatccagttgtccaagcagcatttgttgtaaagacaattctttccccattggcactcttgtggaaaattagttgatcataattttttttctattccattgatcttatgtggtacttatgccagtaccacactatcttggttattatagctttgtagtaaattttgaagctgggaagtgtgtctcctccaacttcgttctttttgaagatggttctggctattctgggttccttgtacttctatgtgaattttggcataagcttgtcaatttctccaaataagtcagctgggattttgatagggatcgcattgagtctgtagatccattggaggtgttttaccatcttagcaatattgtcttccaatccatgaacacgagatacctacaataaagaaccagtaaatcttccttttttccaggaaggagacaaatttagttggcaggcaaaacttagaatttaattttttgttttaattgattattttttatcttggctgtttcctaataagaaaggcatcttacattactgtcatatttagataaggtgttgtaggaatcggtaatttcatctgtaggataggggttttattaagcgtatagattgtcctctcattttttggcttcatccctttcttaattttgtatgtcccttcaaggcttcagtctagttgctggcttaatttttttctttttatgcaaatttaattgcaataaataattcttttataaggcaaacaatatatggggacaagtgatttatcctagcatttctttcctgcatgtttgcttcaccttaaatgtgtcatgtatactgtgaagatttggggctgatattaattctcttagggaaggtgtaatgtgagccagatggcagaataggacctttccgcacttgcccacctgaagaaacaccaacctgacaaccatccacacacacaccttcacaagagccaggaaaccaggcaggagaccacagctacacccacggtcgcacataaataagaaaaggtgcatggaagaggatgggaaggacagccttgaaccagcctcctccggccccaggcagcacagcatggagggagatgacctccactagggaaaggagagcaacgtgagtgccaggcctgcctcggacaccagcaccaggctgccctggtaaaaaccagcaccgggcaggccctgtggccccagttaccaggctgggccatggactgagcaatgttttttaatgaaaaaaaaaaaaagtctgttaatagttaaaaagaaagaaaagaaaaatttcaaataatacttaagtttggaaaatacttagtgatttttgttttgacaatatagtggtccaaaaactctcagcacaagttccttaaaattctgattaagagataaaaatccccccatccccatccccaacatctttcaaaatgcaaagctcattgttaagaaaggaaaaggaaatccttttcccaaaagcaggaattctgaaagtcagtaggccttggaagccagagaatgccctgcctagctgtggtaacagttttcagtgctcacataggagggatagaaaataaaccttagacctgcccagacttgggagttggatggcagacccatgtgtaaagccaagatcccctaaacgacacgtttagcaaaagaatgaaatagaaaatacctcagtccttaaagtaagaaaataaggaaacttgatcttgttggaaggtgtattagtcagggttctctagagggacagaactgataggatatatacatatataaaggggagtttattaagtattaactcacatgattacaaggttccacaataggccgtctgcaagctgaggagcaaggagagccagtccgagtctcaaaaatgaagaacttggagtccaatgttctagttggggaagcatctagcatgggagaaagatgtaggctgggaggctaggccagcctcgtcttttcatattttctgcctgcttatattcttagctgcgctggcagcagatgaagtgtgggtctgcctctcccagcccaccgagtcaaatgttaatctcctttggcagcaccctcccagacacacccaggatcaatactttgcatccttcagtcccatcaagttgacgcttagtattaagcattacagaaggaaacaaaaccaatccaaagagggtttagtttaaagttgtcctggtataagagtgaccacaaactcctggcagaaaaacataagtccttctggagtgagaagctacgttctgaatgaatcagtgaacagaaaacatgaaaaaggttcacggaagctctggattgagatgttagaccccaaatacactgcctttgcctctctcccaaggtctcatttaagtatcccaaagtattttttttttttgagacagtcttgctctgtcactcatgctggagtgcagtggcgtgatcgtggctcactgcaacctctgccccccgggttcaagcgattcacctgcctcagcttcccaagtagctgggattacaggtgtgcaccaccgtgtccatctaatctgacaacacatcattagtgttttgtagtgtagtgcggaaggcattagtctatttcggacaggcaggagaggagtttaggaaaggagtgatggggggtgggggacgttttagctgtgtatggtcttgtttaattggcttttaatttcaggctgcatgagttgtcattggagggactagattttatggagaacagacttaaagaaactcagaacttggctgggtgcagtggctcatgcctgtaatcccagcactttgggaggctgaggcggatcacctgaggtcaggagtttgagaccagcttggccaacatgacgaaaccctgtctctactaaaaatacaaaaagtagccgggtgtggcgtcgggcacctgtaatcacagctcctgaggaggctgaggcgggagaattgtttgaacctgggaggcagaggttgcagtaagccgagattacgccactgcgctccagcctgggccacaagggtgaaattctgtctcaaaaaaagagaagaaaaaaaaaagaaactgagaactctggtatggaaagatgaatgtggagaaaagctgtagtcagagttcaaatcatctttaaagtacacatgaactcgcttgctcactaaacccaaagatggtaaaataggcagtatttcttgaagccaaaggagtgggtttttcaggttatccaagaatgaatcaaaggctggaactgaggtgatcaggggtcaagcgcggactttgcttggccatctcttttggatggtgcactcaacaagggcactgactgtttacaaagtgtccttcctctagcatgtggtgggtatacctggtagtctaggaaccttccaggtatctgtccaaggcatagggcacagcatccctgtttcagccatctctccatccatcttcttcccaacactgtgatttttttttttttttttttgagatggagcctcgctcttgttgtgctgaagtgcagtggcgcgatctcggttcactgctaacttccacctcccaggttcaagtgattctcctgcctcagcctcctgagtagctgggactataggcacccaccatcacgcccggctaatttttatatttttagttgagatggggtttcactatgttggccaggctggtctcgaactcctgacctcaggtaatctgcctgccttagcctcccaaagtgctgagattatcggcatgagccacgttgcctggcctcaacactgtgattcttttttttttttttttttttttttagatggagtcttgctctgtgcccaggctagagtgcagtggcgcaatcccggctcactgcaagttccgtctcccaagttcacgccattctcctgcctcagcctcccaagtagctgggactacaggtgcctgccaccacgcctggctaattttttgtatttttagtagagacggggtttcactgtgttggccaggatgatcctgatctcctgaccttgtgatctgcccacctcatcctcccaaagtgctaggattacaggcgtgagccaccgcgcccggcctccaacactgtgattctttatggacctatctcctctactacttcatgaagttttgagggaccaggtcttattgaagtttttgttttgttttgctttgttttcattcttacttttgaatgattaaaactgaaaatggatccaattactttagacagatgctttataaaggaaaatccttggtgcatgcctcatacccctactccgggatatgagaaagtaggttatgtttttaacaaacttttttgatagacatatatggaaagtttgtataattttgaagatgtattttctctccatgtaattatggctggaaatagccggagagaggagcagagtgtgttttcaaacctgggaatgtgtggggcctgctgtttcccatccggcattctcccacggtcatcatttagttgagtgcggccaccaggctgcccctacacatctgtcactgacttgttcttctgatcactgcaagtgcccacgtttgagaaggctgatgagggttaaggcattttctagagcatcagtggctggttaacttggggttagaacttgtggtgtcaaaggcattaactaacagtgatatttctgtttcttgaacactcactgagagttttaggcttatgctcagtgtttgcattatttcattgagtctttttgacaatcgtaattagatttgatgatccctgtttcttagggatatgcagatgtggccctggaactcaggactttacagctccaggctgtattcctccctctccatcctgccagagacaagtcctgtgtctggagtttccctctgatcttgtcactttatttcttattaacagaataaagcaggtctaaacttactttctacttggaaatggaatggtgagttaatatttggatccctcagagtctgccttgtgaataaagctccttgtcttgagtagtcttggagccactttcgttggaacctcacataaacatctgggccctgaacttggacttcgtgactgtgcagcctattgaaagattagaacaaagatgtgctgattaatatgccctaaaagagcagcaggttggaaatgagtttggggatttcatctcatttcaagatttcctgaggatcttggcctagctttgccagggaccattttgtactccccggctccttgtgccataggtgcctgtgtcgaccaaacatggctttgtcctgaggctctctgggctcatggcttctcagtcaattgtctgcctagtgcccaaaagcagttgcgctcgagcttttcccattaaggaaccgttttagggctttaaagtgatgtcaattccatttgcaatgtagtatttatcatttgacttcttattacactgaaatgataagaggaatgaagtaatattattactgatcatagtattatttacaacctttcatcttagataggttccatgaaagaatcaatgggagttctaacgcattggtggccaaggcatgtgaccttccccggctgtcacctttattttagatggtgacctctttacaggcactggctaagatcagtattcgtcttctctgcccccttctctgccccaacatctttgatcatgtctggcacatagtgggtgcagctgaaggtctgggcatttccagatttgtgatgaaggcgttaagtacccccacctcttctttttctttttttcttttcttttctttttttttttgacatggagtttcactcttgttgcccaggctggagtgtaatggcacaatcttggctcactgcaacctccgcctcctgggttcaagcaattcttctgcttcagcctctcaagtagctgggattacaggtatgcaccaccacgcctggctaattttgtattttttagtagagacggggtttctccatgttggtcaggctggtctcgaactcccaacctcaggtgatctgcctgcctcggcctcccaaagtgctgggattacaggtgtgcgccactgcgcccggccaacccctgcctcctctttacagtcctcttccaccccgtccctggctgctgtcctccagcactggggcttctgttcgctgctgtactgcacactcctggaaagggacaggccatgtcctactcaaatttgaatattcacggaccatagacctagacaacaacttctagatgaaaacataggatatctttgtgacctcgggcaaagatttttctcagatgaggacatagaaggcactaaccatagaagaaaaagctgatagattgagctacatcacagagaaatgcttttgcttatgaacactcccttagggaaataaatcggcaacagaccgggaggaaatatttgcaaaacacatataactaaggacttgcattcagaatatatacagaactcgtacgactcagtaataaaacaaacgatctaattttaaaaactgtcagaagatttgaacaagcgcttcacaaaggaagatataccagtggccagtgatcatatgaaaaaggttcaacatcattagttttcagggaaatggaagttaaagccaccacaacgtctaaaataaaaaagactgatatcctcatatgctggtgagcaggtgatatcctcatatgctggtgagcaggtgatatcctcatatgctggtgagcaggtggagcaacagggattctcacacatcgtcggcgtcggcatgacctttcactgtaggaaaagtggggctggcagagatccgatatgtaggtaaattgtgtgggagacacagagaaaggacattatggagtccagcatggttaggagaatttagggaaagaagcagcagcttcccgctgaagggcatgaggaccagcttcttggagagggtggcattggaaccgagtgtccaaagggagagccagatgtggctgtggaggcattgcaggagcagagagcctgtgtgccccggcggcgtcacctagtacagcctgcctcatacgcttccacccatgattctatgtcaaagagtatttcattggacttagagcagctattttgtttattttttcattgatttattgtcatcctccccactgattctaagccaggggactagcctgtcattagcatggaggcccccaggggtaggagtcttagcttgttttgctcactgctgtatcctctgccacaagagtggctggcaccagagtaggggttcagtaaatatgtgttgacagaatgagaaaacaaatgagttaaagttgttcagtctggtgaggtcataggtaggcagtggggcctcgaatttccagagcaggttggggctgaggagggcctggcatgcccgtgaaggcatttgggctccattttacagtcctgaaggggtctagtggtttcaagatggggattgtcttagtccggtgaggctgctgtcacaaaatgccacagactgggtggctgataaacaatagaaatgtattgtgcacagttctagaggctagaagtccatgatccaggtgccagcatgtttggtgtctggggagggcccacttgcttgttcatagaccgccgtcttttctctgtgttctcacatggtgcaacaggtgagctagctctttagggtctcttcttataagggcactaattccatttgtgagtgcttcaccccctgacccaatcactttttaaagtccccacctcctaattccatcaccttgggggctaggctttcaacatgtgaattttggggaggcacaaacattcaaaccgtggctcgggtgatgggctctgagccatgtctcaggaacctaagtctggcaggggtgtgtggacaggtgaaggaaggtcgagaggtggtaggaagacaatgccgattcctcttccagatgagggctgacgagggccccatcgaggccatggcagtgagcgcggaggagaggggatggagggagggtttggaggcccaagttggaagggcgttcaagctaaggctctgtactcacagaaacatcagggaaacattcatcgtccagggcagaggagggagagaagcgcttccttaacagtgctcctggagcagcagagtgggctctgccttccttcttctctgaaggcgctgtgcagtgggcagggcccaggcccagagtcaggtcttgtccctgatacttcttggctgtgtgattttgcacaggtgattaatgtgtccctgagctgttaatgtccttatttgccagctcacaggatgcttgtattgagtaaatcaggtacgttaagtctgctgccatacagtaggtgctgaagaaacagaagttgttggctgggcgtggtggctcacacctgtaatcccagcactttgggagactgaggcaggcagatcacctgaggtcaggagttcgagaccagcctggttaacatggtgaaatcccgtctctactgaaagtacaaaaattagccagcatgggggtgggtgcttgtaatctcagctacactggaggatgaggcaggagaatctcttgaacccgggaggtggaggttgcagtgagccaagatcgtaccactgcactccagcctgagtgacagagtgagactccgtctcaaaaaaaaaagaaaagaaacagaagttatgattgctacactacagggttgttgggaggattcagttgggtcttggatgaaagaaaacttttgtaaaccctgaagtcttaagtctgatatcagtggtattgttaataattcattacccagttacatgattctgtgtcttcttgtgttttaagaatttttgtgtttgatgagagaccttgataaaatcctgttgtgtagatgaactcttgttccttttcttttcttttgtgaaggaacttaaagtagaggtctcagatttgtagcaggtacctttgtagcagagaatctgggctttatcagcaggaagatgggctgcacctgcagctgtggctggggaaggtctgaagccacctggggcctgcgccatgcgctgctcaccaggctttccctctccttgattctcctcgattctcctcaggtctttgttttatgaagagacatttttaatgtgtgcttcttttttcacttatacgtttctttcaaaagctttttactttctctctgtgcttcagctttctgaggaagagaaaattcagcgctacagcatcctctccgagctctatgagctgatcggcttccatcgcaagtctgcgttcttcaagcgcgtggccgccatgcagtgcgtggccccaagcatcgcggagcctgggtggagggcctgctacaaactcctcctggaaacgctgcccggctacagtctgtcgctggatcccaaagatttcagcagaggtactggagtccccttgctggcgctaaggtgttgctttctgtctgatggtcacatgctgtttcagcccctgccctgagtggcagacatcgtggttggtgctggtggctccagaatgactagatccctgccctggagttgggtgcctgctgtaatccgattataggaaaaagtactggtgctttgccttggggctcggattcttgaatctttatcagtgggagtcagaaattgcctttgagttcattggcatggtgtgtcatcatcaatcaaacagtggaagtacctaatgaattttactcatgagatttagttagtttagcacaaatcaatgaacccagaataaatatccttgggtatatgtgtatacctgagctatgcattcagcagtaaattcttattctgaaatattaatgcagggtaatatgtattaaaaataaagctatcaatctaataacaaatatgtacaaggataatgcccagtattagacaaagtctgattagaaggagaaaaaacatttttgggggccaggcacggtggctcactcctgtaatccccagcactttgggagaccagggtgggcggatcacttgaggtcaggagttcatgaccagcctggccaacatggtgaaacactgtctctaccaaaaaacaaaaattagctgggcatggtggcgtgcgcttgtagtcccagctactcaggaggctgaggcaagagaattacttgaacctgggaggtggaggttgcagtgagctgggatcgtgctactgcactccagcctgggcgacagagaaagaccttatctaaaaaaaacccaaaaaaacaaaaaaaaaaacatttttgaggggttacttttagataggaaacatacactttttctttagttcaagcctagagctagtgaaggtataggcttctagacaggaaagaactgtgatgtcatctaggttaatttcccaccagggcaaaaatgggttcttcggcatcctttttatttttattttttttcctgagacagagtttcactcttgttgcccaggctggagtgcaatggcatgatcttggctcactgcagcctccaactcctgggttcaagtgattctcctgcctcagcctcctgagaagctgggattacaggcacgtgctaccacgcccagctaatttttgtatttttagtagagatggggtttcaccatgttggccaggctggtctcaaactcctgacctcaggtgatccgcccactttggcctcccaaagtgctgggattacaggcatgagccaccatgcccggcctcttcagtatcttttttatgtggtcatgtccatccatttcactggcctctgctgactgaaggtgctcatggctttatgatgaatccaaaagttctgcttttggataattctgatagttagggctctccccaacgttgaattaaacattatgtttctccttactttcacctgctagaatatctgaagacatctactggacttttttgtacattgattcaacaggtagttcgttatactcctgcccccatgccatgcagtgtgttgggtgagtgatgcgatggcaaaggagacagtttctgccctctacagtggaaataaacaggtgcctctcacatgtgacagcttcccggtgtttgcacagagctctcaggtccttccagagcctgcttctaacttacgtgtctgtggttgctgtgacagtcactcctaagtcacactccccagacttcttactgttcaaccatcttcccaggcaacacttacatttgatagaacctcaaatccgattctcaggatgcattctggttagcttcgagcaggggtcagcaaatgttctctgtaaagggccagatagtaaatattttaggctttatgagccacacggtctgtgcggaaatgactggaccctgctgttgtggtgtgaaagcagccatggacggcacgcacaccatggaactgtgtttacattagtacatggtggccagatttggcatggcagctatactttgcgaaatccctggctgagaacactgtgatatttgaaatcatttatttatttttattttttagagatgaggtctcgctgtgttgcccaggctggcctcaaactcttgggctgaagcgatcctcctgcctcatttaaaaggagggcactgggtttggaagagaaaacgcagactgagtgagtaatatagcaggaggagagtcaggcgggcagtgaaggggagtgaagggaggctgggatggagtgtacgcagcactttagcctcttatttctcttcagggaagagaactagacctggggggtgcttttgcagtctggggagggcacttctgctctggactgctgtggtctggccagaagctatgccaggaagagctaaggccctgcgtgaagcagatgtgttcagggttgaaaatcccccaagtcccatcaagttccccatataaatccccagtttttatgggtttttgtctttagagcctaagatatcctgcctctctggagccacaggggcaggcggagcgctgatgaccactctgggcaagtgataaaagcctgtcatgctgtccactcaggtgagatggctgagatctggcagggagtttggcactttgtgtgttcaccctcaacatgtgaatggtgtccagcacaaagcaagaaccaagacgtccctgcggaatagaaggcctgctggagagggtcctgaactctgctcttgacctcttgcactcagtatcatcacaacggctaagacaaaagcaagggataagatccagcttcaaaatgaactccaccaacagtatgagtccagtcatcagcacagccagcacagccagatgccaagtcccacgtttaaagaaaccccaaaaaccatgacggggtgcagaatagaggagacctggagaggtcatacacaaagatggataaggtgtgctctgagacgaggtttatgatagtttttcttcacctgcccttcctttctctaatttctttttcctcggtgttccctggagggataggatggaacctgtctccccaccccttatttcatgattgacacctttagatggaccatgaggatgtgtgaattgaggctgatgacccacttacctcctgcccttgcagacgcacagacttccccactgttaacaccccataccagggtggtacatttgttgcaattgatgaacctatgttgacacatcatcatcacccaaagttcgtagtttacattagggttcactcttggtggtgtacattctgtgggttttgacaaatgtgtagtgatgagtatccaccattatgatatcatacagagaagtttccctgccgtgaagatcctttgtgctctgtctcctcatccctccctccctatttattaccttctggcaaccactgacccttttactgtctccatagttttgcctttccagagtgtcatatagttggaatcatacaatatgtagccttttcaaattggcttctttctcttagtaatatacatttaagtttccttcatatcttttctcagcttgatagctcattactttatagtgctgaataatattctactatcagaatatgtcacagttatttatacattcacctaatgaatcttggttgacaacttggttgcctgcaagttttggcaattgtaaagcagccataaacattcatgtgcaagtttttgtgtggatataagttttcagctcatttgagtaaatatcaaggggcatggttcctggatgatatggtaaaaatatgtttacttttgtaagaacccgccaaactgtcttccacagtggctgaaccattttgcatccccttcagcaatgaatgagagttcctgctgctccacatccttgccagcatttggggttgtcactgttagattttggccattctaataggtgtgtagtggtatctcgttgctttactttgcaatttcctgatgacatatgatgttgagcatttttcttatgcttatttgccatctggataccttctttggtgaaatgtctgttcagatcttttgccccctttttaattaggttgtttgtttcattgctgttgactttaagagttttttctatgatttggatgacagtcctttatcagttgtgtcttttgcaaatatttcttcccagtctgtgtcttgttttctcattctcttgatatgtcttttgcagagcagaagttttaaattttaacgaagtctagcttatcaattctttctttgatgggttataccttgggtgttttatctaaagatataacattagtatacctaaggtcacctagattttctcttgtgttaacttctgggaggtttgtattttctcatcctgcatttgggtttatgatctgttttgagttaatttttgtgaagagtgtgaggtctgtgtctagagttatttttttgcttgtggatgtccagttatttcagcaccatttattgaaaagactgtctctgctccattgattgcctttgctgctttgtcaaagaccagttgactatacttaggagattctatttctgggctgtctcttttgctccattaacctatttgttctttcaccagtaccacactatcttgagtactatagttttatagtaagcctcgagattagggatatttttatttattaaaaaattttataatagaatgatttatatttctttaaatcattctattataaagacacatggacaggtgtgttcattgcaggattattcacaatggcaaagatatggaatcaacctcaatgcccatcagtgatagactggataaagaaaatgtgctacatatacactgtggaatattatgcagccataaaaaatgagatcatgttctttacagggatatggatggagctggaggtgattattcataccaaactactgcaggaacagaaaaccaaataccacatgttctcacttataagtgggagctaaattatgagaacacatggccacatagaggggaataacatacactggggccttttggagggtggagggtagaaggagggagaggatcaggaaaaataactaatgggtactaggcttaatacctgggtcacaaactaatctgtacaataaacccctatgaaacacgtttaccagtgtaaccttcacttgtagccctgaacttaaagtaaaagttgaaataaattgtccttattagatgttacaaaaaattgattgttcacaaaaggtgattgttcccattttcttctctgtttcttggtattttaggtgacatacctggagcagctgctgtgctgggcagggtcgccgtgcagttgcagcctgtgcggggtgctgggccctgcttgccagccatctgcagctcagagctgggtgcattcagatgaaggggcgctgttgtctcctgtagggaccttctgggcatgccttgctaagcctggtgcctgcaggctgtgtttgcctacggggcatctctttctaatccacgccaaggctagctgtggcctcatggtaaatggcttcacatgcgtaacctcatttcttacagcctggtgagtggagaccacgcgttccacgtgccatgtgagggaccagggcaggcagggcacagtgttactcctgaggttgcacagctggtgggagcacaggacgccattactgaccagctgtgggatgctggccgtgtccctgagtcctgtgtgcccactttctcatctgtaagtgggccactagtttacactcgtttactggtagaggttgtaaggattgaattggttagtccttgtgaggtgctttggacagtgctcagcaaatgttagtggctgtttgtcaaatgagatctttggtcaggtctagtatgcttcccatagcatcccctgaggccagcgtgaatggggtttgcaaggcctgtccctccctggctcccccagaaagagtgtgtgttgctagggcaggccctccctggcctttggttgcagatgagggccagggaggggtctgccctagtcacacagttaattttggacaaaataactggacaagccctaaaacttgtaggatttacattttaaaaggctaagagtggccaggtatggtggctcatgcctgtaatcccagcactttgggaggtcaagatgggtggatcacttgaggtcaggagttcgagaccagcctggccaacccgtctgtactaaaaaaatacaaattagccaggtgtagtggcgcatgcctgtaatcctagctactcaggaggttgaggcaggagaatcacttgaacctgggaggtagaagggttgcagtgagccgagaatgcaccactgcactcgagcctgggtgacagcgagactccgtctcgaaaaaaaaaatgctaagagttactggtggaggaggagagattagacctcagagtcttagcacgggagagttgggtgtctaagctcatttaggctggattctggagaaatttaattgggaaggagtagtgtttaggaagaagaaagtttttaaagcaatcacactattgctttgtagagtgataagaaagtgtattttaatagatttctatgtgcacttgtgaatggaattcccatttgctgtgcttttgagagacttcaggcaagatttaaattgcttttcggttccttttttttttttttttttttgcatcctttgaatataactccaggctggcttcagggtaaaagcaagcctcctgggctctatgcaagttatcttaggagtggtcctcattttctttttttcctgtcccggggccagttatctgtaacatttaagactgcatcagtctgaggtcttctgatgcctcttgcctccttcggggacactcttccctgtccttcctgcctcactcccggtcatcctcaggtcacagctggatgccatttcttcggagaggtcctcagtggtcctttcagccttaagtggaactgttttatttttctctttcatcgaatgccgttttctcttttccttgaattctgttgttcttccttataacacttcccatgatttgtaaatacatttgaaaaatgtttggggccgggtgcagtggctgacgcctgtaatcccagcactttgggaggctgaggcaggtgggtcacctgaggtcaggagttcgagaccagcctggccaatatggtgaaaccccgtctctactaaaaattcaaaaattagccaggcatggtggtacgtgcctgtaatcccagctactcgggaggctgaggcaggagaattgcttgaacctgggaggcataagttgcagtgaaccaagatcgtggcattgcactccagcctgggcaacaagagtgaaactccgtttcaaaaaaaaaaaaagacgtttgtgtcaggaggagacattttccattattttgtgaaagaggctagagaaagaaggtgactggctgagattaaaaatgataaatgtcagctggctgtatgtttaacaaaacacaaaagtcactttaaaccccatctccactgtggctctggactgctttaaacatctcccagagaatttaatggaagtctactaacaccctgtacctgtaaataaaaggcaaattgtctgtattctcaggtcccaaaatgtattctttttcttgaaatgaacatttgcactagctggttatagacggtcgaggaaggaacactgatgtgtgctgtgtgtacttgccggcttaaggggccgcttagtatcatttaaatcttatttgtgttgctgtatatgaagatttttgatcatgccttttcctggacgagggattaaattttgcccaggaactcttatgaaagaaagagactgctaaggcagatggatttgctaaaaggcaatagttcatatacaaaataaacctccaaattggtgaaatttttgattacaagagtattgaaaattttatcactgggtcatatgctgcaaatctgccttcagaaaaataattcacattttatagggagagcactttgagccacatagaaattatgacttgtacactatttactgttaagaaaatgtatactcggtcttactcataatcgcccgtggtaggaactggatcattatctatttttaaaagaatcagcaaagtgatatttgcccaattcttatgtgagaaaaccttctggatatggtagtgttgagattagttaaattgggtctttctgaattcatggctaggttagtcatgacattgatttcagcttcataatctttaaaaaaatctcttcttcattttggcatttggtcttggcttcttttgacaatgtggaatattgcagggactcgtctttctctcctttcctgcagttgtatgagaagtactaccattttatattccaaaagatgtcgggaagataaactactaagatataaagtagtgttttttttatttttatttttatttttttttaagtgtgtgtatggtcagctccaaggatttcaatgagaagttatggagaaatactttaaatatatacaaattagagaggatagaatagaatattgtgtccattgcccagattaaatcattatcaaaatttgaccacattggctttatttttactttattggtttttttgttgaagtatttaaagcagatcctagaaaccacatcactgtactccttcatagctgtatgcacgtccgcaacatgggagggtttcctttcaccagccttacgtcttgatccacgtgtgtgttaagtaccaactttgttatcaggcaccctgccaggcattaaggacacttgaatggataagacataaacctgcctcccaaggaaattaaggattgatgagagaaacaaagacatgagattacaggtgccttatggtacctgccagataactcctgtgggctgaaatttgtgcaaaatacagcggaaatacagaagagggactggtcagctgtgcagggcagagtgctgagggaagagctcaggaagggctgtgagcggtggaacccttggagcaacgtcttcaaatatcaatgggcaaacagagaaaggttaggatagaaggaagggcccctgctatttgcgttagggaggaggcatcccttcttgttctgtttgctcgccagtcagcctcagccgagcgcccagtctcacgtcaggccctgtcctggggatgcaatagtaagtaacgcacagtcttcaggtacaggaagtcatacctgaatgggggattttgacacacaagcaggtaattttacttaataaataatctcaatagggatttaaaaaaatggaggactcattcttagtgaaacagtggaacaggttggatcattaatcatgtcacagctagagtcaaaggttgacctgtgtgttaaccacattatattcattgaataataatattaatagcaactagcatttattgagaacttatgataaataaactgctgaagtgctttaaatgggttattgcactgaagccttataactttaacttgtactccgactactgtctccgttttacagtttggcgtggcccccttctcatcgagggttcaccccagatgtcacctccttgcccacctgccctggctgacgcagcatctctcagccccatcagccctcactattactgtttgtgttcgtcccagcatccaccagcatgctgtttcccagggctgaggcctgactcttcccacaagagtgtcaatggcacgagaacctgccctgcacagtattgtgttctcagtaaatacttgttaaccaaccgactgtcgtgagctattacggactttcagtgcgtggcagttttgtcagagtttgaatgtgcatttatgcgttttttcatggtctaagttttggatcagctggagcagtgattagccagtctgtgtggttggttatcagagccattggcagggtgtgtgtgttaacacagattggctgggagcagtggctcatacctgtaatcccagcactttgggaggccaaggtaggaggatggttctaggtcaggagttcaagaccagcctgggcaacatggggagaccctgtctctactggaaaaaaaaaagtagttgggcatggcggtgtgtaactgtagtcccagctacgcaggaggctgaaatgggaggattgattgcttgagccctggaggtccagactgcagtaagctgtgattgcaccaccacactccagcctggatgacagagaaagacctcatctcttaaaaaaagagatacttttcaactgtctgtgcatccagatttctccgtctttaattcaaagatgctaaactgttttggagtgagcagctgtagaatttaactttttttttttctaatttagctatctacttttcttcatttttcttatattttagagaaatattatatttttgatttaatgttgttggttgttgataatgaaggcccttcaaatatgagtattttcttggaaaaaaagtatgtctctagctcagatatatgaaatccatcttttgttctaagcttattatttcgaagcaggctatttttgaaatcaaatcatgtctttgcagagagagaagctatagtgtaatgcctgtttttgctgtatgaaaaccatgccaactttaaagtacttttccagggtcattaaaagcagaggaaatattttttgttgctcttggagtttggtggttgaggcatctgtcttcaaattgccaagttttacaacttagattaaccgtatttcctgtaccctctccaagcacttttgtgatgttttgtaacttccatcgcaggcacgcacagaggctgggctgcggtccagatgcgtttgctccatgaattggtctacgcctcccgaaggatggggaaccctgccctctctgtcagacacctgtccttccttctacagaccatgctggacttcttgtcggatcagggtgagtgagctcaaaccacaatgttttttttcaaggaactgtgaatgagagcactttagatgctggttcatgtaaaccctgggcttgggtttcagtgggtggaagatgctgcccagctcttcgtcagtgacaaggtccctgccccatgccttggctccctccttccacactcacttctctgggacacctgtgccacctcctcccgccttcacgccatctcctcctgctcctcggccgccacactccatggcttttccctccacctctcaggcttcttttcagcctcctgtgttgcctcccatttccttagcctgcctttttaaaaatataaatgtcaaagcataacatttacatagaggagtgcacgactcataggaatgtggctcagtaaattctcaccaagtggccaccgctataatcaacacccagatcagagacgggcaggaacagaacccagggcccctcgtgccccttcgagtcactgggtaactccatccccccttccagaaccaaagatgaggtttgcatgtgttggctctcatggggccacgcggtgtttctgcccctgtttcaaggttgcctttctcccgggctcctttcttggccttcatcttctcttcttacactgctcctgggtgctatctgctttttgagttttagtcatgacctgtttccctacgcgcttggggctcagctgccccaaacctgccttcctccttgtacccctggccctggcccagtgtgtggtgccagctgggttcttggggaagtgctgtctgctggggagactgatgtgtgcagagtgtattgggacgtactcatgggatcagccccgtagaagggaagagatggaggcgagactggacagtgggagaagctgggcctcagtgctatatggacacaggcctcagctgcacggggagccctgcactgccgtggcctgcagacgtgtcccatgttgttctgagggggccgggccattctcctccctcactgaccagcagttgaatgcagtctaccctgggtgatgtggttctcttcagcaaggagacaaggcttctgctgacccagcagggcctgtgcagctgggaagccgtcggagagatctctggcgatgggagggccggggcttcctgtccccgtgccaggccctgggtgctcactgctcccaggaaagggtagggtcttgatgaagggctcttgcccgtcaaggacaacttctggggaggcagcactctcccctggggaacgggcctctcctccctgcaggccgtctgggcgactcattactgccccctgcagtgctgtgccgtcactgctgctgtccaggtggcgaccccactccctcagtctcatgtcctggcacctcccaaatttcgtgcttctctgttttcacatttctaaaagcagcacatctttctctccagccctccacccactgctttcccctggctgttctctgtctttgagcaggctctggctccagggtaacgtggggtgtgcatctctgagggtggttgtgaggtttaaatgcactaattctggccggatgtggtagctcattcctgtaatccgatctctttgggaggcccaggtgggcggatcacctgaggtcaggagatcgagaccagcctggccaacatggtgaaaccccgtgtctactaaaaatacaaaaaattagccaggcatggtggcaggcccctgtaatcccagctactaaggaggctgaggcaggagaataacttgaacccaggagtggcgcttgcagagagccaatgttgcgccattgcactccagcctgggcgataagagtgaaattctgtctcaaaaaaagaaagaaagaaacctagtatacattaagcagtcctcataaagcccatcttctcactgcacctgttgaaacactagcattctttaaaggaaacattgatttccctacagtgatttccacggccatctctaagagaaaggaattctcctttcgtgaacccctgtggttctttgttgccaaggttctgaaggcacacaccacttattgtggccgttggcatcctcgtgtggagtagctgttgttttctgttgaggacttctggtgacccaagtgaatctctgctctgaccggggcccctgcgacagccgtgcagctccttttctgcgtgtattgggtcgctgttgcttttggggctgcatttgaactgtgcttttcttgattgtacctgcagagtgagcaggtggccagcagggccaccgtggaagctggctccatggcccatttgcactccggcgtttcggtgacgggagggagcagcaggccgaggcagagctcccagagccacccgtgtctcctgctggggtgactgtggctcagtggcggcttgggcagtggtctggtgttacctgctcgagtgaatgtttgctctccccagcccctgggagtgctgcccacctcccctactcccctggaatttcttgagcctccccgtgatccagcaaatctaaagaggtagtgcctggactctgtgtaggggcttagaatctcgggtgccatccctgacccatggcatgtccctctgcccctgtagccaggactctgttctctcctggtggcagtgtccccacatacctcacctcagtaagcacagtccccacggttggtgagttgtggtgacacggccctgagcccttcgcctgagccgtcagtgtcactccttcgcctgctgtgtctgctgcatcttgaacttcttcagcacacaccttccttcccacagcagggccggtgcacctcccctgtccccacaccctgccccttcaccatgtgactcctcttgggcctggcctcctcttgaaagccttcacaagtccctagctagaccagggactctgggcctctgctctctttcttcctgcacttgtcggtcatcagttacgtatttagttggtccatgcttgtctccctccatgggagaaaacctcattctgcctgctgtctacctggagctggacctggcaaaggctagatgccaagtgcatggctgctgaggtgtgagtgatgttgtcacagcccttgccttcatcgtgattgcttatggggaagttgattctgacttgggtcctcagacatttttcaaaagcacattcttggccgggcatggtggctcactcctgtaatcccagcactttgggagggtgagacgggcggatcacctgaggtcaggagttcgacactagcctggacaacatagtgaaaccccatctctactaaaaatacaaagattaaccgggcgaggtggtgcacgcctgtaatcccagctacttgggaggctgaggcaggagaatcgcttgaacccgggaggtggaggttgcagtgagccgagatcatgccactgcaccccagcctgggtgagactccagctcaaaaaaaaaaaaaaagcacattctttttacaaggaacacatgtgtgtttgtacactgtatgtgtgtgtatacgtatgctgcatcgtgtttttctgttggagtttgtatttctcaagggcatgggccatatcttcccctttgggtaccctgcggtttccatgggacatggtgagatgactgagcgtgtatgcaggatcaataattggagtgacccattccactcttctgtgtcaggctgatgagccgactgtctccactccagacatgtgaggccttgtcttattttgatgacggcactgagaagtagattgtgtttcccagccccacgtgctcggaggttgatgtttacacgtgtgtccatgaaatggccgccgggaagaacagagagtggacgagcacatagggctctctgttaattgctctgttgctgtgtttctttttttattaatagcattcatgtattgttgatgagcatccccgtgcctgggagtggtggtgggtgtgtgcctgcctatctcccctgcccttcctgtccagaactcagtgtcagcgtttttctccaggtggcaaagaaaacctctacaggaaaatacagcgagggttctcattgatgctttaacctctgccttccccaccgttttttcttatcctgtttatatttttaagctttgttcacttctaagcctattgtgatagttgtaccttttcctcatgtgatctttcaaaaagggtgatctgtatgctatatttttgagtaattagacattttataacaggtcacattggaggctcttttaatatatgtgtgtaaaatatgtaaatgtgaactcttattgaaacgacatgtttaaccacagcctgtggtcttcaccagccctaagtgaggacggaggcttcaagttggatgtggctcgcccattagactgcttgtctccctcacatggtcacgactggccattgcttttatggccagagcccttagttaattcccccccagtgctgtgatctctcttcggtgtatcttctccatgctggaatcctgaggatagtttctttttttttctttttctctttttaaggtctaccagaaatactggaggagaatatatgtttaaaatctgagtttgaattagtcatggtaggaagttttgatccatggtatttgtagagtgagttaggagagattcatcatctcggtttggatgactgacaaagctgcaaccagactcagctagatttcagatcaggcggttgatgggaaaagagaggaggagctgtgatcatgatgtacttctaaggtctgctttcttttggtggattgttagttcccagtgagaaaacagagaacgaaatcactatgcttccatatgggctgtgtttccattagatataaattgcgtttgatttttgatgaaaaggcagcataaccctctagaggtgtcaggtgccccttgtcctgggaaggggacgcacactgtgattgatggggtccaagctgtatgtttttaggtgacaggaaaatttgtttatccatgaaatgctgatagtgtcttatggttatttaaagtcatattaattagtgatttaaagacacttagtttaaaaggagaagaacttgggacacttgatactgttgaacaaataacagtctcttgaaagacctttatataatgatatttggttaattggagtcgtctgagaaaaggacaaaagtcaggaggtctgagaggttctttccactcatctcagcctctaattactgtaacctccgatcaataattacattctccccagcctccattttctcatttggacagctgggttgtgcagggctaggtggcggtttgttatttttaatgatggatactataatttattggatggtcttttttgctgaagagctcatggtgctattcacagacttgataactaacatttctaaattttgctgcattgaaataaagtatggaatagaagagcagccaggaatggaaaaacgtgaccccagggttgaagagggtctttctagctttcttgtcctttgtgaagctggactggtgatgtgcagttgaagacagcatcatcgggggccttctgctccatgtgtaccctccagtatttgcaaaagattgaacctacaagatacgttattagggcaagtatttacatggaaaggctctgagttctccaagactttggtcattttttacaagatgatgtactaccctgatgatttgtggaatcttcttaggaaccgtgactgtgttgcttttctgatcatgggtacagggccatctttgttgaggcttcccatgtgtgtgggcacagagcttctgtggcattccagcagtagattaatggagctgtcatcctctgaagcctcatgggttgtgcatgcaaacctggtcctgtgaactgcatgggagtctcttaaaagggcagagggattccttcctttgtgaaaggtttagaatggcacatatttgtaatttccagactcatcttttcccactctcacattcactctgtatttggccgtactaaattgttgacagttctccaaatacaacagcattgctattctgctgccttcgtacatgccgtttccattactgtcacattgtccaggaattcatccctgccatgactgcagtgccccctctgggagctccccgtgccctgtgcctgccgctgtcagagcttccagcatgctgggctgtggaggtgttggtctgtttgcccacccagcaagcctctaagctcctcaaagacaccaactgtcacgcatatctggagcagcacctggtaccttacgggtccttaaatgccggctgaatgaatgatgtcttctgtctctttaaacccaccttctactatgctaccaaatggatatttcttctaactggcaattttaaagatcctgctgtggcctttggtcaggcttttgagcagggtttggcaaaccgtggcctatggaccaggtctggcccgcggcctgatggtcatccttgcgctggccgtttcaggatgaatttacagttactgacaccaattcctgtggaaaataaaaaagactcgcggctttcacatcacgtagcttaaaaagggaacacggggaaaaactagttaggtaaactgtttcagggactgggatcaaaagccccaggtgagcgagtaaggttcaaccatatgtaggctctgctactgtgagtgaagtgcggttatcaatacttacgaaaagaaggggaaaaaatgcatactataaataggtcatattaatgctactgtgaaaagactgaggagtgacgaaaggggggggtcccatgagatgggagggggccagtgaatgaacctgtgttaaggatgtgccttatttcacagcatttctgctgttggaatgactttaccaggttaggatggcagggagtgtgatgttctcacgctagagtatagatggtttgcgttgcacatgatttcctgggcttggtcttgttgggatctgaagtcttttggtttacctcttctactgtggtccagtgtctttctggaggcctctgggtagatggtgttttctcgaaaaccctatctgtgtcttggtttttgcgtctaccttgtgggattgttttaaggattggagatgacacacctgaagtgcctaacaatgtctgctgccaagaagtgcttagtaaatatcataagatggcactgttttccttctgggggacctggacgccagctccttggtcagacattagtggttcttttgctcaaggttaccttaagaagactcggagagagaaatagggaacagcagaatcaccccaaagggctgtcagatgtggatgtgattcttttccaagatgtgctgctgttataatttgtcttataatattgtaattaactctagcagtgctctgactggcctggggaaggggtgagtgggaggtggaaacagaggaagaggagcaagggaaaggaaaggatggtgccacccagaggtgttcttcaggcagggagcggcggccagtgtaaccggggattcagtgcatgctgtttcccccgcgtttaatgttcagcccagtcctaaggtgttgggaagctggcctctccacctcgcccttgaaagtgtggatcaagattaggctgccagttcctcgttcagcggaagtagcacagaatcccaggtctcatggtatccaacacgaatctgacttgctggtagaccttgaggttgtttaagcatcttaaacttccgaaacaactgtcgctatgcagtgcctctctccccatagctgctgtcatgctttacctacaagaaaccaaaagtcttactaaaataaaagaagtttttgagagctaactcatgtgccctacaatttatccatctaaagtatatgagaatgctcacagggttgtgcagccacaccacaagtgaactactcatccctgctgtggcgtggatgatcctttaaaatgtaatgccaagtgaaggaagccaggctctgaattccacacacatgttttatgatctcaattatttgaaatgaccaaaatagactatagggacagaatggattagtctttcttaggactgggggaatgggggactttgtgggggcgatggctaaagggtatggggttgaggcggtgaaggtattccaatagtacattgtggtggttgttgcacaactgtgtgatatcctcaaaaccattgaattgcaccttttaatgggccaactgctatgtgaattatatctcaacaaagctgttacaaaagtttttaagagtctctagcagacctctctgtctcattggctagaaccagatcatgtggtcatgccagcccactgtaagcgtgatgggaagcacagtcatccctgagtattggcagggggcattggctccaggctctctcttggataccaaaacctagggatactcaagtccctgatataaaatggcatagtatttgcatataacttatacacatcctcccatatagtttgtttatttatttatttttatttttagcagagatgaggtctcgccttgttgctcaggctggtcttgtcctcttgggctgaagcagtcctcctgcctcagcctcccgaagtgttggaattacaggcatgagccaccacacccagcctcctatatggtttaagccatctctagattacttgtaacacttcatacaatgtaaatgctacctacataagccattattctactgcattgtttagggaaggaaaaaaaaaaactacacacgttcagcacagatgcaattttttcccccaaatattttcaatcctcggttggttgaatccatgggctcagtgctacagctaggaagggctgaatggatttggccgtctttgtctctaggggcaggcagcgtggggggctggaggggtgcggggagaatggcagcacagtcagcgactagcgtgggcctgtgtctctcatccgttgtcgcttctccttcctcatcctttacctgactacccacgcggttgttccggcccagccctggaatcaccttttctgccatcctctcccctctgcaccttggattcgttgagaggcccagccagcctgcttctgctttctcgccctgactgccttcgttctgtttaatttgccgtcatctcctctggagcctcctgcccctctcccttgctccactccagcctcccattgcttcattctccggacacccctcacagttactgtttaaattgcaaatcagatcctgttttgttgctcctgtaataaaacccaggactcagtgtggcctgcaggttctgcccccggccctgccctctctcccaccttgtcccttactttctcgtctgctcccggttccagttcctttggcttccttaattaatgcttacgtgccaagacttttccaccccagagccccacatgcctgttcctgggcgatcttgaacggtgcgcttctgcatgagggctcacctccagtgccgtcttctccaggagaccaccgtgacccccggctcttctgcatcatacccgccgctttgcgtttcccagtcttaacgtgagaggctagcagaccccatctgccttgtcctgggacggcctggaacacagtaggtgtgaagaaatactgttaaatggatggacagcctccctttgatatttacctgcacaccgctttgccactgtccctgtcacattgcgatggctgtttaggagaagtctaaatgtcacttccccatctggtttgctaatgggacttgcctggggtggccactggtgattgcaccttgcaggtcactcatcttgtcatgggctgcttgtctctatcaaagtcaccttgatggagggtggaagtggcagcagacgtcgctgaatacaggagaccaaaaataatcactgcaattattttgaaagaaagcaaagtttgttgcttcagaaaatgttattttcagagcagaattcagcatctctgcttctaaaccttagtgggcatgtttgctggaaaggcgcgtcttcctaaccaaggctgccgcagatcccactgttccctcaaaaggtgcttcttgactttgtggcagagggaaccagttatgttagatgattgtgaagacgtttttagaaaagggagttaagggaaggattacttaatcagagcaaggcttggttactcacttagaggatgtaaatcatctgctgaccgtgtagctgagtgagagaggcattgctgggcagaggtggcttctgcagcctgacaccctgtgctaccgttgccgggctacctggacgtggtggcagcccgttaccctcatcaggtcttcttcaccttccccaattcccgcccctattcttggtgcagtgccatgctttaaggggcactgctggaagggggcggatgttgacttcgccaggcctggtgtctcattggaatgttgcggaagggccgcaaagcccatggcacaagcgctcatgccctcctgcccactccgtgttccccgctccctcctgccgcctccctctctcccaccccactggcttccctgtgtgcagacatgccgtagttaccacgatgtgcagctcagctcagcccagccaagccaagcaaccttccgctctgaagcggaacctctgccagggtcgtctgccttccctcgcgcgcccccttcggcccccctgtgtgcccttccctcgcgcgcccccatcggccccgctgtgtgcccttccctcgcgcgcccccatcggccccgctgtgtgcccttccctcgcgcgcccttccctcgcgcgcccccttcggcccccttgtgtgccctctccttgcgtgcctccttcagccccctggtgtgcccttccttcgtgcgcccccatcggcccccctctgtgcccttccgtcgtgtgcccccttcggcccccttctgtgcccttccctcgcccgcctccttcggccccctggtgtgtccttccttcgtgcgcccccatcggcccccgctgtgtgcccttcccttccctcgtgcgccgtcttcagcccccccgcttgcccttccctcgcacgccccccttcagccccctctgccggacgtccctctcctctcccttgccaaggtcaccagtttccaaagcaggagtcatttcctgtcctctttttctgtctgtcaacagtgttctctcagtccagtgcttcctctacacggtgctttcttccttttcccagctcatcctggaacttccccacttctgattcccgtgtgctgggcgcttgcgtcagggcttggttctgcctccgcttgtctctttgctcccagtgtctggtgattcccctcggcctcatgcctttagatgccatttaaaatgtacacttcagctttttggcatgttcacagatatgtgcacctatcaccacagtcagttttagaacatttttatcacctccaaaggaagccccacaccctacagctagctagaggcacatgttggcagtcacctatagttgaatgcattaataatacatgcttttttttgttccctttcttgcttgcttttcaggttgtttttggtactgttgataacactgtggtgaacatctttaggtctttggctttttttttagcaggagagagttttcatcaggagggggcttcctgggtcagcctttttgagcgttgtgattgctgttgagacactgctggatgcagccagcagcagggctgctaattgagtgtgtgcagaacgctgccttactcttctaatttgcgttttcttggtgacttgcaaggttggattttttctgcaggtttgtttgttgtatctcttttatgtgaagttcttttccagtcttctgattgcttcctccctcctgctcatttgactatcactgaaacttagttgggatttgatggggcagatggtgtcctgccatcgtgctttgtgatgtgaatgaagtggtctgcccacagtcacccagttatccagtcagctgtgagtggcagaacagcaggacccctggcgtcccagcgcctcggaaagggggaaacacttgccatggcacctttgactgacatttttgttcagttgtcatctgagtgaatgcccttcttagagctgctggagttgccgatggcaaattcttctcagcccagtgctcctggtccctggtggtggggtgatgatatatgtttatgtttctttgaaggaaaagacacccattgaacattgaacctggaacaatttcaaaacagcctttgaccagaggacttatggaaaaggaagaagtaccacctggaaaattatgagacagctataaaaatcactgtattcataacagttctagagacatacatgtacaccatcaaagagaaattattccgacacttgttaaaatggtaaggagaattttatttaagactactacagtaggagtcaactctattgcaacagaggagagattgaactcagctctgaatacaacaaggccaagtggggctttatagccaatgagcagagtgagggggtcagtggatggaaaattactaagaggagagacattaagtgtaggggattcttgctaaacttgcctaacagggaggcccaggatgacttcccgggattcttgttgaaactgggctaggcaggctgaggacagggctgaaggatgaggcctcgttggaaagaggactcacaggagcttgtctgaagtttggtcaaggagagtctttgtcagtgcacatgtccatacatatgcacacatagataggatttcttataggggattgggctacgtgctgtgggagctggctacccaggcctgtgaagcatcgtttcggtgtctgctgctggatccagaaggcctgaggcaggcaggtggctgggaagggaaggcggatgtgaagggagggaagcaaggacaagctaggaactgtggggctgagctggaccccatggggatggcctggagcccatgtcagcttctcaccacctcccagcctcccgctctaatggtgggggctcctggaggagaggctggtgccctttgcggccgtgctaaacatgcgtgcctggcccagagctggaggagcagaggagctatgggtgggatgctgcccagtccaccagtgtgggtgtgtgtcctgccctgggccccggaaccgatgctaccccgtgcctctgcctcagacatcactccatgtgctgactcagcttcacagcgaggggctgggaagtgtcattccaactcagccgagtggacacagtggtgacgattttaatttctggtgtgaatctcaagtccacttttaggaagcaggagataaatccccatcaagaaaaatcattcattttctttgcatctctctctagcatatttgatatttgattgaaattttaacacctgaaacaactttttgttttgttttctctttggcaagtccatccttacaggtgtagttagatgggttagacagggatactaataattctcctcctccctcttcccatcttggatagaaaaatattgatctgatattatgtgaggctttctgaatgagagtgaattggacagtgaaaagcataagaaaaaataaagtaactaactcctttaaaaatcttggtttttgcatgtaaaattgtggtgtttgagctgagcatttaattttagtagaccctcaggactccaaaggatgtgtttgacgggttctaggagtactgttcggataataagggacaaggaggagctggaaaatctgcacaggagcagccgctccctttacatcctttctgcaggtatttgtggatcatctcgcgtaagttgggtactgtgcgtaatcccagcagtgtgaggggcacgcagttcctttggggatgacctggagaaactggctggggagatggagcaactgggagaagccgaggttggctgctgcttcccacaccctcaccctccccagccgatgcactccaggcagtttcacgtgtttcagcttccttaggtcgaaggctcggtttctatttggtgccatcctaccttgcatgtctgagtatggatttggaggtggcagagctggctttgaacactaggatgtgtttgtttccttaactcttccagtcccgtaagcccctttgggttgtccccttgcatctgccccaaccccagggctgtgtccagccttccctgggtcttcagctgctgtctctcggtctccccggatgtccacggtggccacatctctgtgcctctccattctgtcagcggcccaggccccaggtggtccatctccaggagtctccaccccagccccgtttcccatcccttcctgctcccgtgaccccttccgtggtgactgcaggaacctgaggtcttttggtagctgactcctgcatttcctcatcctcttcctccccgagtgttcccttaaccttctcatatggagtgagtggctcttcagcagggaagtttggaaatgtgtgggagtgtttctggcataactgtgactggggcctgtcgccagcatttagtcggaagggacagggaagtgaaatgcaagtatagcccagtgccggccaatacatatctgtcccactcacaatgccatcctagcaatccgaggagatgagaaccagccctttttttggcctgcctgccctgctgttctctcaaatgcatgctggtttttctcctctgcccccaggacctcagggcccagagatgggacgggcatcattttccgttgctacttccaagcagtcctcctcagaacactccagctctttgggagggtgtaccattaggattgatggctcctgcctttccttgtgttgtggtcattgccaggtgcactggctacttctcctcactcagtacctggcctgctctgtcctcagcacctccaccccatctctgttcctggtggcttcaccacccacacagaggacctcctcaaccctgcctgctctcccacttctgcatgttctgctgggggatctcacctggccctggggcttcaggaatggtctttgcattcatggtgcctgtacttcttccttctgcggtgctgcaggcctgactgtcgacccgcccaccctgccttcgcttccctctcagcacagggcgcagggtgcccctgcccgccccactgcttgggcagaaaccttgacgctgtcgtggcttccccgccgtcaggccccacgtctagtacatcaggaagtcctggaggcttcactgcctcagcacatcccagatatgaccacggcttcacgccatagcacctttctgcttcaacctccctggtggctcccaggacacgtatcaggaagtggagggaaagccgggttatttttggaggcctcccaggtccacctgatgtttctcctcagttctccttgctcacctctctccagtcttctgcacattcactcagcaccagccaggtttgtcttgtttctgtgtctctgagaaaacaaacttgatttctggctcttgtccgggaccttgcacttgtttttttctgcgtgaacagcttccccctgggtcttggcatggctgccatttctgtgcacctcagttctgagccaaacgcccacccttctctgcctggcgctaccatcagtctccctccttgctagatggaggctccttgagggcaggcgtgccaccgtcctgcgcagtctctgtggcttggagcactgtgtgacaggggctcagcaaatgtctgttgactccccgtgcagcaggggaaagtcatgtaacttctccccacctcattttccccatttggaaaaggggcacaagaaggacccacctcctggggtgcatctttactggttgctttaacaaaatactgcagactaggtggcttataaataagggacatttacctctcacagctcggggggctggaagttcaagaccagggtgccagcagatttgtgtcctgtgagggccacttcctggctcagagacatgctggaaggggcgagggagctctctgggatctcctttacaagggaactcctcctatcatgagaactctactcacatgccctgatcgcccccacaaaggccctgtctcttaatcccatcaccttgggagttagggtataacgtgaatttggggggacacagacgttcagaccataacagggtgtgtgtgaggattaaagctggttccatttccaccgttccctccactctgtctcggcttgggaagctcagacagctgttagttcctctttccctctgccctccacactcagctgggtgtggatttggttattttgtgcaagtaagacttagttctcagggacaatgcttttatttttaaagaaaatcttcagaatttacaatgccagttccagggccccattcctatcaagtcagaatccctggtccaggacccaggaatctgtgctttgcagggaccccggggaggccaggacaggaggtgtgtgccaggtctgagacacaggctttgacaagtggaaattactagtggggtatttttaactaagggcttctgtgggtctttgtctgtttctgaaaaccagcctcccttctttcccctcctcacttatcgtttgactggttaggaagtgaaatgtgcagagtcacctttgctgccttgtcacccctagaggaattctgcgtcctttcgcggccctgcctctgtgggtggcagtatttcccaagtcagattcacgacgtggcccagtgagatttctcatggcttgtaaacttatatgtttgaaaagtaatgcaaaacactgtatcacctttggttaaagatttagtgaaacacttttaatgaaaagaaaaatgccgaggctgatatgcatgccatgggcttcagcccagcagtcatccttggagagtgagggttgagcccgcagcccagcactgctgggctcaggaccacacagggccagagccacccctccatttcctaccccatgctggcttttcacttatgaggagttttcaattgtgatgtgcttttctggtcatcttttatcatcttggatattttaatatatgtcctttatattttttgaatttcagtaaattctaaaatagtattaaaacaataatgtgttatttttgctggattttggaattttgctagaatttggccatagtgatcgcaagcttcccattgtatagattaacagactaaaatatacggggttcgggttgaaagccctacgtgtcgtatgttgatgtcctatattgtattttgttcccattgtgaagtatgcagacttcacatttgagtttttgtcccttagcttcatatagcagagcataaagagctaaaatacgaactctggccaaaaatgaatgacatgattttttgtattgccaaggatatatgtatatatatttcctatttttcattcctgacatgcgtttttcccccttgcatttttttctccagatggcttatgtggtttctttggaccttcgatttgctatatttcatttttcactgggctggggagaaggtatgcatctgcattgctgtgttacaaggaatcccagtgggagtttgtcagtaaaggggtataatttgtttccattgcaatttatgcaatcccttttgtttgttcagaactagagagaagggattgaataaaaccccagcagaaatgaagggaagcttttgatgtacttttagttgtatgttgaagagataaatatcatgtagtacaacataataagtacctgctaataaaatgcctgcttggtagagaaaccacacatgtaaaatagtgaggtgaagaaaaactatcagtacttcaaaatcccaaatatattagtggatatactagttataggaaaatactaatttgccaggttttaggtgaaccaaaatagaacatcccagggtggtatcgaaagggaccttctgcaatgtcacgaaggatcttgtctctgtgggacaacgtggctccaggtggtgtcctctccccagcagtgcagtgcagtcctgctttccgtttgcccgcccaccatctgctgcacagagtgccaagacaccattactcagcctggactctgccacttctggtccggaatatggcaactcatcctgagggacctcctgccttccagatccgccctttctttcctgtcctccacccctatgataaagtgatctttctttctaaagcaggtgtttatctgcagcaatcttctgctgaaatagtgtcagaggccaaaggccccacacattgtgcactgctctttcagtctggcccaggccgcctccttagcttgggagagagacttagctgctgtgcccagagcagaggctctacacacacgtactgtgagtttcttctggcttttcactacccagaatggagcactagccccccttcccgtgctccgtgcttccctccagcccctttccttgacaccttttggtagaagaaaatttttttcttcccaaagtttttttttttttttcccatgcgtatataacaatgcttatcacatttgtgaacatgagttctctgaaaaggactttagaggggagactttattctggggaatagtttacaaactgaggagaacagcctttgatgcaaactgaagctatccattccagagaacaaaagaaaggtttgtcttttacagagaaagttcccgcccaggttcccactcaggttcacttatgtacttgaaggtttcagacttgctgagttctgattggttgttgcaggtcacagtctattgatggcatgaatgggaacaggcagctatgtaggcccctaagttaagcagacacgtgggttttccaggaactcaaggtctgtgtgtgacctctagtcaacagatggctgcttgagtctaacttgaatgtaggtcccgttagccactcaggatggattcatcctgtggagctggctttttcagggcctacacattaatttttatatttcatatgtattaatttttagttttcatgtctgtggactgaggtgtgaggtgggacagctggaatgtagtctttttgtgtttttaatcccagcctaatcatagaggctcaataaatgcttaataagcccagttgcctttttttcctctgctgttgtttcctcctcagtaacatgaggatgaatacctatcttcctgtgctgtcataaggattagaaacagtgtatataaagaacctgttctcaacctgttctcaattgagaacctgtgctcaatatatagtaattgttgttggttacgtggatttgttcgtgacttccaaagagtgtttcagcatatgctgctcttaaagagtctcacagttttctattttgatgaggtatgcatatcattcatgggtatttgagtggccttggggaagatgctgactgcccctgggcctgggctactgcatgtgtaggaaggggacgatgatgctttaattcagcagaggacagtaggggctgtgatctttaaagtcaggcagagctgggtttgtatcctggctcatgtactttatcaaatgtgacctttgacaatttactgactttaccaagcctgtttttcaactgcaaaaataagaagattgtgcctagttaggtggaggatttatcagaaagaatgtgtcagctgcctggcattgtgcctgccacagtgggatttcaacagtgctggtgtgtttgcttacttcacccactaggcaggtgggcagtttcccgggtgaggctgtacagttctttctaacttaagagacctacatatttttacttaggtctctaagttagaaagaaaagtttctatctctctggtgaaatgttaggctttcagtgggtattattgaaagttttagcaacagagtaacgagctaaagttaccaaaagattgtttctctgcaggtgattgttacccaaagattgtttctcagccaggtgggaacagatgggggagcctttatttttgactgtgtctgactctgactctaatctttaactgaccaatttagtttaaaaaatgtttatcttggctgggtgcagtggctcacgcctgtaaatcccagtactttgggaggctgaggtgggtggatcacctgaggtcaggagttcgagaccagcgtggccaacatggtgaaactccctatctctatgaaatacaaaaaattagctgcgtgtggtggtgcacgcctgtaattccagctacttgggaggctgagacaggagaatcacttgaacctgggaggtggaggttgtagtgagctgagattgcaccactgcactctagccttggcaacaagagcaaaactcagtctcaaaaaaaaaagtttatctcagtggtatgttgcaggtacttaatgctaagtgtgacttcagtgatgaaaatgtaggcatctctgtatcaggaccatgtgagaataagataagcagaatttctgatgattgaattgaagccatagtgaagtggtagggtttcatacgcagtattggatctggaaactggaacgaactggaaaagggcatgcaggctggatgcacaaggactatgggtcttcctcagggttcggcctcgtttgtttgtttggacaaaggaccagatgaggagttgggaggtgagactttatccttagcctttccacgtgtgaacttctcttctccctggccctcagttttctcctttataaaaagtgtaggaattggattaaataagcactcatatatgttcattcacttgtcaaagatctctgtattagatactgaatctcagatttgattgataatttcaagccgattagtattttctgtcacttcaatgtgaagtgacagagaataattattagatactgtaaaaattaatcttgccatatgtttcacatactgcaaatttgttattctggccccaaaggccagagatctgaaatgcagatgttggcggtgctggtttgaagcctttctctttggcctgtaggtggctgtaaggccagagatctgaaatgcaggtgttggtggtgctggcttgttttgaggccttttctctggcctgtaggtggccgtctggtggcgttggttttctctgagccgtttcccgtcggcctgtaggtggccgtctggtggcggtggttttctctgagccgtttcccgtcggcctgtaggtggccgtctggtggcgttggttttctctgagccgtttcccgtcggcctgtaggtggccgtctggtggcggtggttttctctgagccgtttcccgtcggcctgtaggtggccgtctggtggcggtggttttctctgagccgtttcccgtcggcctgtaggtggctgtctggtggcggtggttttctctgagccgtttcccgtcggcctgtaggtggccgtctggtggcgttggttttctctgagccgtttcctgtcggcctgtaggtggccgtctggtggcggtggttttctctgagccgtttcccgtcggcctgtaggtggccgtcttcttgacaggtctccacatggtctttcctctgtgcctgtgtcctaatcccctctcgttataaggacgccagtcatattagcttagggttcaccccagcaaaactcattttacctccattatctctttgaagaacctgtctccacacacggtcacattctgaggtgctgggggttaggacttcaatatacgaattttgcggggaggggacacgattcaacctgtaccatgcaccatggtctcgtctgtcctgtcccatcctaagggacgctggtcgctatccactcaattaatttttatgacctgcaaaggaggccacagtgactgacagtacattatatgcttgtgttgctcttttggaagtggtaatggagcggacacatatgaaatgtcagctgaagacctcccctgtgcctcctttgcccactggtccatatttgtgggctttgcttatacgtatggcgcggggacagaatacagttatttggcccatgcagccacccagtcttgctggtgtccacttcggtgatctgagagagaaaaataagacttttctggctgtcatttaaaaaaagacattgagtttaattcaaattaataattttttttagcaacttctaagtggcagggatctgttttaggggaagaaatggcatattccttggtataaaataaaatacggaggccctctttagaacgttcaggatttatctcctcctggactgactgtcagacaaccccgttttgcaggggagaagactctctgctcagtccactggggtccagcctgttctggaaggcccctccagaacacctgcaccaggcaacagggtgcccggcccgtggtgcttgcttggctgtttgtgcacagccctgagggcctgagggttcatctcgcagccctctcagttattattaactgccctcctaagccttggctccacctccctctgttcccacagccactctcacagcaccgctgatcacgtgcccatctgacacctaggcagcccattttggtgggggaggcagcaggttcagggcaggtggatccggtacccgcacccacgtgctgcatggcagagccggagggaggcgcatctggatgagtcgcagtccgtttgttctctctcttgccggtgaccttgttctctatctctgctttctggattgacaagtcctgatcctctctgtctgtggctcatatgtcacagtcctggcctgctcaagcttgattaattaattttctcactcacccagccagtatttatcttcttagaatgttcttcctgttttatctttcctcaaatgcagcaccttctggatgtagaggaacagtgaccagcctttgcctgcagtctgtttctgggtcctgtgagagtgtgtgacaggagttgtcacacacctcttgtgtgctgggcctggtgtaacatgtgccttcatgtgtgtgaactcctctgatcatcatggttagagggatcattgcaggctgagattacgaggaggaggcagtaaggcatggtgggcttccgcggctgcgtgtgcgagctgggattacagttccgggcgcctggctctggagcacatgcctgaccccacatcctgggtcacctgcagccagctaaggacacttactcagtggttgttggatctcagtgtccgacactgacaaggggctgcacccactaaagactgtaccagccagcatcagacaccagtcaagggtgttgctgttttctaagttttggaagcttacagcttttggagtcatccttaaattgtcttacttaccccatatcctgttaatcgcctggaagactcattctaatgcttgagtttatcacatgtggaattcgtcttcttccttccatcgtcacggccctggttagactttcaacactgatgacttccattagtttgtttctgtaccaaggaggttatctatcaacttagatacagttgtcatttgtttgaaagacaaggattggatgagatagaaaatgtcagaatgtaatttattcagctaccccttcattttgttgcttgctcattattttgctactcagcccaaagaaaatgtgttaaaagtttgccatccatcagtgtcagagtagacagggacttggtttggatgagggtgtgcgttactggggccttgatcttagtgagatggacctcgcctcattttactgtgtttcttggggctggggaagggcaggaaatgaaagaagtggtgcattttctacatatttccagtggccctcagttttggtgttgcctttctttgcctccctgttcacatcagctgtctctcatttgccgcagagcagagcgtggtgcagacagaggcaagccagggttgggaatctcggctggcttgcagccacagactatacacagtaggaatatctgttgaacaaaatcttttgttgttgtaactgtgatcattatgtcataaataaacaaggggcttttactgtaattgttaagtcccgtgacctcagggacgtgacacacaagtatgcttcatcatgggggagaaaactgagcagatggaaaagaaattttggtttcaaaaattatgaagttagttatacatcaaaagtaataatttgagttgtgaaaaaaaaaggttcttaaaaataaggaattacacagtgagtcattgagattataaagttaaaaaatattgttggccaggtgcggtggcttgcacctgtaatcccagcactttgtggggccaaggcgggcctaccacttgaggtcaggagtttgagaccagcctggtcaacatggcgaaatccctggatctactgaaaatacaaaaactggccagacatggtggcgggagcctgtaatcccagctactcgggaggctaaagcgggagaatcgcttgaacccaggaggtggaggttttggtgagctgggatcacgccactgcactccagcctgggtgacaaagcgagaccctgtctcaaaaaaaaaaaaaaaaaaaaaattgtgaagacttatgatgggacttaagagtgaagctcttgatatattcaaaatataacaaaaatttgctcatgatttcacatggttatatttccactcctgacctctgaacttcagtttcccaatgaaggctggatttgtctcctgaatgtctcataggatcctgcagttaccatatcctcagctgaattcattctcttttccttctatgtttcccgtttgagttaagggtgttggcattttcttagtgtgggaagcttaaaacttcgtcagtcatccccaagttgtcatacttatcctgtatcctattaattgcctggaatgcccattctaatgcctgagtttctctcatgtggggatttcccctcttcccatcgtggtcatgactgtggttcagactctcaacacctatacttggaatagtgcagtagactcttgacatcatggtcctgttccctggctttgctccttccagcctgtgcgtcacattgcggccggagttacctccttagaatgcaagctaaatcacattctcttccttaagaatctgcagtgtctaccctttgtctatctagtaaagtctcaactctttctcaaggacattcacgatttgattcaaaccatctttctcaaggacattcacgatttgagtcaaaccatctttctaggctcattgcatactttttctatccatgtaacctatacttcagatacactgaacattttttgctttttaagtgtatcacatggtttttcatgctgcttctattgtagcatgctctgttcttgtactttccctgtttcctgttattaagaaattaatttattcctctgcacctccttattatcttgcttagttctcaattcagcatcattttattataccttcagaataatttacctatccgattccctcactagattacagactccttggggacagggatcatgtctgttcaccttttatcttttatcattttgggcaatgctactagaaagtagtcaatacatgtggaacttatttatttatttatttatttatttatttatttatttagtgacagagtctcgctctgtcgcccaagctgtggtacaatggcacgatctcggctcactgcaacctccacctcccgggttcaagcgattctcctgcctcagcctcccgagtagctgggattacaggcatgtgccaccacgcctggctaatttttgtatttttagtagagatggggtttcaccacgttggctaggctagtgtcgaactcctgacctcaagtgatcctcctgccttggcctcccaaagtgctgggattataggcgtgagccaccttgccgagccatggaactgatttaatttcacattgcctttctcaaattatttcctaaaatgtatcaattgagactccaccaggcagacaaaggaattacgagattttgctgttgtgcttgaagatgtgggactccagttgagcgatttaagataggcttcttccttatagagggtggatattcaagatttgtttgtcaaatgaatatgaagtgaaatatgaaatagttttagaataaagggagatggctgagcatattacacatgagagattgtggtggagaagtagaaggcacactgaactgaatgggggtgagttctttctaagcttcaatttctctcatctgtaaacaatggcacttttttggtaaggttttgggaatcatttagtaaggcatatgtaaagtgcttggactagtgcttggcatgtagtaagacctcattaaatgtcagttatcaatgcagctgttgtttgtaaaacatctgtgttacactgggaagggctataaattcccttactttaaacttccacctttgtggaaatgaaggaagttcaaagttttcttatgccattgacattttatgatactatgttcttcactcatggggcatttataaacaaaccctgatttttcgttgtaaaacctttttgaaaattcaattttgagcatttaaaatatagtttttatggccaggcgcggtggcttacgcctgtaatcccagcactttgggaagctgaggcgggtggatcacctgaggtcaggagtttgagaccagcctggccaacattgcaaaatcccgtctttactaaaagtataaaaattagctgggcatggtggtgggtgcctgtaatcccagctactgaggaggctgaggcaggagaagcttgaatctgggaggcggaggttgcaacgagctgagatcgcaccattgcactccagcctgggcgacaagagtgagactccgtctcaacaacaacaacaaacaaaacaaaaacctatgtatctatatctatatctacatctatatctatatctagctatctacatatatatagtttttattatacaagtaatatatgcttcctttagaaatcttggaaaacataaacaggaaaaaattatgcataatcctatataggcaagccctgttaacattttagtgtatttcttttgtattgttttctgttattttaaaaattgggttaattgctttctttcttttcattcttttctttttctcttttttttttttgagacaaagtctcgctttttagcccaggcttgggtgaagtggtatgatctcggctcactgcaacctctgcctcccgggttcaagtgattctcttgcctcagtctctggagtagctgggactactggcatgtgccactgtgtccggctaattttcgtatttttagtagagttgggggtttcacgatgttgaccaggctggtcttgaactcgtgatcctcccacctggcctcccaaagttctgggattacaggtttgagccactgtgcccaggcgggttaattccttacatcgaatttattttgtaaatataattctgtatcctgattttccatgtgacataacattttccatattgttgcagtctttataaatgtcatttttaatgtttgcataaatttgcattatgctgctgtaccatagtttatctaaccattgcttcatagttagatgtgcagattctaataatttattatctttatttttttaaaactttaaaattttttattttagtatttttaattgatacagtaattgtatatgtttatgtggtactgtgtaatgttttgatacacgtatatcatgtgtaatgatcaattcagggtactttgcaaatccatcttcaaacatttatcatttctttgtgttgggaacatttagaatcctctcttctagccaactgaaaatacacaaaaaattgttgttacttttagtcaccctacagtgctataggacacttgaatttattctttctgtctagctgtaattttgtctctgttgaccaacctctccctatccttccttcccccaacccttcccagcctctactctctccttatgagatcaacttgtttagcttccacatatgagagagaacatgtggtatttgcctttctgtgcctggcttattttacttaacataatgccctttaggacattaggttcaaccatgtcatagtgaatcacagaatttcattctttttttatggctgaatcacattccacggtgtatatatagcacattttccttatctagtcctctattgatggtcacttgggttgattccatatcttggctactgtgacttagtgctgcggtagacatgggagtgcaggtatctctttgacatcctgatttcttttcctttggaaatcccagcagtgggattgctggatcatgtgatagttctatttttagttctttgaggaaccttcaaactgttttccatcataacagtactaatttacattcctatcaacagcacctaagagttcccctttctctgcaccctcctgtatttgttatcctttgtctttttgatcacagccattcttgctggggtgagatgatctctcactgtggttttgatttgcatttccctgatgattagtgatgagcattgtttcatatacctgttagccattttgtatgtcttctttcgagaaatgtctattcacgtcttttgcctactttttcatggggtggtgatgatgatgatgatgatgatgatgattttttgctgttgagttcctttatattctggacattggtcccttgttggatgaatagtttgcaaatattttctctcattctgcagattgttgttcactgtgatgtttcctttgctgtgcagaggttttttagtttgatataatctcatttatctatttctgtttttattggcctgtgcttttgagtccttatccataaaatctttgcttagaccaatgacctgaagtgttttccctatgtttttcttctattagatttgtagttttggtttttacatttaagtcttcaatcccttttgagtcaatttttgtatatagtggcacatagaggtctagtttcattcttctgcatacttatatccagttttcccaacaccatttattgaagagattgtctttttcccagtggatgctcttgacaactttgatgaaaattatttgactgtgaaaacatgggtttatatctgggttctttttttttttttaattggtctacaagtctgtttttatgccagtaccatgatgttttgcttactatagctttgtagtatattttgaagtcaggtaatgtgatgcctcctgctttgttattttttgctcaggattgccttagctatttgaggatttttaaggttccatatgaattttaggatttgtttttctatttctgtcaaaaacatcactggtattttgatagggattagttctaggatatctgtgttttctttgcattttttcattttggggcagtctgggtgggcagcgtgacaaaatgaaaaaagcagaaagtttgaacttaaagctttgagtttgaatgtaatctagcaatttattacatgaatagccccaagaaagtaatttgaatttgtagattgctctgggtagtacaggtctttcttcttaatataatttcttcttctgggcattatgttaagatctctagagatgttaaaaatttttctaggcagtgcttgaaatagatgtttttatagtgacctgatggtttaacacaattacctttcattttggtagaacatgtttataaacctgaaaggaacaaggaaaaatattcagtcttttggtgcacttgaatgattgttcatcagggcctccaactggtcactctgaaaattaagtgactagcaaatatgaaaaattattgacaggaggcagttaatgtggctcactgcaaatttatctaagttaatccacactctgttaaggaaatgccttgttttcttgttacatgacagatcttcttccatatctcctggtttgtcatatcattaatatttatagtggtggcatgtgactttttcagcctttctaggtagaccattatgctacctggatgtatatgcagaatgaagaaaagctgagttgatttctcttgctctgtaagatgcttaacttgctggacatgttggagtggcagtttcaggatatcagtcacattttggggcaatctcggtggcaaagtgacaaactgaagaaagcaaaaagcgtgaacatatagcattgaggtgttttgttttgttttgagactgagtttcgctcttgttgcccaggctggagtgcaatggcgcaatctcggctccctgcaacttctgcctcccaggttcaagtgattctcctgcctcagcctcctgagttagctggaattacaggtgcccaccagcacctgggtaatttttgtatttttttagtagagacggggtttcaccacattggccacgctggtctcaaactcctgacctcaggtgatctgcccgccttggcctcccaaagtatgattacaggtgtgagccaccatgcctggccggtattgagtttgaatataatttagcttcttattaccttaataaccccaggaaagtaacatgacctttccaagccttagattccgaaatgggcacaaaaatgccgaggaggttgcttaatatggtagaaagagcaatagattcaagaagcctggggttaaaatctcagcctcacttactagcagtgtggcctttgaaaagatttataatatctctgattttcacttttctcttccctacagtggggctaatgataatatttgactcactggataaatgtaaatattaagtaaggcaatgcaggtgagcctctaatgcagcacttgacttccagaccgttgtcgtgtgtgcttgaaatgccatgtgctccctaggagacgagccatcgctttgtctgctcctgtcccatttttaatttgttgctgctgggttcctgcatggatgaaagtttttttgaaggtcacaaatgaccacttaactctcacgtatggtgatcccaacagatgtttctctcatatccacccccatttcttttctttccagaagatctcaccttttggcctcttgagtctcatctcgaacctctagcattctttccagatgtgtttctcactgcccctcacctctgtgttccccaggatgtcatccttgggccctctgtttttctttgtcaccttcacattctacctgggagtgttacctctgctgatgttcatggtgctcaggggtccgcttgtgcccggtatactttcctagttaccctagtctgggtctctccaccctccggtgctttagactcaacctgctggagctgctgtcttccgacgagcttgccctgcccttcctctgaccttgggcttctgtctcggccagtggctctcctccacccggtccccaaagccgtcaccctcagtgccagtcttgtctctacctccttcagtttctgtgtccaatcgagcatcaaatcctttcaccctaattcgtaaattataactatgctaattagactgtggcctccttggtcatagctaagcatctctaaagctccaggacctttttttaaaattaaaaaaaaaattatttccataggttgttggggaacaggtggtatttggttacctgagtaagttctttagtggtgatttctgagacctgagcagtatacactgaacccagtttgtagccttttatccttcacctgctcccaccctttccccctgagtccccaaagtccattgtatcattcttgtgcctttgcatcctcatagcttagctcccacttaggagtgagaacatatgatgtttgattttacattcttgagttactcacttggaatgatagtttccagtctcatccaggttgctttttatgtaaagctccaggaccttacaccacatctgacacataaccatgcctcaacgattgatcatgtacgtattttgttagatttctacctaagtattttcctttttttgagcttgtaagtgatactgttttattttaaattattgttattaattaattaattaattaattttgtttttgagacggactttcgctctttcgcccaggctggagtgaagtggcatgatctcggcttactgcaacctccgctccctggcttcaagcgattcttctgtctgagcctcttgagtagttgggattataggcacccaccacaatgcccagctaatttttgtatttttagtagagatggggtttcaccatgttggccaggctggtctcaaactcttgacctcaggtgatgcacctgccttagcctcccaaagtgctgggattacaggcgtgagccaccgcgcccggccaattttaaattatttttacattgattttgaaaactgtggtaagatatacacaacacaaaatgtacccttttaactgttttaagcgtaaaattcagtggtattgagtacatacattcacagtgtgatgcaaccatcaccgccctccatttctagaactttttcgtcactccaaacagaatctctgtacgcattacacaataattctcattctcactcctctgatcctcctggcaaccatcattctacttttcctcttgatgaatttgcctattttaggtacctcatataagtggagtcatacaatatttgttcttttgtgtctgtcttatttcaattagcatgttttaaggtttatctgtatgatagcatttatcaaaatttcattcctttttagggctgaacaatattccattgtagggatagactacattttgtttatctgttcatcagtcaatggacatttggcttgtttctaccttttggccattgtgaatgctgctgctatgcacattggtctgcaagtatctgtttaagtatctattttcaatggtttttggtatatatgtagtgggagtggaattgctggatcatatggtaattctgtgcttaactttttgaggaactgccaaactgtttggcacagcagatgtactattttacattccttccagcagtgcatgagggtcagatgattcttgtcttgtcgtgtcttgtcttgtctttttttttagatgtcctgtcgcccaggctggagtgcagtggcgtgatctcagctcactgcaacctccgcctcccaggttcaagcaattctcctgtctcagtctcccgagtagctgggacaacaggctcacaccaccatgccctgttaatttttgtatttttagtagagacggggtttcaccatattggtcaggctggtcttggaactcctgacctcaggtgatccgctcacctcagcctcccagagtgctgggattacaggcatgagccaccgcgcccggcctggatgattgttttttgcatcactatgtcatgtttcttttttgtgaccaaaagagaaaataagtaatatacattttattttatttttttgagacagggtctcgctctgtcaccaaggctggagttcagtggcacaatcaggactcactgcagccttgacctcctgggctcaagtgatcctcccacctcagccctcagagtagctaggactacaggcacatgccattacgcccagctaatttattttttttttgaattttattagagacaaagtctcgtgttgctcagactggttttgaactcctgagctcaagtgatccttctgccttggcttcccaaagtgcagggattacaggcgtgagccatcacacctggccataatgtacatcttaaagtcatcattgatgatgtttgtctgagtgaagggggaaaataagttgttgagacattagtatgtcaggaatcactggtcatggttgcagagcattgtaggtggtggcaggcaaagcgggtcctttgatcatggtggggggatgtaaagcatttctagatcactgctacttatgaggcacataggctacctgtgcactatgtggcctgcctctgcatcaccaaatccaaatatgacagagcggagcacaaggcagagtcaccagggaaggttccccaaaaagtaatgactgcacaggtctttaggtgccttccctgcagtaacccccaacttcttcttctttttttttttttttttagtagagacggggtttcactgtgttagccaggatggtctcgatctcctgatctcatgatccgcccgcctcggcctcccaaagtgctgggattacaggcatgagccactgcgcctggccagtaacccccgacttcttagaaactacccggatttccatttgtatatcagatttccatttgtatatttccatttgtgtatccatttgtatatcagcttctttaataaagatatacaaattgcagtttttaaaaggcttcggtgtactcttattgtatagtgctttgggggtgccagctgagaactcatggtgtttttgggggggtctctcttcctcagtggatcctgaatgctgctgtttatctctttagttctgtgagactgctgaagactccatgctacttttactgtctaagtttattcttttagttatttgtcaggttttggtgtcagggttgtgctggcttcataacacaagttgggaagtattcgctcctttgttttctgaaagagtttgtatgagattgatattatttcttctttaaatgtttgacagaacttacgagtgaagccatctgggatggaaatttttgtgggagtttggattacagattcaacttctttaataaatacaggactattaagattgtcaattttttcttgtgtcattttacccccaaggagtttgtctatttcaccacatttgtcaaatgtataggcatatggttgtttatactgttcccttattatcctcttaatgagcgtaggatctgcctcctttttattcctgatatagatgatctgtgtttctcttctaggggtttatcatttgttttcaaagaaccattgactttgttgattttctttattgtttcctgtttcctatttcattagttattttctttcaactttatatttaattttatgtctttttctagcttctacagtgcagacttagatattggtttgggacctttgtttttttctaatatgaacatttaaggctataaatttccctctaagcactgcttcaggtacatctcacaaatattgacctgttgtgtttttattaccattcagctggaaatatttttaacatttcgcttttgtttttatttttgacgtgtgtatgcattgcttacttttcaggtatttgcagccgttgtggaaatggtattgttattgatttctgttttaatactgtaatggtcagaacatattctgtgtgatttcagtcttttaaaatgtattgagatgtgttttatggtgtggcatttggtctgtcttggtggattttccgtgagtacttgaaaggaacttatattctgcagttgaggggtatagtgttgtatgaatgtcagttgaagaagttatttaatagtttgtttaaatcttccttatcattgttgtctattcttttacttaaaaagtttttaaatttcacttatttatttttgagacagggtgtccctctgttgctcaggctggagtgcagtggcacgatcgtggcttactgcagtctctgcttcctgggctcaagtgattttccagcctcagcctcctgagtagttgggcccatgggcacgtactaccatgcccgcctaattttcttattttttgtagaaacagggctcaccatattgcccaggctggtctcgaacttctgggctcaagcaatcctcctgccttggcctcccaaagtgccgggattacagatgtgagccacgatgcttggcctcttttatttattttaacaaagggttgttaaagcctccaactttaaaaaaatcatgaatctttctgttcttatttctatcaggttttacttcatgtattgtaaagctctgttattaagtacatacaaatttagtattgtatctccttgatgaattgcctttttcattttgaaatgtgtccattcatccctttgcttacactgaaatcccctttgtctgatattaatgttgccacaccaggtttattatgcttattacttgtgttcgtgtggtatatcttttcccccccatccttttattttcagtctgtgtcttcatatttaaaggttgtttcctgaaaatcaaacatcgtatgttctcactcgtaagtgggatctaagctgtaaggatgcaaggcaaaagaatgatacaacggactttggggactccggggaaagggtgggagggggtgagggataaaatactacaaattgggtacagcgtgtatcgctagggtaatgggtgcaccaacatctcagaaattaccactaaagaactgatttatgtaaccaaacaccacctgttccccgaaaacctatgcaaataaaaaaaatatattttttaaaaaagtttgtttcctgagagtataaagtatatatagttggatcttgggttttttatcgagttttgtgtggatgggttcaagtctaccatcttgtatttgttttctgtttgtcatatctgtttttttcctcttcttttttctccttttatgcctttatttgggagaataaaatatattttgttctgtggaaaaacacactcaaagtgttttttctgttctctcaacatgacaaccaacacagaaaatttctgtgacctctggttgccaaaatgtgtataaggatttcttccccttaataaccagtcagtcagttttccaacagataccagctgggtgtcctctaatttacttctgataccgtctatctgaagatagtgttggatcccacagattgagagtccagttccatgagacggttccccgccaccctttcagatacccttagagggccccaggttatgacctctgtttctgattgactgtctgtgaatcagagattctaccgcctcctccttgggtttgagtaatttgctagagcaactctcaaaactgaaggaaacacttatgtttactggtttattgtaaaggatattacaaaggatacagatgaagagatgcccagggcgaggtgtgggagaacgggctcagagctgtcatgcctctccaggtgtaccaccctccaggagcccctagctgttatttgcaagctctccaaaccctgtctttctgggtttttatggaggcttcatgacatagccatgactcattagaccactggctgctgatcaactcgactttcagtctctctcccgtcccccgtggtggggctctaatcatgccttggtctttctggtgaccagccttatcctgaagttgcctggggactgccagcctttggtcaactcagtgcacaaacatacatcactttggagattctaagaatttaaggagttgtatgccaggcaaggtagtcaaaggccaagtagatattttacgatatcatgcttgtattctactttgtcttttctgttggcttttttgttttttgagacaggatctcactctgtttcccaggctggagtacagtggcccgtaatcatagctcactgcagccttgaactcctgggctcaagcaacccttccacctcagcctcctgcatagttgggaatacaggtgcacaccaccatgcctggttaatttttacatttttttttttttgtagagatgggggtcttgctacgttgcccaggttggccttgaactcctggcctgaagcaatcctcctgcctcagcctccagaagtgctgggaacacaggtgtgagccaccgcatccagcttctgttggctttttaagccatatctctatttaaaaagtgcttgctctggagattataatatgcatttttaacataacccccttcaaatattgtactacttcctcttttggacttgtattaaaaagcataaagtaaatatttaccctcctcaaaaggcttgccaccaggggggtggggcattgccaatctgatctgcagttgagctgggtgtagccttggtcctagctctccttggggtcatttcatctttagcttcaggtgtttggtcaggatttgaccttctgttggcttggggtctgggcacagaaaagactggagtttggtttgcagccagtcaccagctttccatctttgtgctttgagactggatgctggatttgtgtgtttgggggagttttctctgatctccagccctatctctggctttctgcattttgggagctctctcttggtcctgcccccagccttccacagggtactgccttgcactcagtgaagggtcctgatgccttggaggggtttcttcaagctttgctgcttggccctaacctttggcagccatggtcttggaggaggaatctcggttgttctcttgtctaccaagctcagcaagcctctgctttgtgcttggagaaagcatagtgcccctcagggcatctgccagctctctgccctgcctggatttctgtggcagctgccaggcatctaggggaggtcctgagtgcctgggactgtcctcctagctgtcctgcctgccctcagcctcagtgtactgcacgttgccctctgcaaaagcctgcaggaggcgttggagaatggtagatttgcccatgggagtctactctgttgcacccacctacatgcaggcggtgaaagtgtcttccaagttcagcccttttctccttcccccgttctctgcccaattctcccttctcttgctcctctgccagggacaaagcagctgttgggccctgtctcctaggaagagcttgctgcttcctggaatttagctcatgcctgttcctttgcatcctcagctctctgatggatttttcaagaagccccttttacagcttatgcatctcattctcattgttagtgcgcaaaggccatctggtgccactttttagagttgaacagcaactctgcttttgaggcagtcttggatggacctggcagccttccgtcctgcggagctgaatgggaacaagcgagggggagctcatgctgagctccgggttcactgtcactactcctggctcctcctggcacctggctcctcagggtctgcctcacttggtggctccagccccagccatggctctcctagccccatgagactgcctggagcgctctgccggcttctctgccgcaggcagtggttctcccctgttgagaatctgcaccactcccggggtgaagtggtgccacaggcaactgtgctcctctcagcgagcttcccttctgtctggaatcttgcaagtcctccatgtcttggccactctccagtgccccctcctctttttgacactttatctggctctttaagttactgatgggagtgctgttctgctagaagctgctctagaagtggaagttgctacaggtgtactcgtaatgggcacttaatgggatagtaaccttttcatgacagtgggatgctattggatgtacaaggttagtgtagaaagatcgtgagatgtagggtttgtagagggcctgactttgagatccagcttcacagatgactggttttctgactttgggctaatcacttcctctccctaggcctcaagtatgccagtaataaaatggggataacaatgacaccgtatttgttaatggagaataatactcttcacaaaccctcaagcctcttttgtaagaagggagtttggctaggtaaatgtggagaggcagagttacttatctgattgctgttggtcccgataaccgggtgctggatttgacttggctgggccctgcttggtcttgggagttcgttggtcacagagcctgagttcccgtctgcagctctgtgctggacgtttggcgtggcctcccctgagtggggctaggggtgaccagttcagtgcagcctgtgtctgggaaggaagctgtgtctgcccagttcttggtgttagtgaggaatttcagtttctaaaaaaccttaggtcatgtccttcaacatagcctgtgttggtacaaataaagatgcgtcagctccatcttttccttttgttttgttttccacttatgtagacaccaggggacaaagccctgcttagtggaagcctccaaagagacctcagcattgttatgttgaaagatcaatatcattattcctaagaaaaccattcaaatactaactgtggtattatttctataagtgaaagtaccagaatcgattgtgaaaatgtaacttcagatatttgatcaaatcacacctgtactttttcctccgtgttttctttttccttcttccttaggtttttcctcctggatttagaaaaaaaagatgtacttctttcccctctttctattctctacctgttcagagtaccataactgactgaatgcaagcctggttgtctccgattattacttagcagagacaagaataactgtgaaatcgtgatgcactggttttcaagccagtgtccatttaaatggccgtaaatcatttctgatccaaagttttggtgatcatattttctccttctgtaagaacaatatagttaagtaataactaggctttcattaaaaatgttctgtttgggccaggcgtagttgctcactcatgtaatcccagcactttgggaggccgaggtgggtggatcacttgagtcccagaattcaagaccagcctgagcaacatggcaaaaacccatctttacagaaaatatgaaaaattagctgggtgttgtggtgcacacctgtagtcccagctatccggtaggctgaggtgggaggatcgcttgagcctgggaggtggaggttgcagatcgcgccactgtactccagcctaggcgacagagcaagaccctgtctcaaaaaaaacaaaaagttgtccgggcacggtggctcaagcctgtaatcccagcactttgggaggctgaggtgggcggatcaggaggttaggagatcgagatcatcctggctaacacggtgaaaccccgtctctactaaaaatacaaaaaaaattagccaggcctggtggcgggtgcccgtagtcccagctactcaggaggctgaggcaggagaatggtgtgaacccgggaggcggagcttgcagtgagccgagatcgcgccactgcactccagcctgggcgacagagcaagactccatctcaaaaaaaaaaaaaaaaaaaaaagttcaaaataactttcaagggcattaggtgctctaatttgactaaaatcattgttggataatctgatcaaaaatggaagaagatggattgatttttagtgacataagttgaggaatcatcacctcccactaaccaaatcatatgctgtgaacatgtcaaatttttcacaagcttttctccagcttggcatgtggaacagacatcagcagccaccacggccttgtgtccttttattcctcttatggtaacactgggtatatgtggtcaggcttcatattttggaacaggaagactcggtcaactcttgatctgaatcctaactctgttcctctgtatgaccatgagaaaataatttcagttctccaagcccattaaactttattgctgtgtccatcaacagatgaatgcataaagaaaatgtggtatgtacacacaatggaatactatacacctgtaaaaagggaagaaattctgttatttgtgacaacatggatggaactggagagcattaggctaagtgaaataagccaaacacagaaagacaaataccgtatgttctcacttatatgtgggattcaaaacaattgaactcatagaagcagagagtagaatggtggttagcagaggctgggaggtaagtggaatggggagatgatggtcaaaaggtagaaagcctcagttagacaggaggagtaagttgactttttttgagatctgttgcacagcatggtgaatatggctaagagttgagtgctgtacatttcaatattactaaaggaacaaatttcaaatgttcttatcacaaaaaatgttaaatatttcaggtgatggacatgttagcttgatttcgtcatttcacattgtattaaaaatcataacactttgtatcctataaatacatgcaatgataatttgtcaaaatataataaaaattattgctatgaaacattttcaaacataaaggtaaaaagaattgtaaaatgaatcctcatatatccatcacccggattcagtggttatcaagacttttacacatttacttcatctcttgctttttaaatttgctgaattattttaaagaaaatctcagagacatatcatttcagaccttcatactttagtatgcattgctaaaaaatgagcattttcttatataactacaatattatacttaaaacattaataattattttttggtgacatttgataccaatccataatcaaatgtccagggttgttcctgagttcatctttatgaactttaaaagggggatcataatgcctttccccacttctttggcaggtattttgtaagagggtattatatgcctattttggataaaaaataatgaagtttgttattaatatataccagaatcccttgccttaaagattttatagtctaaagaacatagtacaatatttggcacatcgtaagtgctcagtaaatgtaattgtgggtagggacatgactttcttccttttaaggagcttatagtccaaatcttttatttttcgttgttaaacttaaaaaaaaattaaagcagaaatcacttataatcttatcactgtgaaaactttgtaagttgtcctgtcctttgtaaagcccttcagagaccatgagaatccagtagcaaagagcacttctagcctctgggttttagtctctaaacacttctttccactaaagggaatgagagctccttggagaagtgatttaattctaggcctggggctggatatgaaccagaaacaaagggatcaaagaataatgggaccttatccaaaggacacaggaaccaaccagaagggactcccactggccaaagatggtgcctacatcaaaaaagaagaaagctttcaaataaacaatctaacactgcatcttaaggaattagaaaaacaagaacagactcaaccaaggttagtagaaagaaggaaataataaagatcagagtggaaataaatgaaatagagatgagaaaaaccatacaaaagattaatgaaatgaagagctggtgttttgaaaagcttaacaaacctttagctagattatgaaaaaaagaataaatgtcaaatcaataaaatcagagatcaaaaaggagaaatttacaactgataacacagaaacataaaagatcacaagagactattacaaacaattatatgccaacaaactcagtgacctagaagacgtggataactgcgtggacacatacaatctgccaagaatgaatcatgaagaaatagaaaatctgaacgaccaaaaacgaataagaaaattgaatcagtaataagaagtctcccatcaaagaaaagcccgggacctgagggcttcactgctgaaacatttaacaaagaactagtaccaatttttctcaaactacttccaaactcattctgtgaagccagcattactttggtatactaaaaccagagaaagacacaccatcaacaaaagaaaactaatctcaaaagacagatatccctgatgaagattagatgcaaaaatcttccacaaaatactggcaaacaaaattcaacagcacatttgaaagatcttccaccatgatcaagtggaattcatcccagggatgcgaacatggttgaacatagatgtgacatatcacattaacggaatgaagaaccaaagccatattatcatttctatagatgcagaaaaagcatttgacaaaattcagcatcccttcatgataaaaactctcaacaaattaggtgttaagaatactcacaaatagtttccaaattctggaagagtcaggtagaatgaaacaaatatgttctaaattttgttcataggagtacactcaatcattaaaagctgttaatagctcaaaagaaaagtttccttgactctgaaaaaacaaaggaccagcagcgttttaagcaaaaaatcaaaaagattacttcagtcttgtattagttcagtctgtagttaattcccattctgcttgatattcctgaacatttcagttctccatgagtcctgaaagtttttcttctattctgatgtcacaatctccaaagttatcagaaacttgtattcaacagcacctggtagagttttatagctgattataaaaccaccttctaaagaccaaaacagacaacaattgtctgtggatgacaaaaggttttagggcagccatagtcaaagatacaatccataaggaaatttgttacctctgtggcacacaataatttaacataacaattataattattactgataatgtacactaagtcatatcagaattataggagtttcccatgattttggaacacataccaataacatatttgtgtaaatatagcctaaagaaaactaaacaccatttcatatttgacagtgtttcctgtgtaatttttataccaaataagacaaattatgtcacttttggactttagggaacctagtatcttaaaggattaattagttcagaaaaagatataatttataatttgattttggaaaggtcaaaggtttaaaacacttatatcacagatcattgtaaaataagtcattcatttgaccaaagtaataactcaaggatttttttagaaaggtgaaaaccttcgttctttgagaaagaagccttaattttccaaacaatatttcctaataaaatagcatgaaaccaattaaatttgtttttcaaaattttataaactataaaattttaatcttgaacacaagatataactttcataagctttttataatctttataacctttactaaggagttggttaatgcttcaagaagaccttgttaatctgacacaggggctcatatgctggtcttgcatcagtgtgtctttgacaataatgattaatttatagagaaactgaacttattttatctctcaaaatcagcccttaaatctcacatgcccaccaaaaaaaaaaaaaaaaaaaagacatacaaatggccaaaagatgtatgaaaaaatgcttaacatcactaatcatcagggaaatgcaaatgaaaaccgctatgagagatcacctttctccagctggaatacctattatcaaaaagtcaaaagatgaaatgttggtgaggaggtgaagaaaaggggttctttacacgctattggtgggaatgtaaattagtacggccattatgttaaacagtatggaggttcctcaaaaaacttaaaaatagaaccactgtatgatcttccattccgctactgagcatatatccaaaggaaatgaagtcagtgtcgaaggggtgactgcatgcctgcatttattgcagcactgttcaaatagccaagatacggaatcaacctaagtgccattcagcagatgaatggataaagaaaatgtgatatagatacacagtgggataccattcagccataaaaaagaattaaatcctgtcatttgcaacaacacagatggacctggagggcatatgttaagtgaaaaaagccaggcacagaaagacaaatccctcatggtcttcctcaggtgtgaaatttttaaacgtttgtctcatggaattagcagaatagaggttagaagagtctggggatggttggcagaagggagatggggagaggatggacagtggatacaatgctctagttaggagaagtaagttctggtattctaatgcacggttgggtgactatagttcacaaaaaggtatatttcaaaagatctagaagagaggaatttgaatgctcttatcacaaagaaccgataaatgtttgatgcagtggatacgctgatgaccctgatttgattgttatacagtaaatgcattaaaacatcatactgtaccccagaaatatgtgcaattattatgtatccattagaaataaaaaaggatgtgataacaatcaatggaaacatcaaagagataaaaatccataggtatataatgatactaaacaataaacaaaacacattggtcattactggagtttcacagggcaatagttttccactcagtaaataaagggaaagactcaaccgtttattaatgtctgtgttgtctgcgttccaggataaccaaatgattgatgaggaaaaaatccttccttataaacaaattctagcttctaagtgcagaggaattagagaattagaaaatcaccagtttgtaattcctgatgaaataatagatctggcaacaatttatagccgacacttgaatcctttaggagaaggtggatggggcctttgcactggatgggccatgctgacaattgggcataagcgtttgactctagaaaccccactgaaatggcgatggggtcatatggcagtaggggaaagccaagaagcaacccccattccctgtccctagcaggagcaccacacggcagtaggcgctgctgaaaatcatttacaattgattacatatccgcagatcgcttctgcccctgcagctggcgacggtcccttttccaccccagcagaagattagcatttgactcccttcagggagtcagcaggcacagcggagaggtgtgccctgctacgctcatggggagtaagtgaatattgaggcatccccaacctggccttccacaaagctctgagagtgctcacagccaggctatatccctacataggacattcctccacagcatagtgaccagacctaaagcacaaacacgggggttctctaatgaaatggcacagccagaccacgctgcggtgaagcagcctcccctgtgctactcagtgtgtacgttattttctgtctagaaatgccattcagagcttagccgagtgatacactgtggtgcctttcctttcttggataacggtgcaagtggcatgaggcaccacaaatagatccctttatttcagcagcatttaccgagagtgtgtatggggtggtagaattcaactgaataggatacctcaaccataagtgctctgcctaacattaggcaaattagataatatacatgatatcagctggagccctttgggagatttttatagattgagaatgatttggttatttaaaggcttttttcatgtttcagattaacattgttgtgttgtattcaaaagtaattctggtcacttttctgctctgctctctggcttcctaagaatgagggaggctgggtgtgatggctcatgcctgtaatcccagtactttggaaggccaaggtggggggatcacttgagcccaggagttggagactagcctgggcaatgtagtgagacctcatctctacccaaaattaaaaaatcagccaagcatggtgacacatgcctgtagtctcagctgcttagaaggctgagatgggaggattgcttgaacctgggaggcggaggttgcagtgagctgagattgtacctctgcactccagcctgggagacagagtgagatcctgtttcaaaaaaaaaaaaaaaaaaagaagaagaagaagaagaatgcgtaggcacagaaaattcctatggtagcagtttaacaattaatacatgtgcctgagctctatgaagcccttgccttgatatttattatttatggtcaccagcctcagtggagcacttggcttcactttacagctacttacctgctctttgtccactccagtgcagctatatgataatgatgataatggttattatcatttcagtttattcagtgcaccgtatctgccattcactgcttttttaatgtattatcgcatttatccttagtaattcctgatataggcactcctcttactgcaggcaaacaagatgcagaaaggttgaaggacttcccctaaggtggtagcacagtagatagggaaagaccaaggcatctcctggagtcggatctaacttcgctgttctaggtgtcatccctggcgatcgtgtccctctgctgctcttctctccaagtcctctgtcttccccatcagcagtcactttggtatttcacagagaagctagatgctgcaaggagggacttccttgttcacacccctcccataatcccatcctttccttaattctttaaaacactctagggagaaaaccacaggccttaggccaagtacatggtctttgacaagctgcttaatttcccttggtctcaggtttttcatctgcaaagtggggacaggagtgcctgccttcctgagccagcctgagtcctagagcacagcaggtgctcctgtgctctgtcatgctgtgggtgagaaggggtctgtgtccgtggcctgtctagactgtgccatggacaggaagcggacatgattatcacctgtgtcctcttttcctccctccttgtgaaagggatggggcaggatggtgaacaacagtcttttctcacaaagctctatatttgcatcaaaaatgttgatttgtaattatttgcctaagtgtctgtcatacagataaattacaaactcctgagggacagacaggtcctggcattttgcttggtaattacctagtaattgctgaaaaagtatggttaagttataaaatatactgattctctagtcctgcctacagactttcttgaaatttgataagggtttattttcttggaaaatggaagtctcctggaggatactaacttaatttcccttttatccacaggcccttaagaggagcagtgccggtgattttcgaataagtggaatatggcttctgctttgttctggtctcttttgctcactgccccttcatttctgtcagaagattggactcactggactgtcatgaaatgccccaagtaaaatgaaagccagccactttgacttttgcctaatacatctttattttgttttcatcttctcttcagaaaagaaagatgtggcccaaagcctagagaactatacgtccaagtgtcctgggaccatggagcccatcgccctccctggcggcctcaccctgccaccggtgcccttcaccaagcttcccatcgtcaggtgagatgggcactgcagagccggaaaggcagctgccctctgggacaccgtcctctagtctgattgtgaatagagatctttagaagagttcccatttttgttggctgtgtatcgggttcattatctcattaaacttgaaagcagccctatgacatggaagtaagtattttagagatgagagagtcagggccagcgacattctgtaactgctgcaattccatgcccactaaatggcggagtcacgtctgcacccagccttgctttgttcgaaagcctgccttgcgaccactacaccgtggtggaaaccagtctgatcacatcgtcttctccttggaagttttcagtcatttccctttccgcaggccatgcaccccagccacacgggaacagggcagctcctcgcccacacaagcacttgccagctcccacctttgctctgcactgcctctgcctggcaggctctctcctctcctggcttcattctgtctgtgctcccttgttccttcatgctcatcctcagccccatttccaggacacctttcctgagaggcgagctccctgagtttccatggcacccattgctcactgctctcccaggatttgctgccatgtgccgtcctttctgtgtgactgtcactcctaagagtgtgagattttagagtggagaccttttggcacatgcaaagtgggtccttgcaaaaggtttttgttttttcttcaccactcaaggcttaggacctgcaaaaggtttatgaactgatcttgtgaggtgatttctgaatttctgaaatatttgtttgaagaccggaaagaaacagttgaatctgacattttgctgtcgagtggaagtgctgtcaccttaggattcagtgtgatgaagatgctaagtatctttaaaacgctcttggcttggctattgttccccagcttcactcggtcttgccatgtactcgctttgactcacgggcctgctgcattccatgaatgagtcactcaacctccggggtatcagtttgcttatctccccactatgcccccaaaattaagaagaaaaccgatagcattaagctattatgagaattcaatgaagtaacatgtaaaagcatgtgtatggtgcttaagaaatgttagttttctttctccctgcattctttgaaggcaagtatagtactgccaaatgaaatggtttctttttgccaaagagttgtgtgctcccgagaagtgggggcagaaagggtcgctgtgcattgcagcccctggcaggccacactggaattttaaggtgttctgaagagcactgctgagattgttcatcaggcagagctgcaaggggcagcatccaaaaggcgtggctgtggcctgagaaggtgctgtggctgctcctcagaatgtccagagggacttgcaacaccgctgtttggagggcccaggaagggcgtggctgctctgcagtgcccagtgcttgctcagcactcaggcaggctgtggagcaaaggggcctttgaggcttttctatgactaagacttagagccgaatgcatttgacttgggattaagggcatgattcattttttaaagattaaggtctagaaaagcctttcttaataattttatatttacatcatgacttgaatcatttttaaatttagaaaaccttgcctagtagaatgttatgaagcttacagaacattctgggtgtttggtgctgtgtgtagatatccaggagctgaggcttcttgtccctgaagctggggatgatcggtccttgcaggtcattggaaccaaggaagaagcgtgcttgttctcctcacagcctgccaggcagccctggagttaagcgagaggccctgggttcactctcacttgtgtgtggccgtggtagagaagcagtctctttacacttcgttttcttcatctttaagccgggcttaaaaattgccccacacagggtggtttgttttgtttcagctgagcagaggcacacaaaagcgcagagcagcatnnnnnnnnnnnnnnnnnnnntacattgaaaagtactgtaacattcacattttagtccctcggctgttgaaacattagaaaaggcagattgggtgaaagtgtaacagtctaccgtttgggcaagtgctgttttccgaaccttctgtgcgcgtccctttcctgggcagtgtgtctctttctctgttagggtcctgaggctcctgtggcagagctccctgcgaacagttagctgagtcttgcctggcatcctggtgccattgttcttgcccagtgtggtcatggactgtttctttctttcttttttttttttgagttgtaatctcactctgttgcccaggctggagtgcagtggtacgatgttggctcactgcaacctccacctcccgggttcaagtgattcttctgcctcagcctcctgagtagctgggactacaggcgcatggcaccacgaccggctaatatttgtatttttagtagagacagggtttcaccatattggccaggctggtctcgaactcctgacctcgtgatccgcccgcctcagcctcccaaagtgttgggattacaggcgtgagccactatgcctggccatgggctgttttcaaaaatctaattttatgtatgacccaccatctgcataaacatattcgtgatgattttctgaagactttagctagagaagtaacccctaagtgtcctggtgactccttcctcacgtggatcgtacctggtctcattgaaaactgggaagaagaactgcctgagattcagtgtggtaaacccacggaacctcagtacgaccggtcaaatgaaagggaaggtctttggaacatttggagagccggagtatctcgtagcctactctgctccccaccgcttagagaacagactctaatgtacttgctttgcatggcttgcagggcctctgtggcctgccctgtctccagctttgattgtgagcgccctatttccttggtcctacgctcctgctttcccttgtgggaatacttagagtgggccaaatgtgtggccggttttgttccttcgttgaggctttatctctggcttggaatgcctgtgcttccctgctctgcctgatgacacttagtcatctttcacgattttagttcaaggattatgtcctctataaagccttttccagagccacccaagtagaaatgactatactttctttgtaagttaggaattatttcagctgtaaagaacagaagacctaatagtagatagtcaataggaagatatttttctagtttattaagaagccggaaacaggtggcctctctgtaactctgtctttacctcaagattaccagatggctgctgcagctccagataacacatctacatccaaggcagaaagaagggagacagggcaggtctagagatgtctatcttttgcttaatagggaagcaaaaatgttcttgacagattcgagtaggcttctgccccagtctcattaacaggaagtgtgtctcatggccatctctaattgcaagacaggctgagaaaataaatatttagctttcctagaatctgtgatataggtggggaatggagaatggggtcagaaattcgtgcttggtcagccagccaacagtgtatgccatatctttcttctgtagcgcttatggaacttgactggacatctttgttgacattttgggtccttctctcttctttgtctttgtagcccccaggtgaccttgtgtgttgaatgagtaaatagttggatcccttagaatattttgtaatagcagctgatagaaaccagactaacttaggcaaaaataatttatggcacatatacctggaaagttcagggaggaattcaggtagggctggagtcagggctcaaacaacctcatcaaaacttggtttctttccctctgagctctgtccgctgcagtgttggctttagttgcaggccccaggtgctatcagagtggctcatcacctccaggcctcacatcctcttgctactgtgtccaggaaaagagagcaggtgccttttagtaacacctgtaaaggaacactgctttctttcagggggacaatgtccttttgcttttcactgcccctcatggagttatgtactcagatcggaccgagtccctgcaaaccacatggctgcaaggagaccgtgtgtagttcccctaaagcaaaacctacgaatagctgggcacaggagaagaggcaagtgggtgttgggaggcaacagacaaggacacaatagcaaatgacacccaaggcccactcatcccaccacactgcttcagatcaaaagtcctggtttcggtttgtgacctgtaatgcctatgagtcaagataatgcattgatgaatatctgcccttcccaagtcagaaagcataccttggaaaagtgcaaccttgaagcaagtgcacgctttatggactgcatgttctcttccttggacttgtggcactttctgatgcagagggctggttatatgcttctcttcttactaataaataggctcatgttttatatgagactaattttcacccatagataaaaatgtgcacgctttaatgtgctgtccagattcgcttttcatgcctttcttctaagtttttgccatttgaaagtagggagaattaggacagatgtgatgtccttgctccatataattcttcttctttttttttttttttttttgagacagagtcttgctctgatgctgaggctggagtgcagtggcgcagtctaggctcactgcaacctccgcctcccaggttcaagcaattctactgcctcagcctccgagtagctgggactacaggtgcgtgccaccatgcctggctaatttttgtatttttagtagagacagggtttcactgtgttcgccaggctggtctcaaacccttgacctcatgatccacccgccttggcctcccaaagtgctaggattacaggtatgagccaccacgcctggcctccataattctttagcctccagcacttttctttttcttgtcaaagcaagatcttttttcccccaagatatgccatgggccatacttctagaaaagactgtatgccacttccttctctaagactgtcatgatgatgtgtgagggatactgatgtgtacgcatctctgtaggtttcagaaaggaaggatagtaactaaaatgcattgacatatttatgccaagcaccaataaacccccttcatgtaaaattggaaaagccactggcttttgttcagtagtcttgtattcctatcccgcattctgcagttagctgtgtgactttgaacaaatgatttaacttcctcttcttgaactgaggttgatgagacatacctcccatgcatggatcaaatgaaatgtttgggaaattgttttataagcagaaaagctctttgcagacatgagttcttatagaggtttcagggaattttgcctctaattagatgtcaccttaccattccctgtcagtttttacttttgtttgtacatgttaaattaaatcaaatgaattagttccatcactcccttaagaaatgcatatatgtagctatttagttattttaaaaaattcctgggtctggcacggtggctcacgcctgtaatgtgaacactttgggaggccgaggcagggggattgcctgagctcaggagttcgagaccagcctggccaacagagcggaaccccatctcttccaaaaatacaaaaaattagtcggatgtggtagtgcatgcctggagtcccagctacttgggtggccgaggcaccagaattgtttgaacccaggaggcggaggttgcagtgagtggagatcgcaccactgcactccaacctgggtgacagtgcgatactccctctctctctctctcaaaaaaaagaacaagttaaggtaaccagagtgaggggaaagtaacagtgggatagaaaactaacaacaagttctgttagtacctggaattcataatgtcctacgtaatggctggagatgggagagagcgtgattgtgaggtaactgacaagaaggaagcgtgattgactacaagagcccccctctcaagaacaggcatgtatcagtcacactggggaaatgcatctcttcccagcagtgagctgggaaacctctctagtggattctctcgaagagaacattctgatgttttgagtagcatgctcagcaacatccccatgaagatctaggcaggtgtctgatgttgttttgctgttagcattcggtaacgcacactgagggcatgggaccggagcaccaggggatgaaggtggctctcccagaggacagggcggtgtggcctgctgttgactgacttgcgttagcccccctgctgccagcatctaggataacgggtgggctgctgtgcatcacacactctttcatgaatgccattgagcttttggcaggagttgggcaacagagaatccagagttatgttctcaggcatcaagaagagctggtaggtgtctgccgatgctgactgaggggagcgggctcgtgttgttaatgctctcagcacctggtccgtggcaggcctgcagtgaatctgtgtgcagtagttaaatgtccacatcacatgtagggttgtccccctcttcctaaatccttgctcctcatctccacctgaaggaaggcctgggcagtagctatggattaggccaaggtgcttccttaggaaacaaatccgggactgtcttcatatatcaaccaaacacttcaacgtcctatgcccggaaacatggattttaccagtttaattaaaaaaaaaattggggctgggcacggtggttcacacctgtaatactggcactttgggaggcagaggtgggcagatcactggaggtcaggagttcgagaccggcctggccaacatggcgaaactccgtctctacgaaaaatacaaaaattagccgggcgtggtggcaggtgcttgtagtcccagctacttgggaggctgaggcaagagaatcactggaacccagaaggtggaggttgcagtgagccaagatcatgccactgcattccagcctgggcgacaagagcgagactctgtctcaaaaaaaaaaaaaaaaaattaagtcaggcattgcaggtcagcccctatgacataagaagagctcagtaatatgtacacttgaagactaaagctcctgttagtgttacagggtaagctggttgaaaaatgtctacattggtgagtaaattatcagacctgctatatagaatcgttaaacataaacgaatttactgctgggtttggctcataattatgactttggttttagaatagatggtcagagccattttcttttcccttgaggcctttcttagtatttgacaataaaactattttagcaatatacaggaaaatacttacttgttctctgtagcatgggagcatgaactaggctcacccaaagatggtttcaagtaattccgatgcaagtaatgaaaaaggagccaaaatacatccctattttaattgtgttccaaaattcaattaataaaatatttgttgagtgcctaagacgcgcttttggcccaaggctaattgcgaagagatggtagtggccaagcgtgatctcatctgccaggaggcagccaagcccacatcctgttgctgttgaccagagttaaagcagaggatggttctgatagaactataagtgatcttttttccttatctatggaattctctgcaaaaatgatacagtgtgtacacagtagccaacagtagtctatcaggcccctagtaagcgtgtagattattaacacactgtaagtcctggattattattaaggaagtggaataaagtttcagtgccatttccagttaaccagtgagtctttaatttgggggcagtgatggggagtgggactcattgaatatttttttttaagagctaacattgagctccttcaacctggagaagagcttaagagttaatgaaggcgtttacgtgaacaaagacccaaatcctctagtgagagtgagcttcgagttgctttgatacgtttaaaacttaaacttttaagttaattctaccgtttgaggaaggattctaggcatttattcagagaggtgtttagaggcccaaattcagggtcgtgcttcggactcccagacaccaatcaggatgcagcctccatgactgtgttcatgccactgtccaggattttctcccatacatggtctagcggccaagccataaccttccttaagaatttcttaaaccagagctgtttagagctgataagaaatgtatagcagcattcaggatgggagcggctggccccaccttgctactacagctggcgcggttgccctctccagctctctcagttgctccggactcggagcaagcagcctccacgccgtcatacacacgaggcacttgaggccagtcgtagtccccacccatctcttcttggatatgtttccctgtgaataagattgatgaattaaataccaagaaacaaaaggtgagtggttgttgactgtcattcctctcgaccggttcgtctggcgtcgctttcctgatcagcgctctgcggtgctctgcgcggccctgacggctgctgttcctgagggaagtcaggtttttacggtgtcagcagtttccagatggaatctgtcaaaatcatccttgtcttggacactttatccctggacttctgctttgctgttggcagcttcataggctaagtacaatttttattagttccgcagctacagacagataaggtcctggtgcccctgtcctcagcaggctcacagctgagtggaaacagatacagaatgaaatggttctgatccgctatgataaaggcataatgaagggcacacacagagcgaagggagctggggagcacctgctgggtgtgcccttggtctggagggcgcggggttagcaccatctcctgccgtgagtcactgagggtggtgggtgagaaccacgcatgtggcaggctccccggggctgggatgtgggtctgtggtggggattgtctgccgagtgctgtaggcatgctttgcacagagcaggctggaatgaggcatctgaggtccctcctcactgagagaggtggtgattttgtggattctgtaaggcagttgttattatgcagtataggttagggtgcactgtggcagaaaaattaaccctgaaatcttcgtgatttactgtaacaacagtttctacctccctcacacaagtttggtgtgggttgggtggctctccagggcagctgagctctgggaggttgctgagtgctccaggccgcatctgtctggtgctccaccttctcaatgtccagcctccaggatcaccatggccgtgcagccgaaggagagagctgggggctggcccgtcactctaaagtgtgtgtctcacagaggcctcggtggctcccactcacaacctactggccagagctcctcaggtggcctcaccttcctgcggaggccgggaggcggggggtggggagcacgtagatttatcacgatcagtgtcactatcagtcttcctgttttcccacctctactccttgtcctttctgtctgacgtccaggagtgttccagatcttaaccaccgtcttcccaaactggtcacaagggtgacagcaccttctagtactgtggtttaagagcatagtgtcacctgttgttactgctttccagccatcggatttgcgacagtatacttagtccctcttgcgtgagtttccttattgatgacatggagacaatagtaatagtacccaaactaagaaggtgtttgtgatgtttaagtgagagaatacatatgcagtggttagcacagtgcctgctcatgctcagactccatggattggtaaatttatcttaatgctagctggatgaattcgagcatgagtacagattggcagacatccacagctgggatactgtgggaagcgatgacagatacagatgctgctgcatgcgagtagagcagagggtgctgttgaccttctcatgggtgccatctcttcccatgggtcagagtctggctgccacttgctgtgggcaggtcccttgggaaagggagaggcagagagagaagagccatcctgggccaggcagtgggccctgtgccaggagtctttagctggatcctccccatgggtccatggggaaggtggtggccccacctgcactttatacacaaggaacctacgtcttagagatggcaaggcacgtgcccaaaggcacacagctggtaagtgtgaagcgagatttcaagctggcctttctgactccagaccatccttgggcccagttcaggagtccccagagggaagtggctgctcccccagttccagggagtgatttcccctgtctgggagaatcttgagttactgttgcaacacttccttgctgtgtcctgatgcctcggagtgcttttcctccctccatttatcttccttctgactgatttactgtttttctgatacatcatgtttggttatgtttatcctgaaaccacgctaaccagacagttgaagtatttgtgttctgtttgaaacaacaggcatgtgaaactattgaaccttcctgctagcctccggccacacaaaatgaaaagcttgctgggtcagaacgtgtcaaccaaaagtcctttcatctattcaccaattatcgcacacaaccgtggagaagagcggaacaagaaaataggtaggacgtcgatcctggctttcccaccgtgctctgccacctgatttccaatggcttttctagatttttagaacagcattttgagccagttcatgcatgtgcatgtgtgtgcgtgcgtggatgtgtgcacgcatgcatatgtgtgtatatgtgtgtgcatgtgtgcatgcatgcatatgtatgtgtgcatgcgtgcatatgtgcgtgtatgtgtgtatgcatgcgtgcgtgcatgcatatgtgtgtttacatgtgtccatgtgtggatgtgtgcacagatgtgtgcgtgtgtgtgcgtgtgtgcagtctgtcatggaagtttatttgatttgctgcttttggcaggcaattgcccatagatgtgattttaaaaaatttatttcatataaggtaattttgtgaaagttctggaaaccagaaagacttttgttaactgagacttatgtgaactacagaagagtgacaattggagatgtagactgattttacaagggctgaagtgacttctgagtcatcagagaaagattcagggttggatggtgttcaggactgagtggagggtgaggtaatcgtgttatgttcttttgtgaacacaggtgatcaggatagtcagtcctgggttaagctgtgttgtgggagagactgggagtggacaatctctcctgagctttcctgtgtctgagctctcgtccctcctgcaccagggctcagcatgcaccaccggccctgtcccttggtgtccttcccaaagcccggctgtagtgccaagctccccatcccttgctgccacaaagacatgcccaaggccccttgcaggagattgtgactgccagtcactggggaccactgccggctgagcccacacgtcctgtgacagaaccttgagggcctggaggctggccgctgcttggcgactgccggggcctccgaggagtgtgagcgggaggcctgcgcaaccgcggcgctctgtgtttgatatccagtgctttcttctccttctgtttctttatttctactcttaattcctgtacctccaatttaggaagaaggcattccggctcctttttccaccatgcttttctttccaggacagaggcttcctgttgcactcgcaagctcacccacaccccgagttacggactgcaggcgctccctgacccccccctgcccacacccctcccgctctgtcggggttttcatgccacctcctgccaccatcactctggtttagctacagggactcctttctggtcgtggaaagaaacaggcttgttccaagcccagggctttggggctcgctctttcctttgccaggaactcgtcccctgcccctctatcattggctctcttgttgtcacatccttttggtctctgttcaaatgccccctccctcagaggggtgttctctgatcccagcgccttgcaggccactcctcccaccatctctagcggtgctgtctgggattctcttcccagcttctctccagctcaaacccacactggcccattgatgctttgtcctgcaatatcacctgaagcccagaattctgtcaggctgtgtgcagctgctgtctccccagcacctggagcagtgacaaaagaatgaatgaatggatggggtacatattatgaatcccattttatagattttgttgacggggaaactgattcacgacgtttaagtgtcatgtccaagaactcacaggagaacctagatctcactgtacatttcatgttcctggcagggcatggtggaattcaaggcagaagggacaataagagcattacgtgtagcacatcatcttttttttttctttgagacagggtctagctctgtcacccaggctgaagtgcagtggtataattaggactcactgctgcctcaacctcctgggctcagttgatcctcctgcctcagcctcccgagtgggtgggaccacaggtgcatactaccacacccactgatttttgtattttttgtagagacggagttttgccatgttgcccaggctggtctcgaattcttggggtcaagtgaatcccctgcctcggcctcctagagagctggggttacaggtggggacctctgcgtccagccagcacattgtcttgatgagcatttctcatatattactagctctaggatttcttagcttctgtaagggtctcataataaacttcattaacaatttgtaaattatccgaatgccttaaaaaataaagtgcttcagaggaaataaagttgtttgctgagataaagggcataactagggtaggagtactcaaagaaccttgtgcttttaaaaatggtaatcatttcttttattctaattgtgctttataagaggctatcatatgttaccttatttagtttttccagtatttttgggagatttcatttttatctcccttttacagatgaggaaacaaacttagagaaacgacttttagaagtaactaaaagttactcagttagtgacaagcttgatttcacatcacagaccacgtgtcctgttcccattagtaccctatggtttcctctcacgtgcacagtaggtgtgggacagacctattacctggacctcacagtcctcaccctcggctggtttttcagtttagttcatgcaggcaagacacaaacgtgagaagttgactatcgagactaaatgtgaataaacgctctctaaaactgtacatctgtcagcaggggtacctggttacttacacgttgaactcgaatgaacaataaacactgggctaactgggagtggggtgtggggtgggggccccgcagaccctggggaagccctctggaggctcagacacagcctccatctgaggagccgtgtgggctttgcaaggagtggctccagctgttctagctgttcactgttagaatgagaagaaaataaagagacatggggtcatgcccttgaaaaactgcagtcaatactgtattttggaaaatttctgaaaatgtgagcactaactatataatctactctagaatttgtgtgtatctgtatgtgtgtatgtgtgtgtatgcgtgtgtatatgtgtatgcatctgtatgtgtgtatgcatgtgtatattgtgtgtatgcgtgtatgtgtgtgtgtgtatgtgtgtgtgtctatgcatgtgtgtgtatgagtgtgtgcatgcatgtgtgtgtgtgtatgcgtttttaaaatgccatttttagtctattgattctgaaagacaccccaatcttgtctctcctgccactgcttctctgatctggagaacatgaggtgacaggaagtgtaggcgctgggtagacgtggtggatgaacaggcagggcctgatggcagccccagatgtgctccagcgtgtgttgcggtaagcaggagagagctgtacaaatcctgtcctcactgtgttttggggacgtcgtttcctggcctcctgtgggaactccacctttcctctctggagggcgtcttccgagctccgtggggatgggcaggccaccctcagggctcctctgtctcccctggccccggacttgctgtcctacgagtgctcaggctcttccccctgggaccttctagagtctctggctgctcttttgtgttctcattggggttggtgatgaactgtctcccctacggaacttttgaggaaagcttcagttctttcgttgagaaaaacttccagaggtgatttaggagactggaggtgtgagactcctcttctcaggatgggccatgtgatttgtggggcccagtgcaaaatgcaaacatagggcctttgttcaaacatcactaggaattcgaagacagcaacagcagagcgtgaacccagatgccagggcacagggccctgtgccactgatggcatggattgtaggccctgcctctctgcttttccttttcaatcttaagaaattgttggccgagtgtggtggcccacgcctgtaatcccagcactttgggaggctgaggctggtggattgcttgagcccaggagttcgagaccagcctggccaacatggcaaaaccccatctctacacaaaatacaaaaaaatagccaggcctggtggcgggcacctgtggtcccagctagttgggaggctgaggtgggagaatcacctgagcctgggaggtcgaggctatagtgagccaagattgtaccactgcactccagcctgggtgacagagcaagaccctacctcaaaaaacaaataaaaagacattgtcaaagattccttttatgaaaattacaatctgtatttgttgaagagggcttaagcaatcattatccagtgattctcaaaactatttgatgctgatgctgccggcattattatattccctatttgcaaataagaaaattaagactgaacgaaatttaagtacctgccccaggtcagatagcttatcagtgacattccccgggctccatgccaggttgcaggactcgatgcccagggccttttttctttatagtatggcttctcaccatagtaagaagtacctgctcatctgggctgaggacaaattcagtggatgatgtaagatttttttctgagatataacgcaagtttcagccaaaatgcacattatttgtttggtaggaaaatgcaatttatatcccatagcttctaatatctttttggcagtgtactgatcagtgagtgcttgtgcagaagcttgacagatcacataactttaacctaaatttccagtctctctaaatgaacctcggtgtataattgggggaggtatcatcacagcaggtggcatagggttttggagatgaagaaactcttgagggtagtgtttgagaccattttccactttaacttgggatagttcacgagtctttgtgtgttggctggtgtggccatcatctgagctacatccatgcaaagatgactgcaacactggcctcagcttgagtgtgttgggttgaaggccttctgtcatttgtgataggtctttgtggtgctgccaggcttagtgccaaggtcgactgctgccccagaggcagcgtggtggcctggagaggctgtggctgtcaggtggacttgggctgcaccctggccctgcagctccccactgtgtgaccgtggacagctgattgtgcctctgtggtctgcagtcatgctatctgcagaatggggacattagaagctgacacggagggtggttttgaggatcaagggagataatgtttctaaagtccctggcagccattcagtaacatttttggtagcagttatatgccctgtgctatgtgctggggatgcattgataaatcaggagtctttcccgccacatgggtccatacagtttagcagaaagagacgaacttgtcaataaacgccactgcctggtgccgtgggtccacagatgacagcatgcacagtgtgtcccgcaacagggagggcagggcctgagatgagggggtttcagagaggctaattcttgtgccttcccactacttctaggacaaaatagtgaggaagggccaccaccgtgtgctttgacatgctgaggatggaaaggggttatctccttctttcagcaaaaatcacttttcaggctgggtgtggtggctcatgcctgtaattctagtactctgggaggccaaggtgggggggattagttgaggtcaggagttcgagactagcctggccaacatggtgaatccctgtctctactaaaaatacaaacaaaattagccggcatggtggcgcacacctgtagtcccagctacttgggaggctgaggcaggagactcgtttgaacccgggaagtggaagttgcagtgagccgagatcacaccactgcactccaacctgggtacagagtgatactccatctcaaaaaaagaaaaaaaaaaagaagaataaatttttatgtaatcaacagtttattttagatttaccctttagtagacatggaccatctaagtgtacattatttttttagtactctagaaaatgatttttcaaatggcttattatcatcatcatcatcatcatgaccatgatagggcaagccatttcttaattaccagacgttagccacttgtttaaagagagtgaccttcttcatttgtggtgaggagtggtctgggatgctgaccatcagtggccccgggcaggctgggtgaggcggggtcaggcgggctgggagcatgttgtgctctggccactgacttgtgtaaatgaggaggtcgggtgagccccctcccattgaaggtcctcagaagctggtgggcctgggaggtggggggcatggaagctgggatgagggaaggacaagacctgagtttctggggtcctgagaggtgaagcagtagggtgaaaagagtgtaggttttggagacagactggagttcgaatctcagttttcttgcttctcaggaccataggacaggcaggcgggccagcctgtcaggtgggttctccttttttgtagaacgggcataacatttgtgctgctgacatagactgtggccattcactgcattgtgcagaggctcagatgagtacatggtggtgcaggcattaggggagctgttagctcacctggtgggcactgtattaattaattaattaattaattttaaattttattattattatactttaagttttagggtacatgtgcacaatgtgcaggttagttacatatgtatacatgtgccatgctggtgcgctgcacccattaacttgtcatttagcattaggtatatctcctaatgctatccctcccccgtctccccaccccacaatagtccccagagtgtgatgttccccttcctgtgtccatgtgttctcattgttcaattcccacctatgagtgagaatatgcagtgtttggttttttgtttttgcgatagtttactgagaatgatgatttccaatttcatccatgtccctacaaaggacatgaactcatccttttttatggctgcatagtattccatggtgtatatgtgccacatggccttaatccagtctatcattgttggacatttgggttggttccaagtctttgctattgtgaatagtgctgcaataaacatacgtgtgcatgtgtctttatagcagcatgatttatagtcctttgggtatatacccagtaatgggatggctgggtcaaatggtatttctggttctagatccctgaggaatcgccacactgacttccacaatggttgaactagtttacagtcccaccaaaagtgtaaaagtgttcctatttctccacatcctctccagcacctgttgtttcctgactttttaatgatcgccattctaactggtgtgagatggtatctcattgtggttttgatttgcatttctctgatggccagtgatggtgagcattttttcatgtgttttttggctgcataaatgtcttcttttcagaagtgtctgttgattcctttgcccactttttgatggggttgtttgtttttttcttgtaaatttgtttgagttcattgtagattctggatattagccctttgtcagatgagtaggttgcgaaaattttctcccattttgtaggttgcctgttcactctgatggtagtttcttttgctgtgcagaagctctttagtttaattagatcccatttgtcaattttgtcttttgttgccattgcttttggtgttttagacatgaagtccttgcccatgcctatgtcctgaatggtattgcctaggttttcttctagggtttttatggttttaggtctaacgtttaagtctttaatccatcttgaattaatttttgtataaggtgtaaggaagggatccagtttcagctttctacatatggctagccagttttcccagcaccatttattaaatagggaatttatgcaatgtcaacatgccagctctgggtcagatgtcataggtgtggtggagtcagtcctcatctctgtgcaggttgcagagtgtgtgggaaaagctgtatcttgagaacatgcttatgaaagctctgaaagttgaataattctggtcaacagacgttcttatctgctagagaagaagccctccactgccctgttagccacccgtgtctgctcggggtgcctctgagttcagaggcctgaatccagcagctcctctcgcttgctgtgtggttcctgggccaatttattaccctgtttggaccttgagtgtttgccttgcagtgacgggggttatcatacctatctcaggaggtccttatgcagagtaatgagataacctgtgtggaagtgcctcacacctaacacatgcctgccacctgttgattgattctgaaattccttctggtttgcctaagagaggattgtaaagggaggagggggtgatggaaattgggacagatgctgaattagctttctgttgctttgtaacaaatgaccacagactcagtggcttcaaacaacacaaatctgcttcctcatgatttgtgtgggcttcagctgggtcctctgctcagggattcacaggactgaaatccaagtggcatctggggctgtgtcctcatctggaggctcaactaagggaagggcctgctctcacgactcctcaggccgttcttcattcatttcctgtgatccccgttctcttgccagctgtctgccggtgctgctttcagctcccagaggctgctcttaggcccttgccatgtggtcccctccacaggccctctaggcaaggatatggtctcctgtgcggtctcacctgattagaacaagcccattcaggacaaccttccttttgattaactcagagtcaacggattggggtcctcaatcacatctgcaaaaactttccacctttgttttacaatatagcctaatcatcatattcacactgaaggtggggattacatagtgcatgcacaccaggttgtgcacaccaaggctgggggttttggaggtcgtcagaattctgcccctgcacaggtactgaactgcagttgacctgggagtgggtggggaggagaagactcccctctcacaatcttaggggaatagggcaaatcacactccgtgttactcacaagtgaccccagtgccgtcttcctgtgttgccagcttctgggccccgtgaagcgcagtgtgccttatggctctgtaccaagaacagtgccatctggactgatgccagcatgaatgcagcccgccgaaggcagtgacaagcgccattcatgtggcatcaaagtgccagtgacagctaccttgctttgtttcagagaaagctggtggaaaaagcagctttgaatcacccatctcaagaagatcatagagcctgctgcctcactgagaatgtaaattgccagaggaataattggaaaccatgtagaaagtgaaaaaataccaactaatacatggattcatttatgtgtgtgtattttctagatttccagtgggttcaaggagatgtgtgtgaagttcagctgatggtatataacccaatgccgtttgaacttcgagttgaaaacatggtatgtatcaccaatcatttgacctttttgggctaacatacaaacttctcattaaagtaggttttacttaatgtctgaggcacacatcttacgatatgtgtctgtttttatgtttgttttgccaaagcatataagcttattgtaaatgaagaccatgttttgttattcctgtgtctttaggcttggttttcaataaatatttgaacctacaaagaaacctctgatttgaacacatgccgagcttagttgattgggtataagatgtgaaataataatttcgaagcttacgtgagatgtgttgaggttgcaaagtccccattctgcctgctactcaacggtatcagcattattttattgctgcaagatgataagatgaccaaggccccagggaagaacaagctgtggaatgggaggataaatgaccacaccaccaccacgagctttctcttgttttgaaatcctgatgtcccatttctgtgctttgtgtagggtgtgaaaaattcagtttgtaatctcttctgttggaaatgcttacccaattctctagtcagggggaaggagattagtactggcgctctaagctgattctgtgttttcagagcgggccctcccatgccgatgtaggtcccatccctcaagtcttctctgcattgctgtgtggtgctgctgtgtaacttttcagcagcacgcaaaggagggtgctgcgagaatggatgttgtcttttagagttttatgactggtgttcagggtaagaggcgggcctttcatgcatgtatctcgctgagtgctcttgccacgtgtcggtccccaggcaaggccctgaggggacagagatggtcaggccctggtccctgctgcgactgtgaccaaggctctgttggggtgcatgaggtgttgcaggcctgttgtggacgggagtctgcctggccctggagagtcagggaagggttcctgggacagatgtgacagcctggctgtgagtacaggctgagttgcagtttgccaggtggacacgtggtggctgttgaaatgctgtttaggcctctagcacgtggcatagtttcccgaaatctgtctgagctcctggaagctcagctggatgttcagcttgtagtctcgaggtgcgctcgggaggagcgcctctcctcctgttgggcgaggactgacctgcagtaggatttggctctggcctttcctgtggctttctgtctcagccttagtagggagaagcagtttagagaattttccccaaagtggttaaagtatcaaatgcctgctgctctttcttacacattttttttttggtcttaaaatgtagctttcatttttatctggtttaaaaacaatatgtgcttattataacaaatgaggaagagcagggaacaaaataaaaagcaccacatggagatagcccacaaatcatgggcaaagttttaaaaactaaattaggaagtattttaaacctatgaaatgttacagggaatagtacacactcgcatctccaccattcacatttaaaaaatgttcacagttggccatattgctttagctattttcaaaagaaataaatgccaatatatttgcctagagacaattggctcctcggcttccacccttgcctgctgcatctgttccacacatagatcatttcacaccttggctccaagtccgggcactaagtgtactcactgccgagagagtggctttgcttctgggtgcttcctgtagacagagttgggaaaagtctgtgtgcatatacacatacatgagaacacacacacacacacacacacacacacactatatatatatctaaacccatatgcctacatatatgtacacatgtgtatacccctgcgtctgcaccatagacatgcatgtagcatctgccctgttcacggggaccctcgctttccagcacttctccagagggtgcttgccttcctccatctgtgtgtgtcctttcttcccgcgtgagaactcgggctcccaacatcagcacatctacttagatgctcagtcctgtcatatctgagatagttgcggggtagctttgaccatactgctgcagaaaaccaacccactaaaaagaatccaggatttcccccttcgcccagggcttctttatctcagcagtgttctgtaactgttatgaaaccttgcctgtcatttgttaggtttattctaatgtagttgacggttttgatcgcttgttaatgatattttacccaattgcttattgctaaactatagaaataacgccttttttttctgactctgtcactttgctaaatgtactcgaaagttcaagtttcattgtagattccatagcgttttctgaccctggttttgttttctgtgagtaattgcctgtatgacttttcttcctttttcttgctttagtgccctgagtaggacctctgttacaatgctgagaagtcctgagggctgacatacctgtactgcttccaatcatgggccaccgtcttgaggccagggaatctgcctgttttgttcactagcaagcttagtgcctgtactagtaagcttagtacataccgaaataagttgataactcacagatgtgtggcagggatattaactggtggtatagttccacactttattgattgattgattgagatagggtctcactctgtcccccacgctggagtgcagtggtgtgatcattgcagcctcagcctcctgggctcgggtgatcatcccacctcagtctcccaagtagttgggaccacaggtgcgtgccaccttccctggctaattaaaaattttttttgtagagatggggtcttactgtgttgcccaggttggtcttggtctcctggggctcaagtgttctttccaccttggcctcccaaagtgttgggattacaggtgtgagccaccatgcccagccatgtttttatttatttttgtttataaataaaatattttctctttgtgttcacattcccatttggtaaaatgataaatatcagacagcaaacagggctgaaatcaagtggatccgtggtttatcgcctgagcacctgcagtgcttaccatgtttaggtggttttgtgttacactgtacactgtctccgaagttctctgtgaagactgttggtgattttattccagcagttccgatgtgccatagccaatgtcttaaggctcatttggaactgagcacacacagtaggtttgctccgggcttacgatgctgcgtcgcttggtttaggggctgctcaccagcggagtggagttcgagtctctccctgcggcgctttctcttccggctgaatctggtctgtacccagtgacgctcgtcggggtcccgcagacgactggaacgattactgtgaacggtaaggagagtcccttcatgcttcctgctcaggagggtctgctgaacccttgcatggcctccatgaggtccagagccgatcgcccgtcatgccggtcctaaccagttagaagataatgaagaccttgtctctttgggaagcatgaaaaaaacctgttcgtggggtgcgggatgtgtggtggtgggaggggtccttcctgtgctctgaccccactgcccatgcccctcctccctctgcttcgtctcctttctgctgtcttcctccagtgagccttccttcctcctgctccttcttgctggaactcctcagagggtgtctacacacgctgaatctcccctttgcagagggcctttaaccctctacatcctggactcagcccttttcacttccccaaaactcctgtcacaagcagtattttttgggctaaatacagggcctacttttcagttttgtttctaaattcgctcctcagtgccctttgagtccctggctgaccctccactaggcatgccctctcctctggctgctgcgagcctaccctctggatactttaccgcctctctgctctagctgctgtgaccctgcctctctggatgttttactgcctctctggcccttctgtttgggtctcttttgtcttctgcagcccactcctcagtcaggccttcctcacaccccacttctttccttccccatctctcgccctgtgttccctggccctgttaactcttcctcttccacaggctaccttaggtgatcccaccgatgccctggccttgctgtcttccagttcctccaatgtgcagatgatttccagggctggacttcttcccagcctgcacctccagcccttcccagctggcccctgggcgcctcgcatataatacatgcaaatcagaactccctacctcgcctccccaaaactgcccctgcccccgtcaagcctccatctcagtgcgggcattcccatcagccatttgccctaacgggttcttgggggtcatcctgaccctcgctgtctgtcacagcacccccacctccctccctcagtgcttcctgagaactgctgcttctctccacctccactgccccttccggtcttgcagatcataactcttctagggtttgtcacaaaagcactgggactggtgtttttgccctggtcttgcttgctaacagacccacctcccatctgtggcccggcgatcttcctagtgtgaatatgcccctgacatctctcaactgggagcctcacagctgtcgccaggcccttgttatcaaggcccagtccttaagtgttgctctggagcccagtgtggtctggctcctgctggcctccgcaacctcctctctgcctctcccctcctacttcagtctccgaagactctttagttctggcagctttccaggctttccgaggctttgcctgtgtcccatcgagtgcttatcaccctggccggctcctgggcttccctcagtcctcagcacaggctttccttcctccgggagccttcctcggcatgggctcgctggcctaggcccctgtgcggtggcctccttcctgactctgtgcaatagattccttgctggcctcgtgtgtctcgctcagctgcagctccgtgcctattgtggagcctggcacacagtaggtcttcagtgtgtgtttgttgcctggaagagcaaacatttgctggaagggtgctccctacgggtgagtgaggcaggtgtaatcgtaggtgagggtgtgctgccccaagtgggaatacggagtggagtggccgtgggagcgaatgactctgggcatggacccagcggggagagtgagtgggtcagtgaccctgaggcttgaaggctaactaggaactattcaaatgaatgggggtgggctgtggggggagtccacagggggcagaaagagggttccaggcagaaagaacaacgtggtggtaagagagaacatggtacatttgggggacctgggggtggtcagagtgggtggtccaggccagggtggcagagatgagacaggctggaagggaggcagagggccgacctgggttcttacacacggtgccaaaggatgctggctttctctggagggcattggggctgctgcgttatttgaagagagatgtggtcaggtgggcagttcagagccatccctcaggatccaggatccctgttgagatgggaaggactggaggcagggacagcagtgatcaagcttcagcgatgacccagggagaaagggacagaggtaggcccatagccgtggcctggcagtggagcataggagataggaatggatgagagaggagtaacgaggagtgaagggcttgattcagaatagcacataaccgtaactagtatgttcacagttgaggagtcagagccttagtcacgcagttcttggttgtttatcctgggtccagactagtgagtgttcatttttagcccgctttgggaacaaggtcaaaaggactgaccttgtattatcagacattgtaatgtgctatttgtcctcagacttttgggtttatatggcagttattttaagcaacaggtaagaaaaggaaaatgactgacttaaattaagaattgcaaaataatggctgcttagcagacaaaaccatgtcataccaggttttatagaaaggacattagtgcaagatgtggttttgggaaggagaatgtttgccagtttaagacgtctttgaagaggtatactttagaggaagcgtggctgctctgaatgggagttgtgttgatagggcagctttaagctggcaggaggtgagcacggggctgactgaggctgtgtaaggtccctgatttgcccacgagggagtgcctgcctctccttttagtatggaatagtttcatatgaatgcagaaaagttgtcaccctaggcatctagccatggggtattgtttaattttgttacagagtgaatgttgtttataataattatctcgtgaaatttcaaaagccattttaaagctttgcttaaacaatttcaagtgattatctaaccagtggactttttttttaacatgggaaatttgctaatcttaaattatggtgcttatacacacacagcacatctgccatatcagcagcagctacaataacaattggctcgtgtgtgaactttcatctctcaacagaaagctttgaagcatttttcacatactcattaagtcacattatgtcctgggaaagaatattaacattctcgttttagagatggataaatctgaaaagcaaatgagtaaagggatgagatactgattattaagtagatatttatagtttacaaggaccttcacatatatagtctttcatttgggcccagccagccttgtgaaacaggaatgcagatgctgttatcctccccatcacgtacgaggacagtgagggtcgtggggttgagggcgggagtgtgggtgagcgcccgcgggnnnnnnnnnnnnnnnnnnnnnnnnnnnnnnnnnnnnnnnnnnnnnnnnnnnnnnnnnnnnnnnnnnnnnnnnnnnnnnnnnnnnnnnnnnnnnnnnnnnnnnnnnnnnnnnnnnnnnnnnnnnnnnnnnnnnnnnnnnnnnnnnnnnnnnnnnnnnnnnnnnnnnnnnnnnnnnnnnnnnnnnnnnnnnnnnnnnnnnnnnnnnnnnnnnnnnnnnnnnnnnnnnnnnnnnnnnnnnnnnnnnnnnnnnnnnnnnnnnnnnnnnnnnnnnnnnnnnnnnnnnnnnnnnnnnnnnnnnnnnnnnnnnnnnnnnnnnnnnnnnnnnnnnnnnnnnnnnnnnnnnnnnnnnnnnnnnnnnnnnnnnnnnnnnnnnnnnnnnnnnnnnnnnnnnnnnnnnnnnnnnnnnnnnnnnnnnnnnnnnnnnnnnnnnnnnnnnnnnnnnnnnnnnnnnnnnnnnnnnnnnnnnnnnnnnnnnnnnnnnnnnnnnnnnnnnnnnnnnnnnnnnnnnnnnnnnnnnnnnnnnnnnnnnnnnnnnnnnnnnnnnnnnnnnnnnnnnnnnnnnnnnnnnnnnnnnnnnnnnnnnnnnnnnnnnnnnnnnnnnnnnnnnnnnnnnnnnnnnnnnnnnnnnnnnnnnnnnnnnnnnnnnnnnnnnnnnnnnnnnnnnnnnnnnnnnnnnnnnnnnnnnnnnnnnnnnnnnnnnnnnnnnnnnnnnnnnnnnnnnnnnnnnnnnnnnnnnnnnnnnnnnnnnnnnnnnnnnnnnnnnnnnnnnnnnnnnnnnnnnnnnnnnnnnnnnnnnnnnnnnnnnnnnnnnnnnnnnnnnnnnnnnnnnnnnnnnnnnnnnnnnnnnnnnnnnnnnnnnnnnnnnnnnnnnnnnnnnnnnnnnnnnnnnnnnnnnnnnnnnnnnnnnnnnnnnnnnnnnnnnnnnnnnnnnnnnnnnacctccacctcccaggttcaagcgatcctcccacctcagcctcctaagtagctgggactacaggtttgtaccactacgcctggccaatttttgtattttttgtagagatggggtttcaccatgttgcccaggctggtcttgaactcctgggttcaaacaatccacccatcttggcctcccaaagtgctgggattacaggtgtgagccaccgtgctcagccaactcttatcttctaagaaatagttttgatcttgtttatttgttttttagcgttacaggaaaacataaaaaagaaagaaaaagaaatctcaggagtcccagaagcaattactgtaaatgatttgttgtgatatttccttccagtgttttatccatcctatttaaaaatatgtatttgaatagttgagattacatgacatcatatatagtattatagattactttttgcataaccacgtaacgtaagcttttcttcatgcctttacaaattcttgagaaaattcaattttaattgcttcaacaaagcgcatcataaagatatctcaaaattgcatacccattaatttccttgctattggaatttgggatggtctcaattttttttttttttgacggagtcttgctctgttgcccaggctggagtgccgtggcacaatcttttttttttttttttgaggtggagtctggctctgtcgcccaggctggagtgcagtggcacaatctcggctcactgcaaccttcacctcccgggttcaagcaattatcctgcctcagcctcctgagtagctgggattataggtacccgccaccacgcccagctaatttttgtgtttttagtagagatgggattttgccacattggccaggctggtctcaaactcctgacctcaagtgatctgcccaccttggcctcccaaagtgctgggattataggcacaagctaccacatccagcctgttcttaatttttgcacttacgaataacacttaatggatatccttttggccatttttataaaatgtgtcttgggattttctgaaatgtttttaaagcccattcatgtgttcaatagaccctttcatttgccagttgctgtgctgggtgatggggctgtagcactgatcatgacagtcctggtctctgtcctcacgggaagttctgtcaagtggagaaattgacaagtcgccgaataatcacagtgcactgtcgtcaggactgtgatgcgggaggtcccatgtgctgggggaggtcacagactcagggaagagttcttccaggaggcgacaacaggctcgatgggagggaggaggaattggctgggtgcaagagcaggcagggcggtcttcaacagaggaaggagaggtggagacactgacgtataaccggggaataaaatgaaacacagacaacatttactcaaaagggatcgtagacctgagtttaaaagctgaaaatatataacttttagaagaaaataaaagaaaattatcatgaccttgaattgggcagagttctttgatgtgacaccaaaagcaggatccctggaataaaacgttgacagattggacttcatcaaaattaaaagcttttacgcttccaaagacaccattaaaagaatgaaagttacagactggaagaaaatatttgcatattaaatatctgataaagagcttatattcacattaagaactcttaaaacttaataaaaataaggcaaacaacctaatttaaaaaatggacaagagatttgagtacctatttcaccacaagatatacaaatagctcataagcaacctggaaggatggtcgacatcattagtctctgaactggcaccatgtgaggctccagttcacacccgctcacagggctcaccatagcagggctgcaaggtttcggagaagctggacgcctcgtgcgaggccgatggggatgctgatgggacatcccttttgaaaatacattggcagtttcttcagaagttacacataagtttaccatatgacccaacaactccactcctaggtacctgctcaagacaatggaacacatatgttgacacagaaacctgtgtgcgagtgttcatagcagcatcgttcacagtcagaaaactggaaagggcccagatggccatcagctggtgaatgggtcagcagaatgtggtgtgtccctgcagtggaacaccactccgcaatgaagggacgaagggacacgtgccccagtgcagaccagcctcagaggcgagctgctgagtgcaagaagccagatgtaagaggcgcagagcgtgagtcctctgatgtgaaacatccagaaagcaggtctctagtggcaggacacagctcagcggctgcctgagactgccagtggtgtggggactaaactgattggaagtgctcctgcgtcatctctttggggtgctgcaagtgttttaaaactgggtatcaggctgggcgtggtggctcatgcctgtaatcctagcattttgggaggcagaggcgggcggatcaccttaggtcaggagttggagaccagcctgaccaacatggtgaaaccctgtctctactaaaaaaaaaatacaaaaattagctgggcatggtggcaggagcctgtaatcccagctacttgggaggctgaggcaggagaatcgcttgaacctgggaggcggaggttgcagtgagccgagatcgcgacattacactccagcctgggggacaaagagtgagactttgtctcaaaataaaaacaaaacaaaacaaaacaaaaaaacaataggtatcagtgatttgtaaatttaccaaaaatgattgcattgcatacttaagctaggtggattttatacctgcacatgctgtttagaaagatgaattttggcaaggcttcagtgttggatggacacatgatttccgccgagcctgccaccaggacttcccgggcctggacgcttccaagcacattagcttgaacagccagacgctcagactcccagctctggctttggctgctgaaattctgccactgctgtccgtagaactgtggcacccagtgggcgctaggctaggaaggacactagcttcagctacagtgtcacggcacgcgctcacaggcctgtgcagggcaccagccgcccaacgaaagctggaggtgggcactgagagagctcataaaggagatcgtggctccatctccagcttagcaagctccggccagcgctccagcaaaagggcggggggtggcttaaggcgaagaaacgctaagggcagatcaccaaaaaggaaaaataacttgagaagaggtactttaactttgtcatttgtcctgctaataaggtgtccccgaaggtccctgccagctgtaaaaggcagtgaagaaagcaggtcctctagctgcttctctttgcccaccccacatttttctcctgtgtttagaatcatttccaaagataatgcctctgaccccccatttttattgtcctgcggatgcactgtgacgggggtgcgtgcatgctctggtacctgctacctctcaacaagatgtgctgctgtgggcggccaccacggcaccgagcctgggccctggggaggaatgtggatcccagcatggtcctgatgaggaccaggggctggaggaggagggtccagtggaaccgatttggagttaaaatgtttgctttttatttcttattttaaaaaattgtatataatgtatatatttttctaaggtgacttcctgaaataaaatgtgactattctttgagttttgattgttattaatctaatatgaacattccagtgactgattcattaaatttactcacaaacgtttatcgacacctaccatgtgctttaggctctgtgctgtaggactagcaattaataaaaaatgcaatgaataaaaaatgccctcgacctaggccgctgcccttgtatgagctctcagtctggaaggaggtactcagactaactagagtcaaatttgctaactggccctgtaatataaaaacaaagtagaggttgaccctgtctttggggttcgggaaggcttcacagaagatgtggtattaaactgggccttacaagatccacaacaattggtcagataatcaagcatggaagaaaatgcaaagaagagggaacaacaagtcaaccaacccaataaatacagaccatggcgcaggagaattcagcgctgtgatgaaaacacagtgggtcagatgagatgagatgtccagaagaggcaggccttcagagacagaaggcaggtcactttgcgaagcagtgtcagatggccaggcttgctttgcagggaacttctcaggaaaggcctctgccgaggagacgcgcagaggagcagagctggtaggcagccagtgggatgtggcagagagcattccaggatgggagtcgcgggtgcccagatggagcctggcgggagtggtgccttgagcactgacagtgatgagggcagaggtcaggagcaggcggcctgatggcatctcctgtggaattgcgttgtccggccctctccatggccaggcagccatacagagatgcactgcacagggtgaggctcagcaggaggcagctgtgaagtgtgcagcaggccactctgtcccaggcccatcttgactactgctagcgtgcttttctgtgtcgcacagtggttcaagtttgagatgcttattaatttgttcaatacatacttagtgagtacctgctatgtgccagttgcctggctgggtaggagctgataatgcaagataaaaatattgtcacggccgggtgcggtggctcactcctgtaatcctagcactttgggaggccaaggcaggtggatcacctgaggtcaggagttcgagaccggcctggccaacatggccaaatcccatctctactaaaaatacaaaaaaattagctgggcatggtggcatgagcctgtaatcccagctactcgggaggctgaggcaggagaatcgcttgaacccgggaggcagaggttgcagtgagtggagattgtgccactgtgctccagcctgagcgacagagcgagactatctcaaaaaaaaaaaaaatttgtccctgtcttgaaaaaacttttggtccagtgcaggggtggggagggcagagctacaggaagggcagctgagcccacagagtgctcgggggacacaggcgtgccaagcttcaggcaccagtgactcccgttgcacttcctgtgctgctgagacccaggggctccctcaacacagacctcatatgaggggccatctccttaaacaagagagtctcgtcgccatagaccttactcctacctcccacagtttgcccatagtcccacattggagtttctctctgccaagaagctcccggtcctcatctcctcctaggagactggacctgacccttgcccagcctctgcagcccctccctgggggcctgaccttggctggagtggggtccctgctgccatctctttagtgccatggcctgttcaggactcagctccttttcagtgccagcccgattcccacccaagctccactgctcatgacaactgggatgctgcagctgggaccgtcagggcctgtgttaggcccaggccctgtgactgccagttgaagcgttgttttgttttgtttcaaaatcctgttgtttgagacacaaaatagtgaatcttggcagtgttttatgtttttccgataccttctctgcaaatccacattgactataaacttttgcttgagaaaggctgcctgctgaaaggtgggaaaaagcccttgatggtaaggacacgagtccaattttccttccttgacagaggaagtttatttcttgactcatgaacgttaaagatatttaaattccaaggagctcaccttgatttattatgcaattgtttcaccaaaatttggtttggatgcagaagctcctctatcagagtctgtatctggaagcccccaggaaacacgtgcccggcaccatgagcttggcttgtgttaagcagcatttcttcccttgggtggcagaggtctgagtctggaacattcttttctgtcctttggaccaatagtgtgtgacaccaagtgcttcggcgtgggaagcagatccgactccgatcctgtgtgctgtgaccgggagcagggccaggaggagctgggcattggaaagactgctggagagtgtctggagtggggtggtccacagtccgcttagttgacttcatgagccatttctggatgcactaagcacacgatgttggctcaagtatgctggactaattgtggctctctgtggaaatccttcagggacaggaagaaggtagtggggtactcaggaaaccttcaggccccaggagaacatgttggcctccccgctctggccacctcctctgtctgcccctttgtcctgtggccaaacttctccagggagccgtgtgtgtgtttaacctcacctgtcacatgcctctatttgtcatctgctggcatttgtccccactgtgctaccagatatattttctctgtgatcaccagtgacctccttcccaacccactgtttgcagcctgtggattgggaaggatgcaaccaggacaattagttttgtggattcagttaaagtcaatagaagtcaggtgagggctcacaggctgagagcttgagtgcaggagcctcggggaggccctggcttctgtgttgcacgttcatctggcttggctgccttggcctgtcccgtagtccagggcctcacctgactggtgtgaggatggagccccacagatactgcctgaccccagggcctggcccagctgccctcatgtgacgccaggtgttggtgggcattccttacagtttgtacctgtaagaaggggtctgtgggacagcttctgtttcctctttggcctcagctctatgttagcagctggaatggttggtatacattttcctcttaaatctatggagtttcccaaggtacttctaagcatgacattttttagattttgagagaacagcggcctcatggtttatttgaatgaattcatcatgtaatttttataccccataacttagtaattaagtatttttatgcttcacatatgcctgagaaatgaaggctgagtgagggtgttcatgtttatgacacacaaagacctggacgtgtctgcatgaggaaagcatgaggcatgtggcagctcactttccattcctgagagctggatactgaactccatatatgaagcccagatttcctagcccctgtttctgaaatgcatgagtatggtgattcttctttgggaagtgagtaattttcaaatggccttggcttcttccttctttcttctttaaatttcttcttcttattttagatctgcacattcattgcaaccttcttctggtgatgaaatatctactaatgtatctgtccagctttacaatggagaaagtcagcaactaatcattaaattggaaaatattggaatggaaccattggagaaactggaggtcacctcgaaagttctcaccactaaaggtaggtattgtaagcagctttgaccctgggaatgtttgtattgtttacttgtagaagagatactttaaattctcagttttcagagaatctaaaaacttctttgtggattcagttgaagtcagtagaagtcaggcgagggcttacaggctgagagcttgagtgcaggagccttggggaggcttggtgccatcatgacagtgggaaaccagttcttcatgaaagacacacagcagaagacagtgggaccgagcacacacctctgtacccccagtgccctttcccagacctcagcatccatcagctactcagcagaactatttcttcaatgaatgggagagaagcattagcaggcctggaaagagtctgtttgggatccaacccatcatgcatccagctcgtgtagtttggggtcaggggacctgtgctgaagtttggacttcaccatttactagctatttgtccttggggaactgttactcctgtgcctcgatttcctcttggataaatagggggggtagtatttagcacatacattacaagagtgaactagggaggtcgtgtttggcaggacacctggtgtgtcagaggctggcgagtgcattgatcaaaggggaatgtattgtataggaggagggaaaagtatcaagagtaatatgtggaaataaaaccgggtaatttaatacagttagagaaattgtaggctagtgagaccagacagagaatgaaaaagggaaagcaagttagcaggactttggggtgttttatgtgcttttgacgtatgggtgagatgaaccaggcatacaaggggagtttgactggttctggttaagtttccagtagatgatgtactaatcacatgttacttcctggcagagggctccctccccatgctaatgacattataatgcgacaaaccaagtttcttagaggtagagccacagaccctctggttagttccagcttgagggaaggtccagggctgagcttgggagaatttgcaggcaaagaattatgtcatgagagaatgagtttggagtgtgtaagaaagggttaatttgggcttgtaccgctctggagaatttcagggtatcttgtattcccatatttcttccactgattttgatagaaatctgtgtctgtaggaagtaaagcacgaagctttgcgtccgcattgtctaacccattctcccggtccgtgtctgccctggaaggagccttgccctggggagggacccaggcttgtcctctagtgatttgtgtgcatggtcacggggctggagccgtggggcagcccaccttgtgttcttgctcaggagggccgggtgtgcccagagcagggagtgggcatggagcaggaagtcacctgtagcttgtcggtgcacactcattttatattttcttgtcttgaatccttcccttttctgtgggttttttttttcctttttcctttcagtgctagtcacacaacatggaataacaagtgtattttttattgagtgaggccataagtggcaaattgttatatgctaaatagttattaaaaatgcaagtctgatgtgttcgtcttgctcccttgtccctgaggagtggttcttgcattcatcttaggcttcgcttcagccccaaggagatcacagggaggtggtcccatcccctggggagccggggcccagtacagaacctgctggcagttgttaatttggcatggtttctgcataaagatggcagaagagtagcatttttattctactctttctcttgaaatctcccccgaacaacaaagtatgaagaaacagtgaaaataaaaccattccctgtgaaacaaggaaatcatttcaaccccccgtaacaaagcatcggccacaggtgtcgtggaaactgggttagagggagggcgagagcggaagtgggactctgggaggactaaggaaaagctgttccccgagtaggcaacgcagcacccaaaagtaccccaacaatgaaagccaggcagaggggcctgggcagatgcctggagcagcaggaatgccgaggggttaccttttctgtgccaggcctttggccaagaaaggggaggcctggggtgggaggggaaggaggcattggagctcactgatcacacaacctgtgtgtgaaaggcttcactgcaagcctcacctgcattttcaataacaaaaacacgggcggcctgtctctaggataagggaactagtggcatagcagcccaagccgagctggatcacagctgtcggtggccaggtccctccttgtgtcactccggggccaggcaggagacaggccacaccagaacagaaagaatcgctatgaacaatggctgacaggtgcagagtgtttgagaggcaaagataatgtaaagcaacaggaagtgcgaggagggaggcagctcctgccctgggctggcacagcctgtgaagaggttggacgagtgtggcccagaagttgagaggaagtacccaggagcggcaactgagacctcagaggagtgtcccggctccggtgctggagtctcagctcggggcacccagacctctggggagggcactgtctggccctactgttctgtaaaataacactaagaatggtacctacatctcattgatttaactgagaattaaatgagataatatgtgtgaagcacttgagacagtgcttggcatgtaagcactcagatttgttctcacacaagttactacttgctgtggtttaggtgtgtgtcctctccacctctcatgttgaagtatcatccccagtgttggagggggggctggtggggggttttgggtcatgggggtggatccctgatgaatggctgggtgctcgtctcatgggaatgaatgagttttcactctgttagttctcattagtgctggttgttcgaaagagcctggtgcctcctcccctctcccctcactgtgtgactgcctgctcccgctttgccctcttctgccatgaatggaagcttcctcaggccctcaccagaagcagaggccagctccgtgcttgtacaggatgtggaactatgggcccaaataaaacctcttctccctgtaaattagccagcctcaggtattcctttatagcaatgcaaagtgaattaatacactgctacttttgccactactgccaccacaaccaccggcatcaccgctgccaccaccaccatcaccatcactaccactgccatcaccagcaccaccatcactaccatcaccaccatcaccattatcaccatcgccaccatcaccatcatcaccaccaccctcactaccactacaccacaaccaccactctctccactgtgaccaccaaaaccaccatcaccactataaccaccacaaccaccactgtcacagggnnnnnnnnnnnnnnnnnnnnccaccaccaccaccaccattactgccatcctcacaagcaccatcaccatcactgctgctaccactaccaccatcactaccaccaccaccactgccactattgctattgccacagacaccaccactttgtagagttgtcatgaggattgaagttttgtgcatcagatgtctagccacttctctgcctaaggctaccactgtttgacttctaatggcatagattcatttcacctgcctttacttggtgtttgcactcatgttattcattcttgagatgagagtggtgagagtgaggtatataatggtgtagcattcgggtttcaatttgcttttccctgatgattggtgaagttgagcacttttccaatgttctggccactcgtatatcctcttttgtatgaggactttgcccttttttcccccattggttgtcttctctctctctgtctctatctctgtttctccctccccttccccatctctcctgacttggaggacttctttatgtatacccttggtgtgagctctttgttggacgcgtggcgtgaccatcctctcccatactatgatttgtttgcctttacctcttagtggtggctttggatgaacagaaattcttaactttaatgtggttcatttaatcattttttcttttaaaaatgttgtttatttgtgtcttattttaaaaactttgtatagtctttgagaaatttaatgatactaccttaatttcatgctttcctacccaccctccttttgggaccaatttgggtgaggtagaaagtgcttctctggcataaaatccttcatctggtactctgaacttaattaattggttatagagtttggttgatacttgaacaagcaagctaatattgaataacagaaaattacagtctacgtggcaaacttttctcacatctcctgtaatttaacttgccctcccagcttagcaactggaaaacattttttccttacctcaaataaactctgtggtaatcgtgtgcccattattcattacaaaatccccctttctttctgaagcaaaagtcttcacctgcttctgtcttcagaaatccatgagtggctgctgtcgccctggcccccgcggccctgtgtggcccagcctctgccccatgcttggcttcatctatggccacctctcctcttcagctggagtcgcattgctgtcaggagctaattttggcttcctggatgctcctgccatctgccatagacacaccctttcctccccgggcacgccatgctgacttctcccacccctcctgcctcctcagctccggagcatttatcctctgggctctggcttggctgccctttctggaaagcctgcctaagcctgggctcctgggtctcctttgctgcctcaggctgctctgacttagtgccacaggaggtcttgccactgtgtatggtgatggcttctttattggtctctttctctaatcagggtatggtctctccaaggcagtgactgggttttctcttctatttccagggcctggcacatagcaggtgctcagtaccgagtaattggtgacggaaagacatttggtggcatggccctatcagccgcatttcgagaatgaggctgatgggagcatgcctttctctcctgttggctgagtggaggacgtagacaagcgtgtgggaaccactgtgcaattttgaatgtgcggcacggctctgccttagatgctcccctctccacgcctgctctgtgcaggtcactgcctctgctgctctaccttagacaccgcccccttcccggagaggccttcctctgcttcttggtcatctgaggtctcatctcaaggtccagcttctgtcccacctttctaggctaccttagcctttggtgtttctctttttttttttgagatggagtctcgctctgttgcccaggctggagtgcagtggcgtggtcttggcttgctgcaacctccgcctcccaggttcaagagattctcctgcctcagcctcctgagtaactgggattacaggtgcctgccaccatgcctggctaattttttgtatttttagtagagatgtactttcaccaagttggccaggctggtcttgaactcctgacctcaagtgatccatccaccttggccttccaaagtgctgggattacaggcacgagcgaccgtgcccgaccatccttggtgttccttatgtctctgacttcatctggaacttgttctgtatcaaccatcattccatcctcaaacttttattataagaatactgaaccatgcagaagagttgaaagaattttatagcaaacacttacatacaaaccatcctaggtactgtaatgaacattttgttatatttgccttattacatnnnnnnnnnnnnnnnnnnnntattacatatctatccagcctcctatccatcctttaatccatcttatttatttatttatttatttatttatttattttattttattttttgagacagagtcttgctctgtcacccaggctggagtgcagtggtgcgatcttggctcactgcaaactccgcctcccgggttcacgccattctcctgcctcagcctcccgagtagctgggactccaggcacctgccaccacgcccagctaattttttgtatttttagtagagacagggtttcaccgtgttagccaggatggtcttgatctcctgacctcgtgatctgcccgcctcagtctcccaaagtgctgggattacaggcatgagccactgcacctggccaaatccatcttatttttttttaatgcagtttaaagtaagttgcagttttcagtatattttacccctaaatgctgtagcacatgtaccattaactagagttcacttttttttggtaaaatacatgtacagtgacatgtgcaaatctcgtgtaccatttagtgaggtttagaaatacatggatctgtctaacgcaaacccttatcaggatatagaacgtttccgccaccccagaaaattcccacatgttccttcccagccaatccctgccccagccccggggcaagccacactttccatttacctggtcggcctagagagcacttccaagcgttgatgtagaaggtggggagcactgtggcagcgggacagaattccaagggagatgcttttggcggtggttcatgccgagaccgtcaacatggtcgtcttctctccccagccctcaagtgtagtcacccgtcatgccttgcctacacttcgtctgtctttgttattgtgtggttttctgtggttctctccagtcgggtccccagtcagtctgaggatgcgcagggcacatagggccaccctggctttatgcacagggaaagtgaaagcagaagaggtgggtggccagcctcaggtcacaggtcagctgcacgaggagccggcataaaaacaaaggcctcctccttcccagctcttgtgactttacctgtaatcatgataaacgtaaatagacggcatggtagagccattttcaaagcaacagggttacacgtgaaaaatgaaagctatcattcttttttaattcttgttccaagctgcggtacatttacatgtggaattacatnnnnnnnnnnnnnnnnnnnnnnnnnnnnnnnnnnnnnnnnnnnnnnnnnnnnnnnnnnnnnnnnnnnnnnnnnnnnnnnnnnnnnnnnnnnnnnnnnnnnnnnnnnnnnnnnnnnnnnnnnnnnnnnnnnnnnnnnnnnnnnnnnnnnnnnnnnnnnnnnnnnnnnnnnnnnnnnnnnnnnnnnnnnnnnnnnnnnnnnnnnnnnnnnnnnnnnnnnnnnnnnnnnnnnngagacagcataggacttggttgtggattgatttttatttttaagttatccttattctgagcccattgagcttagcttctttaactgtctctaaaatgtctgctgtataaaattttgccacacgagatgaaaaacccccttctttgggttcccatatgattctctttgtactttgatagagttattttatatctcagtactacgaatagcttttactcagctgggttggtgggtggctcacgcctgtaattccagcactttgggaggccgaggcaggtggatcacaaggccaggagttcaagaccagcctggccaatatggtgaaaccccatctctactaaaaaatacaaaaattggctgtgcttggtggtgggcacctgtaatcccagctacttgagaggctgaggcaggagaatcgcttgaacccaggaggcagaggttgctgtgagctgagatcgtgccattgcactgcagcctgggtgacagagtgagactccatctcaaacaacaacaacaacaacaacgaaaaaccccaaaagaatagcttttactcttagcgctctccacataccaggtgagtggtacttcatggagttttttctgatgaaataatcacaccaagtgtaagaggtctttttgggtgggcggtggtggtcgtctgtttatttcactgctgcatccttagcagctaagaactaagagcaatgcttgccgcatagtgagtgcttacgtagtattgacactcttacccgctgcatagggttgtggtgagcgtgaaatgttaacgcaggatggggaaagctcttgggacaacgtcgagcttgtttgctttacagatagcagttgttcttggtgtgtgcatcatttctgcagaccacgtttgcatgccggtgcctggtgcctgcaggagcctgcctgtggaccctacaaattgtccttccccttttccttttccttccatccctgacacctgggaggcaccaagagtcccatgaggggccccctctagtctctgcacacatcttcactccctcagaataaaccgctttttcttcagacatcaatcttcagataaagaagtttcttgctttgttttctcctctcatcttcgctttcctgacttattttaattcttactattacagactccctttaaaatcccctgcattttaagtttatggtaaagatccatgatattaagggtcagacagacctttgtgggtctctcaggggtctagactgtcgttggggcttttatggggtgagtgtgtccctgtgttcacaaattcctaacacagagatgagtgggtttttttttgttgttgttgagatggagtctcgctctgtcgcccaggctggagtgcagtggcgcgatctcggctcactgcaagctccgcctcccgggttcacaccattctcctgcctcagcctcccgagtagctgggactacaggcacccaccaccacgcccggctaatgtttttgtattttttagtagagatgggttttcaccatgttagccaggatggtctctgtctcctgacctcgtaatccacccgccttggcctcccaaagtgctgggattacaggcatgagccactgcacccggccacagagatgagtgtttataacccaccccatttctggacaaggagggtctagcgatgtcatgtaattcttctagtttgaattcacgtgtaagcaagttttttttttttttgtcttgttagacagagtctcactctgtcgcccaggctggagtgcagtggtacaacctcggctcactgcaacctccacctcccaggtttaagcgattctcctgccttagcgttccgagtagctgggactccaggtatgagccaccacacccggctaatttttttcttttgtatttttagtagaggcagagtttcaccatgttggccaggctggtcttgaactcctaagcccaaatactctgtccgcctcagcctcccaaagtcctgtattacaggcgtgacccaccatgcctggccacttgtaagcaagtttttatgtgtagattgtgaaagaggtgaactcttgcttttgcttagtcatagatttcattgtaataaagctgaaattaagaaacattgactatattagcttttccagaaatgttcacagatatgtgtatatgagtgtgatacaaatagaaacatatacatacctgtatacataaatgcacgttcacaccgcttaatttcttcattcttctgtttaatattttaacaaaaaatgatggctccgtattgttataattaaaaattcataaatgttttgaggcgagattctctttattgcttttctcatgaatgttgtaccacagcatccctggagttaggagctaatattaatggcttcttacatgtctcaagttcacagcggcagtaattcctctgttattatcaacgtaaagtaaccaatttcacctgatagcccttacctaaatgctagcatttaaataatgactattatttctgaaatgaaatttcacaggggaaagaaattggtgacagatgttccactgttaatcgatggctctcttgttattcctgcagcatattactgtgtaggattctgcagagccccttcagacacccagttctgtgccacaggaaggatggggaaaacaggcccacttttgaggtgcaaacacatattaaatcggacgaccaagctattcagctttccatagtgctgtggctatagaaaaatcatctctgcactgtgaatttcctctcttatttcttagctataaataccttggttggttggcatcagaggggaataagctgttcccatgtgtgtggatttgcttgttatttgaatacgtcactcttaagctacagaacttaatacacaaataagcagtgtggttagacatcttctgagcataccttatgcttggaaatagtagcattctgaaggtgggactttgaacattcttcagttactggcctgggcgcggcctggggtggcagcgtcgaatctcttgcactctgctgcttctgtgtatgtggaataggccggcctgttgccctcctggtttctgtgtggttttcctctccctttcgtgggtgttgctgttgctcgttgcctctgtcgcttcgggttgtccagcacagtctctgttcagctggcgtgatgacgagaacacgggttttggcgtctcgtattgtttagctttatgacttgtcttgagcaagttgactgagtgctggaggcttggtgttctcgtctggatacttaccaggatccagtccctctctcacgtggtcatcccagaacacacgctcctgtctctggaggacctaacacagtgcttagcacagggtgggtggggtaggagtagctgtttagttgcagtcccaagactgatggtttggcttccttggtctgccagggcctggaaaaccagaacatccaaattgttaaggctgacttgaaataagcaaaggcatgccccgcttgaggaagtcaggtgcctttgtctacatttcctgggtccatctctctctctcccctgccctccccctccgctctctctctctctcccttccccctccccctcctctctctctcttctttcccccgccccgttttttttctaggatgattcagaaactgtcttagctttccccttgttctcagactttctgggatggtgaaatgtaacaattccccgggtgaataaaggtatactttcattaaaaccatagcaaatccaaaccagaagccatttagtagagtcagcataaggcctgctcataacacatggaaggaagccgggaaagcaagagtgtaagaagcaccttgggaggccatggggagcacccgggaaaggcaagagtgcgagaagcaccttgggaggccacaggcagcgctgacggggaggagacgattggctcctgctgacaaagggaaacctgttactcgtgcaattctcaggacccgaggggttcggtaatgagctggctgaagtgccatatgagagctacccaccctgctgggctttctaactttctggtctggtctgtttccgaggtgcttttattaggctatttttacataattcttttcttaaaaataatcacggcaaggcagggcaaaattttagaaatcagtctcggagaaaagtggcttctacttcttggtattgtcatagagtggagtgtcttggggagcgggggaaaggattcagttcctctgatctctgcttcagttttcacatcaagtcccacttgcatatctcggcgtggacagaggtagagatggagctgaggacagctgcagcagccggctccgggtagccaggccagcagactagtcggaagcctctaggtcaggcctccctcaattttcaagttacttatgatggtcaacgttataatatttaggatcagatggacttttgttagagtcctggctttgccacctactggctgggtgacctggaccaagttacttgtgtctgtgaccattgtcccctcctagtggagctggcactccatggctcttctggttgttatactacatgcaaggcacttaatacagtacctggcattagttagagcttggtaaatcctagttcctcctgtaaggtactgttatctttgatgctgctgccattgtcaccttataaaaatgtcaactcatttgtcacctttctaaaacatgttgaaattattttcctatccctagtttcttagcccagcgttcagggaaatccatcccatggctggctgcccacctttttccttccctttctttcttgcacatttccccagtacccactgtgcttcaggtgttgtgccttggggagcaggaccacagtcatccctgtcctcccggagctctgagagtaatgggaggctcaatggtaaacaggtgcaaggtgtcccgtgatagcagtgggcagggcgggggcagcagagggatcgtcctctctgctcttttttggagtggttgctccctctggtgctcacctgtctgtcttcatggctgccagctgctcttgcctttgctggactcctcagcagcccgtactgagcacttcctacatggtggccatcgtatcgggcactggggacaccgggctgagtgctaccgagggctctgccctggggagtgcagaatgttctgccacagcccttgtgctgcagctgtctttgaacacacttttatgtatttggaactttgctcactcccagatgtcctctgtgcatccccaagtctgtccctcatttgcagttccgtccactgccacctcctgaaagctttcccgagcccttcaagtagaattaattatgccacttctaccgtccattgccttgcttatattctgttacaataacacttacctcacttggctttgtattattcaacaatcaaacatttacatcacattgacatgccagtcaccgtgcaggcacatgaataatgcatgaaccctgtcctgagagctcacggctcagtgtaggaggcagacatgtgcactgaattgaactgaattccgactgcacatcctgtattatttctactgcatgttgactaaccacagtgagtgaatttactggtgtgtctcctagaaagacattgaaattcctgaatgactaaaagtcattcaacttgctgcccccccccaccgtatacacaattgcagcggctttctggtacggttcagcattttacacatttctagggtcacgctgggagaagtttacaaaataagctgatcttaagacaaagtgaaatgccttttaatcagttctgtgagacctgtcatgttcaacgcctcgggagcatggatgggaaataaagaactcagggagggctgaggggatgaaggtgtctggcctgccacttgggagctcctgaaaatcaaactcccacttagttgtttggggtctttggtatgtcacgtctctgtaaaaaaaaatgaggaaaaaagtgcacttcttaaaatagaactacagcatgatttcacaggctttcaggattaagccagtgaacttactaaggggtaggttgtagagcagagtgttgaatcctggctatacccacttctgcatggcctgagtagcttccctaaaatgggtgtgatagcaggacctattcagagaatcagtgtgtggatttaatgagacaatagacgtacaggtcttagtacctgttttacgggagtactccatagagcttagatggctggtgatggtgatttaagtaacagtaactagtatgctaaatgtttgtctcctcccccttctcttccttccaggttgtgttgggcaggtggtatttctttagtttcatgtctccattacaagccactcctcctgatctgggtgtctgacgcatcctgcagccatgactatggggaagcctggtgggcgggcattcacagtccattttgacagggttcgtctctcagttgaagcacgtttaagaaaagaaaagccatcccaacaggcaagaatagtgctataattatagtttttgaatttagttgtacactcctgatacgctagactgagagctgaaagaatgagatattttatagaggtctgggaccctagcaggttcaccttttacttccagctactaggacagcaagtcttatttcagttatatgctaccctggcttgggcaattaattcagcaagcagttgttgaacctgttctatgtgtaatggtattataaactttacagaaattttcagatagagagaagcctgatctctcatctggtcccagctttcaggggcttctcctgtagccccgataccatttcttcctacaatcagagacaacctccccagagggcaggggctacatcttctttatctctgtccccagaacctagcatagcgcctgccatgaggatattttaaggctgtgcagtaagtgtccattgaatgaatgaaatgggcagcaatagaatgtaaaaaccaagtctcatcacagtgctgcagagcagacagaggactttcatgcacatgacctaggcgggttctgtgtgccaggtgccgcagaaagtccttatgctgtctcattctgtctccacatcacctctaacatggtctccatgtactgacagggcgtcttgggatgacagaggacatgtgactgcccatgttcaaagagctggtaagatggcagtattaggacccagattcacgtgtgtctgaccctagagctcatgtgcttggccattatattttcttttctgccatatcttttcaaagtactctctcccttcaccttcatgagcctctccttgtgtgtgctttccgcctggtgatgatgctggttgggttcatgggttcagataaggggtgagaggcagattggtctttgccagtgctggatctgactcttggttctgttacttattagctgttgggctttgggtaagttgcttaaactctctgacttttagttgcctctttaatacacatgtggacaatgtagctgtaatgtgaagtcagaagataggacttaatagatggttgtttcagttattgtcttgtgttctccttcctccttcctccagagtggcccttccatgctatgttagcacaggtagtagaaaggagaggtagaacttacctaattagtttgcactagtggttttcattagcctgggcaaattttttctaggcatttgatcaccttccaatttgcatggctgcgacagagttcatccaccacctcagagaactttattcagctggcagagttgagtctggggacttcaacagtgataaacatgccccatttgattgttgtccttctcaccagttcacatgattccctggccctcttgtaggacaccatagaaagcatcaccattggctcagaacccacttcactctcgagccacgggccttagcaagatcagtcttgcacgtggatttgcaggccagatccgtggggcttctctctatactaaattggagggtggtggtagggtggtgagcttcgactcgagtgaaatgttagcatggttttatatccgtgcatgtgtgtgtataggtgtgagcgtgtatatgtttgtttataaaagcgtaatgtatacttatcgtcaaaaattcaaaaaaatataaaacaatttgaaactacccatgatctcatgactcaaggacaaccaataagagcagataggcaggtcttcgttttctttttcgatgtcagtgttttcatgtagttggaattaatcgtatattcactgtggtattccgcttttttcacatagctcttttccgtctgttctaagcgtgatgtctgggcacacgtgtgtgttctgcctcatgcactgttgagtgcctgctggtggccaggccctgtgagccattgcatgggaaggggtgctgatggcagctaaccctaacgtgcactcactgaatgccagggacagggttagacactctcaggaatcacttcgtccacacagctctgataaagggttgtgaagattgtccggttaggagaaggaaactggggcttgaggagtgggaggaataactagcattggttgagtacttattctaagctgggcactattgtaagcatttgacttccgtcaacttgttgattctgcatgacgacccattttatagatgagtaaactaagatacacagaactttggtaacttatcgaaggatagccggccggagccaggatctgaacccagggccctttgtcctgaagctggggtttgtaactagcacacaccctgcctcccaaggtggtgaggttcaaaggcaaggtctggtccctgccttccgtttttgaccgtttggtggaagaatgagctgcttggtacctggatggtgttccactagaggcgtgtgtgttggagcccagagcagtgatgtgggatgggaaggcatcacaggaaaggagcctccaagttggcttgtgaaggacgcatagagtttctgtatttgggaaagtgagcggggcattcctggcagagggagtggtgtgtgcaggcgggtaactagggcacaggggtgaagagcggggaaggagagcagccgtgagaggggattcctgggtgcccatcccacgatgttgctgttatgtgccattgcagccggagatgagcctgagagccctctgctgcttcctccgcggggtgggctgagctgccacagggcaggacccaaaggggcggctggttcttggggcccgtgtttcagaaatggtctgacaggacacttgggaggggaggctcttacagggcctcagtatctcagctgtattggcggttcacggggaggttggccaggacccctgcagccctgggataggccatttaaagaagttggcacacacttccaatgttcttgaggccttgggccctggcccccagcaagcaggccccattggttttctgcactggtttcatgtggcctggcctctcttatcccattctatcctgaattgattgactggatcgaaaaagaaagacaaaatgccatttatgaatctactgggtgcatatttatataatgttaagttcctgggtcatcaggaggatcttggtgctgtaaatggtttggaagggaaagcgatagcttccattttggggtcaggtgctggcaaaacccctagagaatgtatctagcaggcggtttgaatttctggagtgcagtttaggtgagagatcaggaaaatttgtaaagtttaattgtgtttccagactaggttagtgccatgtgcttcaagaacaaaagaattatcagcaaacatctaaaatctttatgttctatagattattatagaggaagaagatggcaacagccgtgtgtgtgaggagttttgagtgaaatgtcaaatccattacttgtgccagggagcgtgtgaacgcggagaacaagtccagaattagtcgcacagggtcaccctccctcttttgaacctgcccaagccctcctgctccctcaggccgtgtctgaatggcggtctctccggggagtttctctggccctccagacttgtctgtcgtgtgctgtcgtgtacccaagacagactgacctggtcatgacatactttgttgtcttgtgtctagttttctgcctaatttctgcctcctctgtcagaccatgagccctgggagagcggtcactggcctgtttgcccactggtgtgtttttttgtgcttgctacagagcttgacacacaggagacactcaataaatatttatctgaagaatgactacttactttgccaaaggacagtgatgcagttctcctcacatgcacatcccagtgagagctacaaacagaaagatcagctcacacagttgggtgcagagtgctggagcctgtcctggaggcatgtgcaggtgtttgcaggcatggcgggagggcttccagcctaagaacaagggctgggatggttgcatatctgagtagataccctggacctgggtattaaaaagctctagaaaatccagccaggcagagaaggtaggggaagacatttccagtagtaggcacacgatggggcagagttctggacttaagaaagcattcggcatattcagggaccccccatgctaggagtctattggaggtgtcaccagatgtcaacttctgaaaggacgtgtgcttctttcctccctcccctgtgcgctcgcatggcacggggtcctttttcccactcctgggctcctgtctggggaggcttcttttcaaaccaaggtgggtctaaagtagtgtcgtcaggatggcacctccgagtgccattggaggagaagtagaaggaaggtggacaggttggctcagcgcagaagaggcccaggccagtgccagcactgctgcgtggagaagaggcagcaactgcgttctgagctgccagaggactgaggcacggtgaatgggtgtgagggccagggttcacctcttgactctgggacatcctagctttgtacccttaggaaagctgcttgatctctctgaactctagtttgctcattcatatgatgtggataatgctggcatatggagattttgggaggagctaagggtatgctgtaagctaactactctgcactatggcggagactcatgcctcctctggccttagcatatgaacttcagacagtgcctggcacagagggagagctcagacacctgaacacttactgggactgttctgtaatggaagtagcaggaagtagtagacatggaaggctacgagcccccatcattggtggtggtgttcttgccaaacctgaataattataagagcaaacacttaactgagactcactgggcaccgtgccctgtcctaagtactctatatgttttaaacccgctaaccctcacagcagccctagaaagtaggtacaggtatttctccctgctttacttgtaaaagaaggggaagctgagaccccagaaaagtaacacagccaatggcaagctaggaaggtggggatctggggtttgaacccaggcctgtagtttcagttgtgtttaaccacagcttctgcagctgcccacagatgtgtcggcacctacagaagagcacagtggaaaggaactccagcgtcttgtgggagggtagattctcagaatacacatagaatggcaaccaagcggaagcaggtgggcctgcccgggggtcctgcgtggaggaggtcacatcgagtaggcagagaactggcatggcttgagagagcaggtgggaaggaagaaagtcagttaccttccttactaatgagccaagatgtcgtcagaacccttctgaaggagtgggaagaaagctgcgacccaattgatgatgtgattttgtgtcagactctccttttccttctgctttctcacctgtaagatggctttgaagttcttttcccatttggagacagatctttgttctttctctgactgagtgacttaccgtctaaaggataaatcatatatgtgagtatccacacattcccctgagcagccaagggccaaatgttgtgtgttgaagcgggtttccagacagagaattcagtagcctgttgtcatcatgaaataccaaagcgaccagtgttttgtaccctttgcccccaaagcttgactgaagtgtttagatttttatcctgtaattagagtggctataattggatatgattcactttctttgactttaggtgattcttgttgacccattccatctcccactttgagttttggataatactttcctccaattctccatttccctttcactaaattcctataagaatctcatccaacagccacagcttcttctgttttggggacggagtctcgctttgttgcccaggctggagtgtagtggcgcgaccttgactcactgcaacctccacctccctgggtcaagtgactctcatgccttgggctcctgaatagccaggactacaggtgtgcgccaccatgcccagctaatttttgtatttttagtagagacagggtttcaccctgttgcccaggctggcctcgaacgcctggcctcaggtgatctgcccgccttggcctcccaaagtgctgggattacaggtgtgagtcactgcgcccggtccacagcttctcgaaatcatctgaatgtagggattcattcctcagactgtcgttaaagttgactttccaggaaccagcctgctcaacgattccatcatccttttcccagccatctgtcttttcccagatcattctaaaatactgtgatagtatcagtttgcaaagcatctgaacaccatccaaggtggtggactgggtgatgctgaagggcagctaatatttatcaaacatgtataatatgccaagtcttccactgacagctgaatgacctgttacatatgctaacctccttccatgatttcactggttgttgggaggattaagtgaggtaacacgtggagtgtctggcacatttgaggtgttctgtgaatgactaagtaaataaatgaatgtgatgtggtttctaaacacttttcaaggacgctgtcccctggatctgtctctctgtgttagtatccttctttaaggaaacatggagacataaacgccgtctgtcagacgtgctccagagggagcttggccagttctgcaggaccgtgccatggtcgagcacacctccggccaggaatatgtctgcttattttgcagctcagtttgtcctcgtgttctggagttagcacaccacgtatcttttttctttcatggggattttggtcaagctctccgtcttcccctgagctcctgtgaggttcacttctgggtcttccgaccaggactttacatttgaacttcaccatgaaatgtcttcatgcaggaagtgaatgtgactttggaatcatttggatctaggattctagactgattccatagttggtgaccatggataagttacttcatctctctaaaaccgtctccttattcagaccgaagacgttcagcataaaaaactggttcccagaaaggggatagtgggaaaacagcaagtcgctcctgcctcctaggctggaggggcaccaggaggaggacctttgcagagcctggaagctgggcccttcctgggaggaggagggccccgtgctcatggcttcctgtcccctgtgttggtcaggagggtttcttgttctaccatgtggggacagccagagacctagcatgtgcacagggcatgtgcacctgacagcagttcattggtcacagacactcacagctggggaaggaggataccatgccacgtagggccatgtgggctgcactcaggaacagagagagcagctgcccaggggctgggggaggcgggctttggggtatggagagggagggctgcccccggctccccagggaggatgtgactggcttatttcagtcccttccaggctggcagggaactgacacccactgcccaggatacacagggctgcacctgctttccgcacctggaaacctgcctggctgagggaccctgtatctgcaggagcagagtcaggaggggacttgtggtgaggccgtttggggccctcccagttttgccggatgtcaaggcagcatatcatactgtgcctgggttttaggaactggagccgtggagagacgcagctacttcagcgggcaccagcagtggcctccccatgtccccttcctgtcccccttcctcccgtgttgcctgaggttcttacagtgctgtggtcttcttggtgcttttacagatagtactttattgaatctgtaaaataaccctgtggtgcagtaattgttatccccattttacacacgaagaaaccttgactccaagggatcattattctccatggcactcgagttagtcagtgtcaaaaaggcaccaaagtcaaggccatgtgactctaacattcaagactttttattaaagaccatggtgtatttgccagaaagcaagggaaacacctctccccggaggcccttcccaaggtgccgtccttaattctttgatttgatgttttttttttcttttgagatggagtcttgctctgttgcccaggctggagtgcagtggcatgatcttggctcattgcaacctctgcctgccgggttcaagcgattctcctgcctcagcctcccgagtagctgggattacagaggcgcgctgccacactggctaaattttgtatttttttgtagagatggggtttcaccatgttgtccaggctggactggaactcctgatctcaagtgattcaccctgcctcagcctttcaaagtgctgggattataagtgtgagccacagcgtcctgcttgggttttgattttttattctctttttgtgaagaggtgtctcatattaaatatacactttccctactacacttggatctgtttctctttaaggtgatataatacagaaaatattcattgtggagaaatttagtttaactctgatttagtttataagagcaaaacggcatttatttggtcaatgagaaggagttgctcactaaggcgtcaagatggcttggcttgagctcggtgcctctagagatgagcagttcttcctcctccctgtgcctccttcataaacaggggtgattgccttgcaacacttcttggttctggaatgttcttgtcactttgatcttacacattttaaaagctcttctttttccttggcttttgagaatgcatcagaattttctaggggattggtaagtcccatactgcctcagttacagcatcctcatcactgtcattgttattattacagaaaaattgtatggcgacttcttgagctggaagctagaggaaacccttgcccagttccctttgcagcctgggaaggtggccacgttcacaatcaacatcaaagtgaagctggatttctcctgccaggagaatctcctgcaggatctcagtgatggtaagcgctttcctaattttaattagcacgtcagggtcctagatactgtgtagcaacccccatcccttgatgcctgctgtttgctgtttgtaactcacttgtcattcattaactcaagctgcctgagacatctcctgggcactttgttaacagagtgtgttactgtatgtgtctgaaagtaataaaagtactttttatctaaatgatttaattctcactctttattattttgtactcatttaccagcaggtcattctaaattagtggaatgtaggaattactgcgttttttcaagtataactgctgtgattctttagacatctaattagctgtgatgataaagttttccttcaaagtctgatgatatctataaggaggtggagtgtggaagaaatggaaatttatatttgttgtaacattaggactgattagagataagatttcatagattggctgggtgtgatggctcacacctataatctcagcactctgggaggccagggcgggcggatcacctgaggccaggactttcagaccagcctggacaacatggtgaaatcctgtctctattaacaatacaaaaattcgtcgggcatggtggcgcatgcctgtaatcccagctactcaggaggctgagggcaggagaatcgcttgaacctgggaggcggaggttgcagtgagtcgagatcacgccactgcactccagcctgggcaacacagtgagactccatctcaaaaaaaaaaaaaagatttcataaattaattatgccaaattatgaagcattcatttggaggcagtgtggagtctttcagtcaactcaggctcccctaacaaaataccacagacagaacagcttaaacaaccaagatttatttcctcatagctctggagactgggagtctgagatcagactgtcagccgtggtgattttctggtgagggagggccctcttcctggcttgcagatggccaccttcgtgctgcgtctccacgtggaggagagagggagctctggtgtccaccccttcttacaagggcactcatctcatagagggggctccatctccattgcttcatctaaccctaattacctcccaaaggccccacctcctaaagctgtcccactgggggataggccttcagtagatgcagctggggaagggggacgcagctcagtccctaacagacgccctccatagagtttgctgtctgcaccctctgcagttcaaatagtcagcatgagcttcttgtatagtgctggtatttggtaaaatattctttttatattattaacaaatgtagaaaaacagatttagggttggatacattagaaaatgaaaaaagttgagaggatttcaaattataccaagacttaaaaatgtctgatgacacggatttttttggttggtgtgtaaacggctttatcccgctgaactgcattttttctttttaatcagtagacagagggttacataggttctgacttcttcttcccaagaagggggtttggcagaataaatggtgcccagcacctgcccctggaacacttgggactggatattaccccagggctatgtcttggcacgtggactccaggctagcagtgagggaatggtgaccgtggtttctcccatggcctgccagggtcgtcttattcctgaggaacagtgtggaaggcttccatgtggaaggcttggctttttgtgcttggttgtttgaatttgcatgttcagtgcagacctattttgtcctgttatgactgtgcttctgccttttgttatagaggggactagggcagtctctctgcccttctaaggtcagagagaaaaattgagcaaaattgcaatttgggacttgtagcctgggaataccttcttctatcttttaaaacaaaaccaaatcaggcctcgaattatggtcaccaggtggtttgtaaatgtgaggctggcctgattgctggtcatggcacgtagtggttactcatgagatgccccctttattaataacagttaatagaagctctggctggttgtttacatagtatgtggcagaaagagacagcaaatctctaaggtaagttttaccttagaaaaaccaggaaaccaggtcaagttttatggaggaaaaggtaggcacgaagaaccacccagagcttggtccatggaggctgccttgttacgtgcagttcagtctgaggaagcacgagacaatcacggcgcccttatgtgaagtggctgtgaactcagtggcagaggctcatttgtggcctctgggaactgggagacgaccccctgtagctcacagtctaacattctcagagacatctaatgggggaccacgtgtggatccaatttgattctcaggcatggactcgcattaattatggttactgaagttaaatgacgcttaaaaaattcacagcaacctggatagctgttgcacaaaccgggatcctggattcagtgtcggccatagatagctggaagataattaatgtttactgagcattgtcacatgttgtgtataaagactgggctagccactttttttctggcattatttctatttaatctttgtaaaaactctataaagtaaatgttgtaattcccattttataaacgcaagtgggaagaatgttctagattaaaggagattgaagagctgtaacaatcaaatgccgtgcatgatccttaattgtatcctggatttaaaaaagaagactttgttttgggacaattgaagaaattgaatactataatattattgtatcaatgacaaatatatcgagtatgataatgaaattgaaattgtagcagaaaattcttgttcttaggaaataaatgcagaagcatttaagagtgaaagatcaggccaggcacggtggctcatgcctgtaatcccagcactttgggaggccgaggtgggcggatcacgaggtcaggagattgagaccatcctggctaacatggtgaaaccccgtctctactaaaaatacaaaaacaaaaattagccgggcgtggtggcgggtgcctgtagtcccagctacttgggaggctgaggtgggagaatggcgtgaacccgggaggcggagcttgcagtgagccgagatcgcgccactgccctccagcctgggtgacagagcgagactccatctcaaaaaaaaaaaaaaaaaaaaaaaagagtgaaagatgatttgcctgcacttactttaatagggtgaaggaaaaaaaatacagtgtgaatgtgaatctagagagaaataaagtaaaaatgtcaaattattaaaaagaagtgtctttaactatttacaataccaaatatgtggaatcgacctaagtggccatcagtagtgaattggataaagaaaatgtggtacatatacaccctggaagactatgcagccatagaacagaatgaaatcatggcctttgcagcaacatggatgcatctggaagccattatcctaaaccaatgaatgcaggaatagaaaagcaaatacagcatattctcacatataagtgggaggtatgcattgagtcctcacagacataaaggtggcagcaacagacacgggggctactcgagaaggcagggagtgaggggtcagggagggaaaaaccagttgttgggcagcacgctcactgtccggatgacagaatcactcatttcccaaacctcagcatcacacagtatactcatgtaacaaacctgaacacgtacccgctaaatctaaaataaaagttgaaattacaaaaaaaagttggctttagataaagagatatagatcttcatttcttgtaacttttctgtaggctcgatatttttcaaaatagtaacaagaaaaagattttgtagagcactgtttggatgtattattttgatttctaagtgaattttagaaattgtttctaaatgaaacatcagaaagcaaattatttaccttatcttcaaattcttggcagatatctatcttcttcatataactagcctagggtaagagaagtcaacttttcacccacaaaatagtatattcttttcctatgatccttataatacttgaaatctctgatttcttggaattttatgtttaaaattagaagtcctggaagatggtggcaaactgtcttaggttttgaatatatgaactattcagtcaaacagactgaacaactagaatagaaaaaccaaatacccataggcaaaaatatatagcaaaaccagttaccagagtatccccacggaccccaaaatataagtagatgtggacaaaccactaataacaacacggtttcaccgtctgcacaagaggaagccggaaacacacacacccaggaatccccacacagccagcaggtactcattgggcagctcagtgggccaagttgagaacagcagctgaaatgtggaggagtttgtatgttccagtagcagatgagtgcaaataattcctctagaacaaagcctcacctgtggagaagctgctgggaacagaggtgggatagcagaagcaaggaaagagaagatctggctgaaactaggggaggagaacagagttaagtggtctagaaagtaatttcttatattcttgagtaccacccccaaacacagaatacagtgtgtagatttactagaattagaagagctatcctgaatcatttctcctaaacattcatgaaaactagtttcatgtaaagatggtcaacagaaaaggatcatggccaaactctatgcagagtgattctagtgaaaacataagcagcgagataacatagaagaacgtgctcagaagctgataaaaattacaaaaacccataatgagctaaaagacatgaagaagaagtacaaaagaataacataaatctgaatgagaaaaactcagagatgagatggatataactcaggaaagaatttgtaatagaataaatttttttttccagcattgtagtttctagtgagttatatatacctgccagatacattaagggaagcagaagatgaaaagagagaagaaaaaagaatcgagagaaagatgattaaagagaaagtgacacacttagaagctaggcaaagaagatctaacgtacatgcatgcatgcatacatatatacatacatatatctgctatgagacaccagagaaggaaacggaaacaatggaaccacaacatgttaaaaactataattcacagaaaactttctgtaattaaaaaaaaaaacccttgaaactgttgcatgaatgggtacactgtatacatgagaatcttgacttagaatgagcgggacatattctagttatattactggacttaaagtcttttgggcttttagacccagatagcaagtgatttatgaaataaagaaaatcagattatcattggactttttgacagcagcagtattccagaagccaatagaatagcatgtatctagactatgtctagctactcatgtaatgaaaatttaagccagagatttgtaggcacagccacactaacttttaggtatacagggcttagacaaattgttgtcaacacgcaagactggaagaattaaattctcatgatttcttgaggattctactagggaagcacagccaaagtaactagagagacgttgtcataaggacttgtggtgaacattaaacatatcgttgcttgtatagctaagaccaaatgagcattcaaagggagaagatagtatgtcatggtaatctgctcttacagtatccatcacaataatttaaaacatggggggagcatgggaagtcatatgcaaaagtaattttttttttttgagacaaagtctggctctatcgcccgggctagagtgcagtggcacgatctcagctcactgccacctcctcttcccgggttcaagtgattctcctgcctcagcctcccaagtagctgggactacatgcgtatgccaccacacctgggtaatttttgtatttttaggagagacggggtttcaccacgttggccaggctggtctcaaactcctgacctcaggtgatccgcccgcctcggcctcccaaagtgctgggcgattacaagtgtgagccaccatgcccggccccaaaagtaatttttaaactgttctctgtaattgttttggtagagatagtgttagtactcatattctgaaactaggtatcagtgtagggtaaagtaaatgattaattctgtgataatctcattctatcatctgaatctagttttgaactagggttctcatatggaagacaggaagtaactgatgtcagatatgaagttaagtaaaaaccttgtagtttagaatttgaataaaaaatagcaagaaatcatgaactatttgaaaagctatcaatctcctagccttgtacagtgtccgagtctagaaacggaccagtccagcagcagtgagcattcctaatgcccacctcctggtcttgaaacacactttctcactcagagaaaaataaccagttctagatgtggagcaggaaacagagcaggaaggtgatcttggaccatcttgtcaaacttgcagcaaaggagtgattagagagcattgaggttgtgttgaagggctccgcctgaagaagtgaccactggcaatttgagcatcagtaaagatgcgaactgtgtttcagtccatgagttctcaatgctacttgagagaattgttcgcccttggaaaatgatggggaagtgatttatcattttgaaaatggtaagcaatgagtatttattctgccttttcatgtagactgcgcgattggacgatctaataccagttgatgaggggagtctctctttatagaagtatttgggctaacaatggagataaggaggatagaattcggatatcatcattttgccatccctaatagattaatgagtcgagacagtaagcatccacataacaaaataagagacaaccacacattatgttcctcctgctgggagaacacagcaccttctgtgaattagcagtgtcccagaatcacacctgaggctgatcagcgctctggctctaactgctaatttacaggacttcagaaggcagaaaaacttgttaaactacaccacggggacacagttggcagtccagactccaggaaaccctgcagtccatgaattggttctctcaacaagtaaattatcagggggaaaaaggcatgaagttctggagatagatgatggtgatgattgtacaacagtgtgaatgtgcttaatgctgctgaccccgtacatttaaaaatggttaaagtggtaaactttaaattatgtgtattttacagacacacacacacacacacacacacacaccacaaaacaaagagatgaaaaggctatctgtagtttaagagagagttaaatgacgcatttaaaaacaggcacagctaaactgtagtttcattgctgcatgcttacgtggtaaaatggcaaagagaagcaaggcagtgactagcacaaagtctgggtggtgggccctgtgggcgagggaggacgtcagcattgggatgggcaaatcgagggcttctagggggctggtaaaattctgcttctggacctgtgtcgtgttttctagggtgtttgcttcataataattcattaagtgatacctttatttttggtggttttgtcaatcagtgttgtatttcacaataaagtgttttttaaaagaagaggccaggcgcggtggctcgtgcctgtaatcccagcactttgggaggctgaggcgggtgaatcatggggtcaggagatcgagaccatcctggccaacatggtgaaaccccgtctctactaaaaatacaaaaattagcttggtgtggtggcgtgcaccttaatcccaggtactcgggaggctgaggcaggataatcgcttgaacccagaaagcagagattgcagtgagccgagattgcgccactgcactccagcctggtgtcagagcgaaactctgtctcaaaaaaaaaaaaaaaaaaaaaaaaaggaattggaaacaccttagtaataatacttctgcgtaacagacagctttgtcatctgatgagattgaaaaattattttatccaagaaggttttcatgaaggaattatccagaagatcgagccaggctgctgcacgtgccctctttgtctgagggacatgtttgagcacagggagctgtcgggaagattgataaattagtgttttgattttattgggattgatgtgtcacatgaaaactgcctttgggttgccgtttcttgacggtgggatgaaagcatcacctgctttggtttccttttcaattaattaattatttaatttggttttctttctctgtgtactttttggcttttggttttgtaagagaaatgtcaactttccctgctgacagtttctgttagacatgataattaactgtggcatttcagtttcagtatgggaaatagtgatccctagtatcacagaatgagacgagacggtagatgtcagctaatcaatttggttgacagaacaggaacctgagtcccaggaaggtggaatgatttgtctaaggcctcacacagcagcaccaggggccctgcctgctgcggagcttgtcctgctgttatccactccttccttccctttgggcagcggtccccaacctctttggcaccaaggaccagttttgtggaagacagtttttctgcggaccatggtggcaaggggatggttttgggttgaaactcttccacctcagatcatcaggcattagattctcataaggagcgtgcaacctagatccttggtgtgcacaggtcacaatagagtttgcactcctgtgagaacctgaggccgctgctgagctgacgggaggcagagctcaggctgcaaagctcgctaggctgccacccacctcctgctgtgcggctcagttcctaacaggccaccaggggttgcgggcccccgccttagggaacaaacagaacagtatttctaggtccatctttgtggtacctataaacttctggtttgctgggaagtgaatgtcacaattctggtggacaaatggagacttgcttttttcaaaaatggggatatgatagcagttcatgtaaggaatcttcctgtctttgtcagagaggagggtaatagagagtgggcggcaaacctggtcctttaagtcatctgctgcttttgtatcttgagaaggggacaggttgactttggtgagtagtgcccattttatcccatgaatttgaacaccatggggaaaatatgcttatctgtatcatagggctctcccactaaacattcattcatcaaaacacaggggcaagtgtgtgcctagtttcagctgttgtcaacatgccactttttttaaggcttttccccactcttgtatcccttcctctcagcacatggtctcttttcaaagatccacagaggccatcaggcagaaaccttctctgcttcccctctttcctctgggatacacttgtttttcccatctgtttcgttgtagaggaagatgggctcctcctctcatcagaggtgaatcgtctgacttgtgttccggatcaggtatcctttctctttggtcttttgaacttgcccttgtttttgtaggtcacggcccatggaccacctgcatcaaagtgtctttgctaaaacgcagattcctcggcccacccagctcttcgacatccctttctgtgggcgctgggctgcgatctgtgtttctgacccattctctggggggttctgcgcactaagctttgagcagttttgtaccagtccctcagccgatatgcccaaatcctcttctaaaccatgggtttctctctggctactccttactctttccccttcactttttcatccttcttgtacttttccgccattgaaatcaggcttttaacctccctccccctccgtggttgccacttactcatccttgggagacgccagtgactggccagtcctcctgtaggtggggagcttccctcccctggcccgtgccgtgccacactgactgttcccgactctgcttcactgctgcatccccagctatggatgttcctaacagttttgtccttaatacttaccatacactatatttttcctaaatgatttcacaggctctaacatgatggtaatgactctgaaatgtctatttccggtcttgaattccatgtcaatgtttttagctggcttcctgactttttcacctggcagccccgaaaacacctccagttcagcttgttcaaactctgatggattgtcattctctccagacgggctcacctttctgtgtttcctttggtggcaaaagccattatcatctgctgggaagtgccggcaagagtcctggggctgttgcagatggttctctcaccgctggagttccatccgttcttccccaaggctcatctgttctttctcttaaatatccctccatcttctctccctctttgccttggtacacatgccaaacacgttttatctgagccttcacgggagcctagttaactctttcgctgtcactagcctggccctcttgaatccatcttctggtgtgtcttacagttttctcaaaaacaaatgggctcctcactttggtgtctaagtctctatgtaatctggtcccagtctccctctctctctctctctctctctctctctgtctgcctcttcgtgttgctgggcccttgcatgccgtaccctggcctttgtgaaatgcccttcatctgtgctcttccctccacctggaatgtccgtctctctttttctgccaacccactcggcccctccctcctgcaagcccttgagtgtcccctccctccatgtcctgtggtggcagagctcgagctcatccttccctgagtctcccacgtagctgccgtgtgctctctcctttcccagtatgcagtgaggcctggtcagagcagcttcttggcatacgttaagcaagtgagggacggaaggcacgctgcgaaggctgccgagtgttccacaccctgagttcagagacgggagagctgtctggctgtgaggatctggtgttgctttctgaactctgaatgaagggtcttttaaaatctttttaattttaattttatttttttgagatggagtctcggactgttgccaggctggagtgcagtagcactatctcagctcactgcaacctctgcctcccgggcttaagcgattctcctgtctcagccttccgaatagctgggactacaggcgcacaccaccatgcccagctaatttttgtatttttagtagagacagggtttcaccatgttggccaggatagtcttgatcccttcacctcatgattcacccacctcagcctcccaaagtgctgggattacaggcgggtgccaccgcgcctggcccaatttttatttttgagatggagtctcactctgtctcccaggctggagtgcagtggtgtgatctcagctcactacaacttcctgggttcaagtgatctcctgggttcaagtgattctcctccctagtagctgggattacagggacacaccaccatgcccaactaatttttgtatttttagtagagacagggtttcatcatgttggacaggctggtctcaaactcctgacctcaggtgatctgcctgcctcggcctcctaaagtgctggaattacaggtgtgagccaccacacccggcctgaatggtctttgaacaggtcctgactaaagatgagctggatgccaccagcagggatgcaggtgacagggtggccctgaataaaggctggtctggacagcttagatgacccaggagcaggaggggatccccgtgggaatggcaggcccaggtaggctgtggaaggcctgaagttccagaagtaacttggacttcattgaaagatactggagagccgctgacaactttttaaaagaaggctggtatgatgggaaactctgttttaagaaggtgagtggggctgggtgcagtggctcacacctgtaatcccagtgatttgagaggcagaggtgggaggatcacttgagtccgggagttggaggccagtcagtgcaacaagaccccatctctacaaaaaattaagcaaaatgagctgggcttgggaggctgaggtgggaggattgcttgagcccaggagttccaggctgtagtgagctgtgtttgtgccactgcacgccaacctgggcgacagagtgagaccctgactcaaaaaataaaagaaggtaagttggctagatttgggagtgtcatctgagattcacctacctgtgtatggcaggcggtaagtgtaaccacccgaagttgaggcaggaaggtcttaaccaggagtgtgccaggtgagctggagagcaagaggcgatgtggacatgcagtggtaggggagatcccgtagcctgggggggtcagaattctccccagtcctcccctcggagcccctgcgcactgtcaccattggacgctgctgggtttgcattacacaatttagtagcaggtcaagtagtttcgtgagctcccattagaatctcttctgtcccccctagaaaaatgcagttctttttgcctgaaatgcctcatgtttatcaggcgaaagacaaactgcctgtgggaagttggaatcagttcagttctttgtgcagaactggagactagggtgaaaaaaaaacatgtctatttggcatttcattatatttggcttcttcacaatttaatgataacggatgcttccacttatcattgtggtcaggaattaattttattcgagagccatcgctcttgaacgcattatattcactttcataacttgccccttccccccttattgtactctgaaattgggacagttattcagtgtctttgtcctcatctgctactgctcttgaaaataaatactaatttttggaattcgtagtcttattttttaaagaacagtgactcatcctgaattacccagaattcaaagacaaaggtgattggaatcttaatgccataatatttctttttctctttgcaatttctatttgcctgagtttttcccacaaacgtgttactaagaagaaggccagggatttcatggaaacttgggttctttcctgaggccagagagcccaggggctggcgagagcagaggacctggcggagtgcacggtgtgttggtgtaggtgtccaggcgcctcccacgcatcccctccacggccgtgaggaggtggatgcggcctccgtgccagtgagtcccgagcaaagggaagcacacctgcactttggtccttctcactccaccaccctcatctcgcgggcagggccggagtcttacttgttttttgttcctagcgcctggtggctgcatcctcccccaatactcttgcttttcttactgcctcagaagcagctctctgtcccattcagttggagattcttccttttcctctttacctggaaacactggaactcccgagggccccatctgaggccctcttacactttgttcctaggctcggtctctccagacgtcctcatgtgctcatgcagctcagcgcccctccacccccagctgcccgcctgcctgtgggctcctgatttgagggggctgagggtggtgcgtctgggtggaggctggcgtggggcttccctccgtgccctcacactgctgccgtcttcgttgttcttccctctgctttgactccgtgaaacagaaagggaggctggcctggtgcccccaagccagctgctccaaggagcagctttctccggggcctgctccctcttcccagtgagctcctggtgggaagcccctatgtctgcagcgcccgggcccctccactcttgccagcccaccctagccttgggcagttcctgaaggttccagctgaagctttttgttgctttgcctggtgtttgctggagccccggcgtcagcacgggggtcgcgcttcccctgcaggggcctctctctccattccaggctagctgttttccccgtggccccagctctctgatcaggcagggaaagttaattttcagtatatccaactcttttacctcgtcacaagaggggcgcattgttgtttccagctctctacatcttcgagctgaaatcaattcacatcttacagtttaattcagatctgcaattattttcggattatgttggccatttgtcatattatgcgctacttttgttttgtgttcggtgggttatccgcctttgttctgaaggaaaaaggttaatgacgcgtcggacagcctgcccagcgttatatttagcccgtgccatctccccggagtctgactcataggcagtaatttcacagcgtggcggcgcagccgagggaaaggtcagcctgctcctgcttccctggagctctcaggagcaccttcctggtgctgggtctcctttggacactgaaagttttccaacacccgtaagctgaatatgccccagacatctgtctaataacctgtaagtgcacgtctccctagccactgttagcctgtaggtggggaggttgactcacttctttgatttaaatttgggttggaaaataacttcctaaactagcaggatagaatgaaaatccaggtgtttgtcattcatcagcaacaggtgatccccattgcaggcagccggaaccgacgtctcctggaccactgagctggctgttctcattactgccctttccgcccaggctggcggtgactcaccgtgagacaagtcagctaggtgttcaggacagggatttcagagtatttttgtccaaagaggaaagggatgatttctacggatcactaccagttggtttactgttagctcatcgtgttgatcacaccaagtcttgccaatttggttttctaagtattttcacgccttctcctcgtgtccgcgtcactgctctgattcaggcccttgtcatttctcatctttgccattttagtagtttttggattgggctcccggctgctaattttgtccccttttccactatcttccacattgtcaccgcagtcatgtttctaaggcagaatctcactgtgcccctcttctgttgggtgacttctggtggcatcccgtcaccctcaggacaacctttcctggggcctgcccgctctgctcttgctgctgcctcgctgtccccctcctccctcctgtggtttatattccaggaattctgaattagttgcaccgtgctctcatatttactgcaagaatagaccagtggttctccagcttttctgcactctggaatcacctgggggtctttaaaaaacactgcctggctcctagtcctaaatttggagatttaactggacttacagtttttcaaagcaccccaaaagattctaatgtgcagcaaagtttgggaaccactggtatagactgtcttctgcttgttttcttgaaaaactcttactcattctctgaatctcaaggcagttgttccaaattctgggtttctccaggcagacctagttgctgcttattctctgttccctgcgatgatgagttttgaggtctgatggggcaagtctccctactagatgattgttcaggagctttttggatgttctttgtctgatgatcttccacatcaattttattttatttattttttatatttttttgagatgaagtctcactgtttcgcctaggccagagtgcagtggcatgatctcggctcactgcaacctccacctcccaggctcaagtgattctcctgcctcagcctcctcagtagctgggactacatgcgtgtgtcaccacgctcagctaatttttttatttttaatagaggcggggtttcaccatgttggccaggctggtctcaaactcctgacctccggtgatccgccctccctggcctctcaatttctgggattacaggcatgagccaccacgcccagcccacatcaattttagaatcagtttgtcaagttcctcaaagcagtatgttagaatattgactgggactgcatcaaatctatagattaatttgggggagaagtgacgtgtttatggtggttagtcttcctatctatgaatattgtatgtctcttcatttatttttcattttaaatgtctttcaaaaatattgcctcatattctctataaaggtcccacagattttactagatttattccctgatattttttgttaagtggtgtttgaagtctttttttatggaagtgtaacttacatacagtaatgaacacaaatgttaagtttatagcttgatgaatttttatgttcatatgaatctatgtaaacacccagctcatgatataaataattttcagcaccctccagttctcttgagacctgtggcagtcaatagctgcccacaaagataattgtcaattatgacttctatcatcataaattagttttgtttttacttaaattccgtgtagaagaaataagtgactgggcactctggctcacgcctgcaatcccagcactttgggaagctggggtgggtggatcacttgaagccagaagttcgagaccagcctggccaacatggtgaatccccatctctgctaaaaatataaaaattagctgggcatggtggcacacgcttgtaatcccagctacttgggaggctgaggcaggagaatcgcttgagcctgggaggcggaggttgcagtgagccaagatcacgccacagcactccagcctgggtgacaaagtgagactctgtctcagaaaaaaaaaaaaaaaaaaaaggaaatacagtgtactttcttttgttttcttttttcctttggcctaaagtgtcacaactgtatactcttaatgtctccctgttagaagtctgaaatcagtgtctcttgtttttttccttcttcctccacatgatatctgagatgcatgcatattgtgtgttgcatttgttcttttttatggctggatggtattgcgtgaaaatactacagtttattcattatacttgtgatgaacatgtgggtggtttttacttttgggctgttatgaatgatgctgctatagacattcttgtgcatgtatttggtagacataagctcaggtttatgttggctttaatagatccatagccaaacagattttcaaagtggttcttgggatttctgtacatcccagcactatgtatgaactctctcttgctccagctcctcgccacccattggtattgtcagtgttttaaattacagctgttctggtctacatgtggtattgtctcactgtggtattaacttgcttttcccaagtagccagtgatgttgcacatctgttatatacttattatttggatatatacttttgtgaagtgtctattaaaatattttcttcatttttttattgggttatttaccttccaactgatttatagtagtactcaacatattttggatattagtccattgtcagctatgagtattgcacacattttagattctgtggctaggctttttactttcctgatgttgtcttttaatgaagagaatttatcaattttttaaattagatttcttaactaaaaattataaattttcagccaggcatggtggctcacgcctgtaatcccagcactttggaaggccaaggcaggtggatcacctgaggtcaggagttagagaccggcctgaccaacatggtgaaaccctatctctactaaaaatacaaaaaactagctgggcatggtggcaggcgcttgtaatcccagcctactcgggaggctgaggcaggagaattgcttgaactggggaggtggaggttgcagtgagccaagattgtgccattgcactccctcctgggcaacaagagtgaaactccaacgcagaaaaaaaaaattgtaaattttcttagatttcttaattgtattataattattttcctcttggttagcactaatttttgtttaggaaatctttacttacatcaaggtcatggaaatattatgttttcttctagagaatgtattgttttagtttttgcatttaggcctatgaaccatcttgaattaacttgtgtgtgtagtattgtgtggcacatattaagtactcacaagtatttgttgaatagagagcaggaattatagaagatttggaattatgtcatacggtcttaaattatggaagtaactaattcttaatgttctcttctaatcaggtaacaggacttacacaatttccttctttctgggtttttataaagtggggcacggtttagcaaagaaagcagtcatagttcttttttttctctgtcttcctcacaaatacttattgcatatctgttttattccatgcactctgctactcttgggagtgtctagattaaaataagacacagtctctgccctctaggagctcagcgtccagggtggcaccatccacagaactttctgtactggagggaatggcctgtgcagtactgtccaccatggcagccaccagccacatgtggccttggtcacttgagacatggatggtatatctaaagcagcagtccccaggctttttggcaccagggttgggtttcatggaagacagtggtttctggatgaagttgttcgacctcagatcatcaggcgttagattctcatgaagagcgtgcaacctagatgcctcgcgtgtgtatttcacagtggggtttgtgatcctatgagaatctaatgcctctgctgatctggccctccgctcacctcctgctgcatggcccagttcctacaggccacggactgggggttggggacccctgatctcaatgactcattattaattgtatttaattttaattactttaaatttaagtacccacatttctctagtggctactgtattagcataagtctagtgagagggataagcaatttcacaaataaatgaaaaattataactgctaaatgctaggtacagaatatgtgatgctgtgagtatataatcagggttcgacttaatttaaagggctgggaaggctttctctgggaataattactgaggtaagatttacagaaggggcaggacttaaataggtgaaaagggtagggtaggaaaaggtttttttttttttttttcttttaatgtgtgtgtaaaaactctgtggcagaaaagagcaaagccagttccagggactgaacatttgtgtgtgtggtaggggagagagagggtgtgtttatgtgtgtgtgtgtgtgtgtgtgtgtgtgtgtgtgtgtgtgtggtggggagagagggagggagggagggagagagcgagagagagagagagaggaagtgtgtgtgtgagagagagaggaagggagggaggggagaaagaagcctttataaagttagtccttgaggctgggcacggtgtctcacacctgtaatcccagtactttgagaggctgaggcgggtggatcacgaggtcaggagttcaagagcagcctggccaagatggtgaaaccccgtctctactaaaaacacaaaaaattagctgggcgcggtggcagaggcctgtgatcccagctactcgggaggctgaggcaggagaatcgcttgaactcggagggcagaggttgcagtgagctgagatcgcaccactgccctccagcctgggtgacagagtgagactccgtctcaaaaaaaaaaaagtccttaagaaacttaggccataggagttaaaactaatttgtgcagaagaaacattttgagggatgatggggtgagcctttactttggagacttttaaaaatcaatgctctaccttgaaactgtcagctctgtgatttctttgattcggctgactgtttaatgaagagataatggctttgcctgtcttttagggatgcgcagtgctttggtacaactgtgaagaacacacgaaacactcagattatactttgaatttctagtttctaaaaggagaacaagcacatgtcacgctttggcttgggaaaccaccattcttcctttattatcctatgaaataggccttctactttaatctcaaactgacagtgttctggttttgtttccctgatttttatcctaaaataacgtatgttaattgagctatttctgtggctttctttggagaattgatgttcatttatttgtgtttctcttcaagtagaaatggagtaacacgtataaacaagatacaaaagacacaaaacctggggtggaggcataagaggattggaacctccgtgctgttgagatcgtcactgttgatgcgcagtgacgttgaatgtctttcctcaggtcagaggggccggggcttcgactccatgtctagtgctcctttcagcaaattgcttctgggcaagtgaagagaacacctttaggacttgaacccagacctgcatgtctcttaatcctttgggacttcatccagtgactctgctccgggctagggtaatagagagagaaaaggacaaaagcagttcatactaccttgtgaggaagccaggttcccccagttcctcctccctccacttgctccccaagatcttggccaagaagttacctgccttctgcttggccagttctagtgacaaggaactcattactctttaaagcaatccattctgacattcttatactacagagaagtgatttatggtcaggcgcagtggctcacaccagtaatcccagcactttgggaggccaaggtgggaggatcgtttgagcctaggagtttgagcttgagcctaggagtttgagaccagcctgggcaacatagcaagacccatctctattttaagatgtttttttaaaaaaaacaggctgggcacagtggctcacgcctgtaatcccagcactttaggaggccaagacaggtggatcacctgaggtcaggagttcgagaccagcctggtcaatgtgtcaaaaccctgtctctactaactgctaaatgctaggtacagaatatgtgatgttgtgagtatataatcagggtttgacttaatttaaagggctgggaagacttttctgtgggaataattactgaggtaagatttacagaaggggcaggacttaaataggtgaaaagggtagggtaggaaagtgttgttttatgtgcgtgtaaaaaccctgtggcagaaaagagcaaagtcagttccagggacttaacatttgtgtgtgtggtggaggaaaaaaaggggcctttactaaaaatcccaaaaaaaaaaaaaaaaaattagctgtgtgtggtggtgccacacctgtaatctcagctacttgggaggctgaggcaggagaattgcttgaacccaggaggcggagattgcagtgagccgagattgcaccactgtaatccagcctgggcgacagagcaagactccatctcaaaaaaaaaaaaaaaaaaaaaaaaaaaagaaaaggcagtgatttactagcagttttaaaaaataatctttggatttgaaagcctagcaacaaactgcttttctctctttttgctggaagatggtcatttacttattcattcatgaagtcattaattcacaaagtcattcattcatgtccttattaggtgcttttcagtgcaggcatacagttcttggctgccacatgacacaacttcagggagtgtccgtgcatcactgtccctggaaatgctggcctcggaggcgtgtcctgggcttcccatgtgccgggcagcacctgaggctgtgaggcatttcttatcacagaggaactaggaaatgacattagctcattcattcacccagcaaatatctttctccatagctactatgtgctaggcactgtggcaaactatttggatacagactttaaatgcaggcttcctgcccctagcactctatggtctagtaaagatgtcagtgcaggtcactgttgtaagcgcccagatccaagtctgacttcctgtgtcagtcagagggaccccctaaaaggggtcctaaaagccccagccacagtttccacttctcttgatgatttccgcagaagagggcctaccctccaggaccgatccccagtgctcacaaatgccttccttacctgtggctgagtcctcacctgcttcagtttcatccacttttttttctttttttttgagatggagttttgctcttgttgcccaggctggagtgcacagtggcgcgatctcagctcactgcaacctccacctctcaggttcaagcagttctcctgcctcagcctcccgagtagctgggattacaggcgtgtgtcaaccatgcctggctaattttttttttttgagatggagtctcactctgtcgtccagactggagtgcagtggcccgatcttggctcactgcgagctctgcctcctgggttcacatcattctcctgcctcagcctcctgagtggctgggactacaggcgcctgccaccatgcccagctaattttttttgtatttttagtagagacagggtttcaccatgttggtcaggctggtcttgaactcctgacctcaggtgacccacctgccttggcctcccaaagtgctgggattacaggcatgagccaccgtgcccagccctacttcttttttttcttaaccatctttagaagggaagaaaatgcaataatatccttctgctaacaggactgtccagtgctttaaaagtgctttgtagttggttttctgtgtggccagtgtctttgtccagcaaaggagatcattcttaccagcaggtgccacatgcagtcttggttggacgttggctcttggagcatgttatgtgcttgtgcctgttgtgagatggccttgctgctgtgtgaatgtttacatttcccctggcaggtgacagtctggactccctgtgaaatgactgggaggaagtgtctgtctgtgtgcactgccatgtggagttatctgggaccctagaaggaaatctcactctcagattttagggctgcaactttaaaggaccttttctgcctatgtgatgttgctttgtacgttttagaggccaagggaatatttggtacattgaaaacatatggaggccaggtgtggtggctcacacctgtaaccccagcactttgggaggccaaggctggtggatcacttgaggccaggagtttgagaccagtgtggccaacatggtgaaaccccatttctactaaaaatgcaaaaattagctgggtgtggtggcgtgcgcctgtaatcgcagccacttgggaggccaaggcatgaacctgggaagcagtggttgcagtgagccgagattgcgccgctacactccagcctcagcgacagagtaagactctgtctcaaaaaagaaaaaagaggccgggtgcggtggctcacacctatatataattccagcactttgggaggccgaggtgggtggatcacgaggtcggtcaggagttcaagagcagcctggccaagatggagaaaccccatctctactaaaaatacgaaaaaaaattagccaggcttggtggcaggtgcccataatcctagctactcgggaggctgaggcagagaattgcttgaacccgggaggtggagattgcagtgagccgagatcacaccactgcactccagcctgggcgacagagagattgtgtctcaaaaaaaaaaaaaaaaaagaaaagaaaaagaaaacatacggaattgactaaagcacaatgttcgatgtatctgcttgcctactgctttctgtgtttcccattcttttctacatctttgaccttccttctgaaattattttctatgtacctgaaatataatatttagaagtccctagtgagaacgtgttggtggtaggttctcttagtttttagccaaaaaatgtgtttgtcaccgtcattcttaaaaaaaagttctgcatatacctaagtctagtgtagcagatgaattttctttcatattttgaagatgaattcttatgacttcccttgctgctgggaggttagcttctggtctaatcattattcatttggatataatctctcttttctctttatcttcccccctaccctcaaagtgtgttgtactgtaacacagttgtactacccttttagtttttaaaaaatatttgttgtgatagaattcacgtgaggcacaattcagtcacttttagtgtatccacagggttgtgcaatcgtccccacagtctaagtttagaacaagctgggaaccacccagaacatttcacgtgttcagctggtagttacagcctcctgtacatggaggcttctgatgtcagtgagggcagaggactttacgtctggtcccactgcagggagcatccaacagaaggaagaccaatctcaaagtgaggctgcccatggggaatgtggactgttgccatttgaatagtatgtgaaggccactattcctgtatgattattttttctttcctaagcatattccaaagtttctgaatgaacgagcatgccgctttctttatggaaattaaggatgagtattggctaatttcttagccaactgcttctactgctttggttttcttgaggatattttatgataaccagatgggcttttttggcacctgtagattttatgactaaatgagaaagcatctttaaaatatattctacctggaacagcataccctgacaaactcccactgagcgattgttgcctcctgttgcctttgttaatgtattttattctagtttatttttggtgcctctcacaagagagtaaaatgtattcaaccttatgcattagtgtctcttttgaaagtgtaccaaaatggacacatccctgcatagatcccaccactggagatagatgctaagcccctgcaagggtccttgtgatcggtttagtggaacgcatggtgtacagttttgacccagtgatgtgctacagaacaaccttggctggtgagcttttctggaagctcagtgtggggactgaaatgtattccttgggtcagttttgctgggtagtgaccaatccagttgtcatgaggcctagttctggctgtgcttctgatgagctgtgtgatattgagcaaggtacttaccttctcagagcctcagcttcttcatctgtagaattggtaagagaatgcctgactttgcagggtgtgaagagttggatggtgtgcactgagcgcctggtgccaggccacggacgtggcccttggccctcacccctttctagaagagctgtttttattgtgactctgctttttctttcccctgcacaaattctgctttcagctgtcattttccccaattgtcatcatggttgggatatggctgaattctagagagaagtattattttagcatacaaaattgtctttctgaatttcccacagagttgctcttaatagaaaagttgagcactataaatgggaagtatgaaattctctctgaaagctcagttttattcatgatgatctaccagactcataccattcttaaataccctctgtcctgataaatccactaaactctttagtcctcctactaggccgccttcatctgtttgtaactttttttgtcctgtcttcctattaattgtcatcccaatctgttctctgttctatttgtgatagcctgtgttggcagaaaaattggctaaatgattgaacataattttctcccctccaccccaccccagctggagagagatccttcccaggcgcgcccagtgatttgcttccctgctcacgacatcttattccatctcatctctcgccatccctctgcagctgcccccttctctccagctctgttcctgtatgggcgaagggctcagcttcagttttccgaaggctggcttctgcctcctacctgtccccatttgtaatttatatgcttcttgtgttttgtatctttagttggatttgagaacagacttctgtagtctataaagaatccatggagtggctttcttagtatttttctgagcttgaagatgacaggttttgggggtttcttggagattttgaggtctgtgtccaaaaaggaggcaaatttcagatggaattttaagacttttttctttttttttttgcaaagtgctcatatcccacagcctcctagttctaaaacattgctgatttgtgtttttccgaagtacttttacatcaaatctcattgagttttttagttggttcctgttttagagccaagaaaactaaggttcatagagttgtgtgttgcccagggtatctcaatgtgttgtggaaggagggttgcaggcaggccccatacctggatctttttcttttttttttcctttttctttttctttcttttttttttttttgagaccgagtctctccctgtcacccaggctggagtgcagtggtgtgatctcagcttactgcaacctctgcctctcaggttcaaccagttctcctgtcttagcctccccagtagctgggactataggcatgcaccaccacgcccagctgttttttgtatttttagtagagatggggtttcaccatgttgcccaggctggtcttaaactcctgacctgaagtgatccgcccacctcagcctcctaaagtactgagattacaggtgtgagccaccacgctggcccatagctggatctttataacgtgattcagaggaagacaaaccggagtcttttcttcctagaatttgtaaatcaaatctcaaaggagggcttttcatgtcccttctcgtaccttctgtttgttctctggatacacactgttgatgggatgttttcatctctggccatggcaggatcaaggccaaccttgatcccaccagaaccacatgggatgaagaaggagctgctccccaaagaaacgagaaatgctgggcagacaaaagccagatgttcactctgctttcctctacaggccaaaacttctgaccatttccagaaatgaagaatttaccattgttataagtgtaaaataggattggtatttccaaggcaaaaacaaacaaacaaaaagaatctgggtccttcaggagataaaagcgttggtgtaatttgcgaaggatgggagccttccctcgggaggagctggccaggctgtattacgggtcctgtgtatatgtcagagagaggggtggagatacagagagacacacagacacacacacagatgagatggcaaaaatacccctttgggcacctggccttcactcaacagaggacggcttactgggtgaagtcacattgagtggtctttcataccatgcttgcttagaggtccgcttgacctggttcctggggtaacatgctagagaaatgcggagtttacgttttgcacatggctctgttcataatactagtacccttcacagcaggcattatggtgtcgtggagagattttataaattgtgtccatggtgctgagagaaatgagaaaaaagagagaaaataaactcattcaaacttaacagcttttgattgagtctttacaaataagtcttcgcacatatctacctgatgaaatttcagttaaccaggagttggttgttgaatgtgactttgggatgatggaatttttattgagcgtgtgtgtgtaaactgtgtgcgtgtcaactaaatactggatttgaccctgtaatttattcattcatttagttactatttactgagggcttacaatttgttagagcctgcatcagctactatgaggggcataatggtgaatctgacaagaattcagtcttcaaggagtttgtagtcatgaaggaatgtaagacatgcataatttgctgcagtaggaataagaacagctctttttactgaatgcttgccccgtaccaggcgttgtgataaatccttcctatgcaataattcgtttattcttctgtataacctcacagtatatgtgttctaattattcccatttaggggatgatggatttaaagcttgtagaaggttatttgacttgatgaagttcattcagccaggtagaaggggagccgcacctcagccccgacccctctgatctcctaccgggctctctgcctgtatacagatcagcaggaggtaggcacgggtctcaggacagagaagatgctggaactctgaggaagacgtacttgctttccattaggacagctaggggaggcattatggaagaggtagcatttgaactgagaccaaaaattggggcatattaggatatcagattgtcagagggaagagaattaccaatacataaaggtaaaaaaaaatgggggtagaacaaggagtgacaaggaataaattctggtagaaaaatggcctaccagttgcagggactgacatggttcaaagctgggccttaggcccagtgagggctgctttatttacggtctaccctttgctttgtggccctacctgaagcttcccagatttgctatccactctccatggggaacactgaacaccactgtttttcacatcgagtcctttgagtatgtcaaaggttctgctcagattctgctcagattctcttggtgaactcttctgaaatctgcaggcacctctaggggatgtttgtcaggctcatgtctctgtctttccccctctgctagacagtagccctgtagttcttgttagctctctgatgcttgcatggattttaagactactttgtccatgttttctagctgttctcagtggctgagctggtctgagttgtctagcttgttatgaggagtagaatcttctgaagttcatttcatgcctattcagcctgagctgcttgtgggacatcaggtggacctttgctgcccacatgcagtgcttgaagaggggccagttgggcacctccattttcttctaagtgcagagaggaccctgctcttaagtgtttgatcacagtcttcatacgtgtcttccataggcaccaccaacagaaacagatcagtttgtcatttttcttattgtagatgcacaatgtctgattccttcatgtgctattttgggcataaggtgccatggacttttcaagtagactattttttaacgtaagataatttagcttttgaagatttgaagcctctaagtagaaaattgcttaattcttctttacccagttgaatattgtttgtcatcctgaaaattgaactacttaaggggacataccttagcaaatgatgcttaagagaagtgtttttgtttttttttttttaaattatgaactatttctattatgcttggttaattgcatatttttgcaaagagatattaggcatagggccatgggcctaagttattgcgaatttggaaatatacattttgtgtcaattaaaagtaaatactcttcatcttatcacaagaagctttagtttcttaataagaagttacttagatgggttcgtttgagatatgcagccattgaaattttctttcccaacaactgtgttaaagcgaaaaggatcctaggcttagaatcaaaagcaccgagtgtgagtttcagacttgccacccgtctacccatccatccatccaatcaagtttactaaacatccattcatgtgtggtacgatgcctaggatcaatgactgccagtatgactgcgagcaggttgtttattgctgttctttaaaatggggacaagtttcattaccctcagcaaactaacgcaggagcagaaaaccaaacaccgcatgttctgtcttacaagtggaagctgaacaatgagaacacatggacacagggaggggaacaacacacgctggggcctgttgtggggtggagtgaggggagggagagcattaggaaaaatagctaatgcatgctgggtttaatacgtgggtgatgggttgataggtgcagcaaaccaccatggcacacgtttacctatggaataaacctgcacatcctgcacatgtactctggaacttaaaaagaaagaacaaataaaacgagggcaagtttagaaagcataaagtgtcatactgatgtgagtccacatcttaccaacctcactttctaccatttgctcttttgtctctgctgttgcatgtatcttaagtcaaaatcagtatgaacgtgatttcttgcacaagttgcctctggtggtttgttctcttggcctggtttacactggaagtctgtgatactcgccatactcataggtagacttctcccgcatgccagctgggttctgttagggagctgcagctacttgaagataactcctcaggaggcagtatctttacgttcttgagaatatataaaactgcagtcaaatatctcattcattccgccaggtcttctcttctgttaaatggtgtatcatgcagaggccttggagaccagtgcagactttgacatttcctcttgagtgctaggggcagggtgtgagccccctttcctcaggagactctgcgagctgtgtggggagttgacttagggaaaggagtgaaggcaacgggggagaagagccaggaggaaaactacagtgactctgagttggtgcgaaccacgaaagccatccctggacatactctcagagctagcaggatttccttttgggttggacatgcgacgtgagatgcagagaggacttaaagatgattcgtgggttagacccgtcaatcgatagatactgttaacaagtaagaaaaaaacccagatggcagagtgtggctcctcggaggtttaagtagggtcttgtggcagagagtggtggctgcttgaagctgggtgaggaggtagcacttagactaaggtcaagcggcaagagagagctggctgcacgaagggaggggaactcattccagcctgaggagcggctcagcagaggcccaggagagagatgggctctgcgtggtccaaacgcagagggaaggctggggcctcggtcatcacatccaggtggtaaggagctgtcctttttaaggactgatgcactctcagcttttactcatagtagatgtgaatatgtgcttatggaggacacatcaggcagctgtaactgatacaaggtagaatagtcaggacagaaactggcatgctccttacagtcacagtttttgaacaaaatcccctacataaacaaaaacaaaaacaaaaccagcctgggcaacgtggtgaaaccccacctctaccaaaaatacaaaaattagccaggtgtggtggcgcacgcctttagtcccaggtactagggaggctgaggtgggaggatcaccagagcccaggaggcaaaggttgcagtgagcagagattgcaccactgcactccagcttgtgcgacagagcgagacccgtcccaaacaacaacaacaacaacaaaccccaaaaccaagctgacgtgttacttatgatttttgttcttattttgtagatggaatcagtgtgagtggctttcccctgtccagtccttttcggcaggtcgttcggccccgagtggagggcaaacctgtgaacccacccgagagcaacaaagcaggcgactacagccacgtgaaggtgagttggtatggcagacggcatctgccacgtgccgttcgggcttctgcaaagccgtttctgaagcacagctctgagtccttttcagaaaggaaaggctatgtgtatttgaaagctggattcttggtattctttgttcttggacaatgttttggaaagccgtcacagtgaagcttgagtgcattgtttggtgttgcaaactcttatgtccttggaacacggagattccgtgggctgaatccaggcgtgcggtgattaaagcagactctctcctgccgtttctctattcatttgaaaagtttatttattgcatacctcagttcggatgtttaccctgtacatttttcttaatcttttggcaacccttcccaattgttggtttggaagcaccaaggaagccaagacagatatgccggtagcaagtgaatgtcagtgcaaagctacgtgccgcgggcttgtaggccagcagtgagcagaggtggctgctggctccgtggagaggcctacacaagtgctccggggttttgagtcttcagcacatgggaagctctggctgtttgagctggcccagggacagcgtgtagagcaggaggactgcagggcctaagagctgtgactgggctgcaggcggcaatgtcactttcaggcacacttgtgttcaggaccagcctttgggatgctgtttacagtcctcatgccaaatttaagagggcagggactggttaggaacatcagaatcgcttggccaagatgcttgtgagtcagtgatacagtggactttgaggcattggagctgctgtcactcaaccaagaggaggggtggaggagcatggggtgctatctgatgaggtcatggcaagaaggaataggccagttctggttgatggaggtcatgtcagtggattgaacttggaaggagctagttttaggggaagagtcctctccccttttgggctctgcagtaaagaagggggttgttggtagcggggagtgccccattcctggagagcttctgtttgcacggcagcttggttactgtgttgctgggctcttgggttagccgaggggactggtgtgggagaagcttcccagcagaggcagcaaaggccccagagtgcaactgcacggcacatgcacggagctaccaagtacgggagggtgctgtctggtgggcttgaggcagactttctttgcatgtctcataattttttgtggaaagctggatcttttaggtaatggttcgtagcaagttggaggctgagccccaccaccctcccctggcgctgcgtgttgctgttcttcttgtttgtccatcagttttgcaacttgccttgacttaccttcgtggagtctgttttcctcagtgtgtgacgtctctgctttgttggtgattttctccttcctgtttttactgcttgcctggattcccagggcgtgccccaggtgccctggagctttgtgggcagccagtgtctgattagaggttgtgctgaaatgcttcagttcagcaggccttccaccattccccgatggatctgcacgtgccttggggattgctgtcaaactgcagggctgtttgtttcgtctgaattcacaaggcctcacattgagccagggtcagtggctcatgggggccctctctggtttgtcctgaacgtgtgagggcttgtgcatgtgcacagctgcccaggtttccagcgttgtgggaccaacaggctcgtttgccccgtgtatagtagcagacccatgacatggagacagcagggtttgcagcgaagagatagtttaatgacagcaggaagccacacgaggaggtgggaggagacccttaaacccatctccctgaggaattctgggctgcgggttataagggggtcgtggaaggtaaggacctgaaaagctggggtcattggttgtggtgagggggatgaaacatcaggatgtggaaactgcattctttgatgaattaactctccgtgaggtccctcagacacctggcataagtggggtccttcaggccagcagatgtcggtagttacactggtatgcgggaccggaaggactatctcaaagggaaaacgtaacgttttgtaacgttcaagcggctatcgacggagctcttaggggaactagggtcttggagcaaggtctgtgtgattctggggcaattcaggctccggcagcgctgaggaagcaggccgggcaggctgccctcgcgatgatcgccgagtgtgctgcaggcttttttgtttttccttctccccttcctttcttccctgatttattgtataaagtttatagaaacggtttcactggggtaactggggtctcaccaaggccttctgtgctcttgcattcactggctcttcctgctgaatttctggcgggtctgctgttttatcatttccccaactagttttgtgactttaggccagctgcagtgttaccttccctgactgtttcctcctaaaatccagtttttttttttcttttaatttgagatgggagtctcgttctgtcacctaggctggagtgcagtggtgcgatctcggctcactgaagtctctgcctcctgggttcaagcgattttcctgcctcagcctccagagtagctggaattacaggcgtgcgccaccacacccggctaatttttatatttttagcagagacggggtttcaccatgttgaccaggctggtctcgaactcttgacctcaagtgatccacccacctctgcctcccaaagtgctgggattacagatgtgagccaccacacctggcctcccactgttatttttgacaacacccctggacatgtgttttccaccctctgatccaaataaagtcagcctcttccagcaggtagcagagcagcagacagtcttctgcttgtctctcctggccaggtagaacttgtgtgccaaggagttgggagtagcaggggcagtggaaccagcccctgtctaaaatgccacagtctcccttgctcttaccaagattaacgagattgtcatgaataaatgcttctcaatttgttgtatgcctttggtcagtttgaacatctttaaatggttgttcttgatgactttgtccatttgcatctttgctttttgggcagaggtttagccaagcttcccactaagcaattctggaaatcccacccctcagacctatttaccttctggttattctttcagagctggggatagaatgaaaaatgctgatttggaaagatgttcctttgggcctactaacatcttaggtgtttattcctaaatgctggtggagtagtggagaggttcgagtgtcgtggtggcgtcgtgcagctctgctggccgtttgctgtgagaccagctgcgattttctgtatagattattggcacgcttttatctgagcacttgaactccttctagactttcgccatgacttttttttttttttggagacagagtattgctctcttgcccaggctggagtgcagtggcgcgatctcggctcactgcaacctccacctcctgggttcaagtgattcttgtgcctcagcctctgcagtagctgggattacaggcgtgcaccaccatgcccagctaatttttgtgtttttagtagagatggggtttcaccattgttgaccaggctggtctcaaacttccgacctcaagtgacctgcctgccttggcctcccaaagtgctgggattactggcatgagccaccgtgcctggctcgccatggcattgaatatactagcttgctcactagtgtgggccctttcacgatctgtgttccttgttacggtagggattcactggcacaggcaggccccgggaattttggggagcaggtgtttacatgtgtctgtaaactgttttgacacagctgtagggggtatatttatttgtattatgctgtaagtccagatgcggggttatagaatctttcgtgggaaaggagcctgactagtgtccccttctggtgctactcctcatgcttagatcctgtcagaggccgtccactgctactggcaccctctcattgcgcagcctgttctcatcctcagactccagtccctcacagagtttactttcaaccctgtgctgcttcgtgtcttcctcccaccttccttgtgccattccagacttcctcccgagtaggacctcctcaaggccacagaggatgtccttgttttgcctggccatcgctgtatcactccatccattttgcagtggaccagatgtggcgctctcccttaagcccctagcagcgctgactgcagaggctgggttcaggcttccttctgaccctccctcactctgcctctttgctgaattaaagcacaacgtatattgtgctccagttgtgagtcagttatggtgccccggggttgggacacagtgatggatttcaggggcctcctttttaggagccctcgagttgggggctgtcatacaagccagtaactcagccttgtccactgaggaccgtgttaagcagcgtgccgtgtgatggggaaacaagggtgcatcatggctgtcttgacttcatggaactcctgggctggtggctaagatacaagtaaataaaacaagaaaaagtggttagaatacaggtgatcctcgttgctatggctgcacggaggaagtcgaggaaggcctgtgagaggaagttgcactcaagtggagtattgaaggaagaagaagctggggtgagctagcaggccagagtggagagggcgttcccgaacctgcggctggcaggtgcagaggcccctgaagtctgtgtgtgtatggcatgctgctgcaggcctgctgtcctgagcacgggagcacggagagggctgagaggagacaggccaggctgccaagggtttcagaggcacgcggagtttgttggttccttcctttgctttgtgttccactcatacttcttttggggggcatctctcacatttgaggtactctgttagacaagaagaggattttttctgtgtctcacaggataggctcttacagtttagggtaacatttcaaaatctaggagatgctcttcacacttggttgggtcttggtgcctgtggcatggattttgttttcttcaattgagtgttgcaagggtgaatgtgctgtttttctttggaatcattataaatgtatatagatagagatgaatgttcgtacatgtatttaaatgtaatgattaaaatatcattaccgtttaccgaggaactcttgcatatcaggcacttgcatcgaaattgtccttttggattcccttgagagttgtttgagtaggtgctattatcctctaaggagaaaactgaggctccttgaggtgatgtcacactctccaagttacccactttggtctctgtcagttacactgtgacaccttcttctttcgctacagcttttctgaattttacctgtggacagagtcccaacgcctctgtatcctgcactcgaggcctttgatgccttccccttggaccatcatttcatcggttctctgtctcattgctgccttgcgacccccgtctgcccttggaggccagccactttcctcgagtggcctgggcaccctcctccacggctttagcgtgggaactgagaggaagagaactgacgtttatggattggggtctgccgggcagggactgtttgggtgcttgacattcccaggtttcctcaatccttgtaaatatcctatgaggtgagtggggaagcggaagtttagggaagacttgcccaagttcgccgcgtctgtgggtggtggagtcagggcatgaatctttgtcttttcctttttttttttttcggagatggagttttgctctgtcgctcaggctggagagcagtggcgtgatcttggctcactgcaacctctgcctcccgggttcaagcaattctcctgcctcagcctcccaagtagctgggactacaggtgtccgccaccaggaccagctcatttttttttgtattttagtagagatggggtttcactgtgttgcctgggctggtcccgaactccggagctcaggcaatccacctgcctcagcctcccaaagtgctgggattacaggcgtgagccaccgtgcccggcgcctgccctctgtgtctcttctaataatcttcatcctgtggtcccacccttaaggaggacaggatctgatgggaaaggtccgtgaagggccttccaggtaaaggtgctgtgccacccacggaaggagcgtgggtgcgtcctgggtaagagggagcagttgggtttgcctgagatccatcagtagtgaatgtggtggatttcaaacctgtgcaatcatgcggcattttctggttgtcgaggtttgtcttctgcgggacggctgagcctctctggggaccggagcgggagctgtgcaagtgaagtggctgacagtgctgtctgtggggacatctattgctgtaggggcatctggcaccatgagcttgttacagagcccttctccccgaagcaggaatgatgtgatttaattggaatcgtgctaaacctataaaactatcaccgaggaatggtgtagtcatggaaacaagtaattcagtgaaagctgctcctagggagcaccccgagaagtgggaaagataacatgtgtttctcaggttttccagaaagatgccttcctccatttagctagagtgactgtgtctgtccacgttcatgactgtctttcctgcatgcctcaggaggaatcttctagggttgaaaatagggactgtgtgaattggatgcatcttagaaacaatatttatgcaagccagcaagacagtccagcttttctgactctcagcatccccctctgtaaaattgaacgacaatgcttccttcataggattgttgggaggcttaaatgataaaagagcctggcaggggaaagaaagaaggttggaccaagttaggaaataattcattggaacttcattcttgtatgtaaggaggaaaatgagatttggtcagtgagtccaggtcagtcacagtcctgctggttgttaacaacaagagcagctctggactaggcaggggtgtaagggcctctggaacaggtagatgtcgggtcccctgagtagctgggagtctggtctttgcccacatcagctgtgggcctttggccaggtacttagtgctgcctagcctggcttcccccaactgcaaagccaggctggtgtctaccctctgagttggatatgacgtgcctaaaacatgtcatcgtaaccagaacatggcaggggctccattgagagcccttctgagaagggcccaaacttggtgcccacatcacggactggggctgcagaaatgcccggcaacaggaggcttttccctgagttggactgtgtgccgtgtggcactagaggtacccatggctttgcctgttgaaggcatccaacttatgcacagccttcagagctgcatagagatgtgggagccagctgagacctggaggataaagcattccaagtggctggaacgactgtgaacagtcagggagcggacaccagcatgcacggctgcagccatttatcgtggtgtgctctctggctctgaatagattctactaccctccatgtgcaatactgctctgtaaacactccacacctgcttatagcttgctggaaagcagttttgaaatcctaacgaaactagtttgccaggaggcggggccaggcctcccttaagctctgtgcatggttggctttggggagcctgttggttcctgctcccccttgtcaacatcttatctcttaacatttgagcaggtaggtgtaatagctgtagcttcattcatgggaagctcctgtgggagccagaggttgtgcttcactttaagaaattagaaaaaaaaaaatgtagattaaacccaaagtcagtagaaaaggaaataataaagatcagagtggaaaacaatgaaataggaaacagaaacccaacatagacaaagcaaccaaaagcttatttttggagaacagttaatgaaattcatcagcttccagccagattgatcagagagaagacacaaattaacagtattagaaatgagagagttggcataacacagattttatagatattaaaatgataagaatatattataaaaagtttatgctaataaatgtgaaaactgagatgatgtgacaaattccttagaagacacaaaataccaatgcttacacacagatatagacaaccacaatagacatagccacttaggaaacagaatgttttgttaaaaccttcccatataagatcatgagggctcagaaagaaaattgaaatggaaaatataataaaataaaaaagtcaacaaaaaagaagattagaaagtaaaaaaacaaaaaaacaaaaaaaacttttttttttttttgagacagagtcttgctctgtcaccaggctagagtggtgcagtggcacgatcttggctcactgctacctctgcctcctgggttcaagcgattctcctgtctcagcctcccaagtagctgggactacaggtgtgcgccaccatgcccagctaatttttatattttttgtagagacggggtttcaccatgttggccaggatggtctcgatctcttgacctcatgatctgcctgcctcggcctcccaaagtgctgggattacaggtgtgagccaccatgcccagccaaaaaaaacttcttaaaaaagacaaaagaaaaaaaacgccttcccatagagaaaattttggggccagatggcttacttatgcatcttaccaaacacttaagggagaaataatatgaaatctatgtagactcttccttcaggaaacctaaaaatgaaggaatacttcttaagtcattctgtgaggtcaacatttctctgataccaaaaccaggcaaagagatcatgggggaaaaaaatccccaaagagtacaacccaaagcactacagaccaatatccctcctgaacacagatgcaaaaattttaagcaaaaattgagcatctactatttaaccctatgtaaaatattgacggactggggtttatctggggaatgcaaggttagcttaacatgagaaaacctgcaaatgtaattctgcatattggcaaactgaaaatggaaaactatgtatgccatctcaagagacagaaaaagcgtttgataaaaacccagcatctatttagaatgaaaactctcagcaaatcagaaacaggatggagcttcctctgcctgatgaaatgcatctaccagccctgggcagctacccctgtccttcaccatgagaggtggcctgcgcttgcctgaggccagccatccgcatctgcttacctggctggatgaggcgtgtcttcttgcattgctggtcctgagcgcaggctctttgcttggctgggccttcttgctcacttcctttcattcatggcatgctcctctgtcctcctgggtgagctctgaggtcacctggtctgctgagccttcctccgcaagtggcacacccagagtcaggcccttcttcctgtgtcctcgtctgctgtccgttcccacctggatggtagcacctcccacactgttactgttgtcctttgcttatattgctgagctccccatcactgtaagcgcctcgtggccatgggcttgtgaagcatgccttctgtacacatttcttgacccggatattccagacagtgaggccagacagcccctctccatggggttgcctgaagattctcttcattagtgaggcaaagcaaggcagtaaagtatgttttatctcattcgatcagaataaagcttaactctgggttttttgggattctaacaacattcagatacgtcatgtaaaatacgttactttagcttttaaaataaagaattgtgggatgtttatgaagtttctatatacttttatatttttttcttaagagacagggttgtgctctgttgctcaggctagaatgcagtggtgtgatcacagcacactgtagccttgacctcctgggctcaagtgattctcctgcctcagcgactcaagtagctgggactacaggtgcgtgctaccacacctggctaagttttgtattttttgcagagacaggatttcaacatgttgcccaggctggtctcgaacacctgggctcaagtaattcacctgcctcggtctaccaaagtgctggaattacaggcatatgccaccatgcctggccttccagctaattttaaaaaaaatacttttttttatttttaatttgttgtagagatgtggtctggctttgatgaccaggttggtcttgaactcctggcctcaagtgaacctcctgccttggtctcccaaagcactagggctgcaggtgtgagccaccacacccagctaacttttacattttaataattacagttgcaaatggaccaaaagaatctgtaaagacaacttaggagcaaatgtattcaagtttttaaaaaaaaaaaaaccctaggatatacaacaaatagcattgcttcttaatcaagctgtgttacaaattaaaaatggtttccacgagcccttcggggcctggggggcagcagaatggctgttcccatcagcggcgaggaaaacacgtattatgccagttactccttgaacacttacagcagcctgatttgtgtgaggagcatggccacaggcttgcataagacatgcttctgcccttgaaaatcttgcagtagagccgggggagagaacatccacagaagcaatggtgcccagcgctgctcttgccgtagaggtgtgcagttgggactgtggccttccttggggacaggcagtgccttcatcatctgtttgttcccaagacagccatgtaatcgtcggtttgctgggtgggaaagggggtgcgggtacagggaatccaggagagaaagggcttaggcaagggagggagatgaagctagcgggggcgtggggggacatggaagagagaaggcttcccggagaaccggctgggattcttcaggcagacggggggatggggaagtccagagagagtggaggaaccccccacttccctccagcagcagcagccgccacagtgtcctgtccagcattttccgatgctcacttggtgctgggccctgcgcctggagtttcctctgcattgacggtgcgcgttcaccacagacctgtgaggcgggggtccctcccagcattcctgttttctagatgaagacagcggcgtggccctgctgggtgccttgccctgaatcacctcagtagttcagcggcagaggcaggctcggccctgggccagctgatggcagaattcacggttccggcccctctgctaggctggcacgcccaggcatggcaggcagccgaacaggccgaggccagaagaagagcgagacagaggctcgggatgtgacgccgaggagatttagcgcggtgacagtgtttacagattacttccctcatgactacaacttcccatcattcaagtggaaatgactgaacagcttagaaagattaagttagcccaaggtcaagcagttactaagtagaagttaaaattcaaatcaggataggtctgaatccaaagttcacgctgtttccgtgatatcctgctgcccctttacgtataatttctaagtttcccaacttattatgggatacaaaacattctgtctcaattcaaaccatatttatagagcagtggagtataaaccctttagcctatctgaccctcagtttccaatctgtgaaatgcagataataatactttctccggggctattgtaaggagttaagtttctgctattagccttggtagataagaaaagcttacaaaatagcaaatccaattcagttccaaattatttctaatctgtcccagtaatagttacagagacagggaatttctttccacaaagtttaagcataaaagcttcaaaggaatcctttaatctgctcaacaatttcaaaacttaataagaaatgtagaagtaagagatgcagagagagtctgctgcatgtggaattctaacacagatgttaaggacagagaagggggacggcctgttccttgagttcctgtcctttgccttgcatgatgatcactgtctccaggaacccctgtgacatttcatgtaatccattccttcagcaaacatccagtgagcacctagagcatgcccagttctgaatgctgggggcgtaacagtgaacaaggcgacgttcctgagctgacatccagcagaagagacaagcagcaaacaaataccacgtggacaaacaaggaaagacacgggagtgactcctgctcgttgttttaggcggatcgtctgcagaggcctcaccacagagatgccacggaagaggcagagtgtgtccacagggccccttcagggcctatgtcagtgatggtttgctgtgctgagcaacaaacactgtctgaacaacatcaacaccaactgccagcattttaaatgatggtctccccttggtatacacgggggattggttccaggatcttccatacacccaaatccacacatactctagtcctgcagttggccctgcagaacccctgcatatgaaaagttggccctgcaaatatgtgggtttcacatcccaccaatactgtgtttttgttgcacctttggttgaaaaaaaaatctgcttctaagcagacctgctcaactcagacccatgttgttcaagggccgatggcatgtatgtgtggtttccccagtagactttgtgtccatggatcagagtgggataccacaggaacctttgcacttctagtgcctgctacaggggctgacatggagcaggctgtcattaaacgttggatgagggaacaggaaagcaaatgaaatgacctctaaagaattgctctgctcttccagtgtgtcttcctgttgatcataggctgctacatctgatcatgccagcaacttaaggcagtggcatctgcgttaaccagaatcagcatcacctggaaggctggttatgccacagcttgctggaccccatttgcagagggcctgggagtttgcatgtagaataagcccccaggtgctgccgctacttctggtgtggagaccacagtttgaggaccaccaccttaagagatgaaatatttttcaatttgttttgacattttttgttgtctttaggactggaccacaagcatccttacggacacttccggtgtgtctcatagaaatggtacatggtaagctctctcaaagtagcttagtttggggtgcctcagcgactaactgataatacctgaattcctgagaaggaattttaataaacatttgagattaattttttttnnnnnnnnnnnnnnnnnnnnnnnnnnnnnnnnnnnnnnnnnnnnnnnnnnnnnnnnnnnnnnnnnnnnnnnnnnnnnnnnnnnnnnnnnnnnnnnnnnnnnnnnnnnnnnnnnnnnnnnnnnnnnnnnnnnnnnnnnnnnnnnnnnnnnnnnnnnnnnnnnnnnnnnnnnnnnnnnnnnnnnnnnnnnnnnnnnnnnnnnnnnnnnnnnnnnnnnnnnnnnnnnnnnnnnnnnnnnnnnnnnnnnnnnnnnnnnnnnnnnnnnnnnnnnnnnnnnnnnnnnnnnnnnnnnnnnnnnnnnnnnnnnnnnnnnnnnnnnnnnnnnnnnnnnnnnnnnnnnnnnnnnnnnnnnnnnnnnnnnnnnnnnnnnnnnnnnnnnnnnnnnnnnnnnnnnnnnnnnnnnnnnnnnnnnnnnnnnnnnnnnnnnnnnnnnnnnnnnnnnnnnnnnnnnnnnnnnnnnnnnnnnnnnnnnnnnnnnnnnnnnnnnnnnnnnnnnnnnnnnnnnnnnnnnnnnnnnnnnnnnnnnnnnnnnnnnnnnnnnnnnnnnnnnnnnnnnnnnnnnnnnnnnnnnnnnnnnnnnnnnnnnnnnnnnnnnnnnnnntgcttttattgcatttcttgctaaacaggaaaaattgtgttagatttgctattgagaatgactgacagaaagccaatatgtttgctttgggtaaggacatttaggtgacattattagtttctaaaaaatccaaagcagtttaaatagagacaacgtcaaacaaaaagaattctatcccccacccctagaaatatctccactactgaaacaggcagaatgaaggagggaaaaccttatatttatttggcttcaaacagatctgtaatgaacctcagctttttacccgctttgttagagtggacgggttacttcaggccatctttgaaatggagaccatccttagtatgtcaacaggagttcttatggtgaaggaggttgcacagaacccaactgcagggaatgctccgcttcctgagagctgaagagacgcacggctcctgcctgccttctccaggtgcagtctcatcatcactgggcggagtcgttggcactgtccttgtctgtcaccccactagacttcaagctccgtgaaggcagaagtgctttcctttcatctttccccatgcgtagcagactgtctggcacatgacgggtgctcgacagatgcttgttcccactaaaagggtcacagacggcttgggaaggaggcaggcaaaaaggcgcagggagtggtggaaaggcattctaagccaaaggaccagcctcagcaaaaacaaggagaaacgggctttttaaatatatatatatatatatgtatgtatatgtatgtgtgtgtgtatgtatgtatgtatttggggcaatattgttgaagtagggccataaaagatgaggtcagagcatgtaaggtgagaccacaagtgaagaatcctgaatgccactttaaagatccagactccttaatgcagactgtggagccaccttaagaccgtaagggagtaataacactgtgactcacccctagccagaatttattagttttgtaaatcaaaacttgaatatcctagatttttttccttgttctgccaaggaagacaggatacagagaattttctgacattcatttcaaggcataagatatcctatgataaagaaaattattgctgtataaataatagcccctcaggaaaattgtaagacaagaaagaaaagcaagaaagcaaacgtaagactgcaagcagaaaaagaattagatgttgtttagtctttggctgactttaaaagcagttctgtaacataaaagataattgttttatctttctgaaccttatagtcctagtttactgataatttttttgaaaaattaggaaaggatactgaattttcccgaatgcttattatgtatcttttgagatgatcatattttttctttctttctttgttaatgtggtgacttagatggattggttttagaatgttaaaccaaccttgcattctggggataaaccttacctggtcatgatgtaacatccttttcagcctcaaaacaaatgacacacttaggaataaatctgacaaaatgtgtgaaggatcggttcagtgagtcatagggaagatggtgagggttggaaataagactgaggatgagggggtgggccagagtggccacttgtcagagacttctcctaggtaatgtcagtaatactgtgtgggaatcagcatctggagagtgaggtgaaaggacaagaatggttgcatggttgggcagatggtgactctgggtagctgagatggagactgtaggaggggtggtgagcgggagcccacattcgaattaggttgcccaggcctgcctgaactagctgtctggatggcagctgagctacatttaagagggctcctgggtggggattcctcctcctcatctgtattctcattaatccatttgagttgttctctttgatttttaaaatagttcatgtagtgcattcatgatttaaaatttcttgttttcaagtaggccgtgaagtggcagtcttctgagaatttctgtttatttaagttaaagttcttaatcttaacgatttcctctggatcagagcacttgaacattaattctgtgttaatgagatttacatagcactctctttgtaaatgatgcttttagtgatgaatgtttccaatctttctacatattgtagtttgggttcttgttcttacaaagcaaaaaataaatgaacacatttactgtagacttcaggaaatggtttcctgtatcatgcagtataaacttctgataacttttgctttgtcaaatgacttatccatgcttttggtaatctttgtatcttgtgaataccagtgatatcttatttaactcctggtgacactaagaattttctaggcagcataagttatacattagaatcattgtaaaggagatgtcaatattgctacttaatgtgatcacattgtatctactttgagtattcctacacatactttcttccttctttttctttccttttctctgtttttaaactgacatctccgtagatgatttttaaatttcttgagcaagctcctccagcgtaaccttctggcatctggcctacatcctcagcattttgatgaaattccgttcactggaattgtctgataagatttcctctcaataaaatccagtgatctttttctcactgaccttgttcatcatttctattagtctgttttcattcctgtaaaggaacacctgagactgggtaatttataaagaaaagaggtttaactggctcatggttctgcaggctgcaaggaagcctggtgccagcatctgcttctggtgaggacctcagaggcttccaatcatgatagaaggcaaagggggagctggtgtgtcacagggaaagagcaggagcaagtgagtgttggcaggctcttttatttttttattatactttaagttctagggtacatgtgcacaatgtgcaggtttgttacatatgtatacatgtgccatgttggtgggctgcacccgttaacttgtcatttacattaggtatatctcctaatgctatccctcccccctccccccacccaacgacagcccccggtgtgtgatgttccccatcctatgtccaagtgttctcattgttcaattcccacctatgagtgagaacatgcagtgtttggttttctgtccttgcgatagtttgttcagaatgatggtttccagcttcatccgtgtccctacaaaggacatgaactcatccttttttatggctgcatagtattccatggtgtatatgtgccacattttcttaatccagtctatcattgatggacatttgggttggttccaagtctttgctattgtgaataggatggcaggctcttttaaacaaccagctcttacttggactcacagagtgagaactcactcattactgtggggagggcaccaaaccatgaaggatccattcccatgacccaaacaccttccaccagaaccacctccaacattggaggtcacatctcaccctgagatttggaggagaccaaacatccaaaccatatcatcgtccatcttttcaccaagtttgacagcactggccactgtaatctcctttatgtaccttgtcctcctgcagtttgtctgtgtggagggctttcgggttttcttgatgttcttagtcttttagagcttaataccttggcctcatgtgtgatccttccaccactcctggtacccagccagtggggaagttctgcagactcttccttagaaaggactcttagatgattatgatgttccatggccacacagagccactgcctcggctgagtccttctcacttccagcagaattcgtttgatctcttccagctggtctcttctgtctcttctgcggaatttaccttgtgcttgtctgttagctcaaccttcccgcaagcaccgattttcacatcttacttcctgctaggaaacttgccattcatcaggtgaagttccgaagtcctcacttgcattatgaatgacaagccctcacacaggtggaagcattcagcactgtcactgtcctggcctcactgagcaacactgtgagcctgttaggacacagggacttttcagacaaacaacaaatcgtttatcattacagaagcactatcagcaaagactagtgcaggaataccgttgagacaaacaaaaatgaaaggagagaaatttcacattcctcctgcccagagatcacgaccatgaagccagagtgtatatcactcaggatcatttaatgacctgcgtatatgaatacctgcgggtgtgttttccccgtaattcaaaattagatgactataaatactattttgtgtcttgctttgttcaattagtgctattccattttctgtttcagtaattttttattgcttctactctgcagatgattttaaaatttctcccatttgatccccagattttattataacaaggtagtccaaaccagtatacaatacaggaccactcattgcattgcattttgcttttaagtttgttttcagctagcaccacttttttcttttggacgcttgttgaagagaccagatcagttgtcctgtagaatgtcttaccttttggatttgtctagttgttttattggatctgtttctccatcccctgatttcccttaaagtagaatttgtatgcaaagtcttgatgaattcacacgaaacatttttgcctagaatacttcataggtgaagttggtacttcaggttgcattaccttagaaatagatgcccagtatctggctgtcccaccactagtgaggttaagattgacctctggatagggcaatgagagcctgagcccattgtttttctccttgcaaccagagaatattctgagggtcaatactttggcagtagtacaaatatgtcagtcatgcatctaatgttttaaaatcaatggataatctttgcctgatttaataatgtcattcaagttctatgaaaggtttttctctattattttttctacttttataaagtggccttttattgtaaattttagaacttttagctcaaccactggggctatttaattacccaggaatatagtgcctgggtaaaaacagaaacaagatgctactttttttccccctttactttctaatttcaaagtaagggattgtttaagagcttctgcagaagttgagaagttgggttttatttcccttttctgtttttgagtatcatggtggatgcatggatttccgttgattcacttacagtcattattctgtttgttcacttgtcataatttggccaaagagagctttcttaagttggctctcatgccattttgacatgacttactaatctttgaaagcctcattgcttttttttttttttttaattacagaagatgagcttttatctcaccaaacaaccgtaatgtgttgatatctccatttggaatgaggaaactgaggcttagagcagatactttgtaaactaatgtggctaataaatggcattgttgtggtgcaaactcatgtgtgcctgactccaaagtctttcccacgatgctggaaccttccacattttttccttagagcccttcccaacctgccatagctctgatggtatgtcagagctgagcctgacataccagggccagctgagccttctcgctccctctcgcctgacacggcactgctgctgtgtgctgtgccaagcttggtcatcatcctgtcccccagcctctcccagtccctggctgctccccttttcccattcttcccttcataagttctaggatgataatattgacttagtgtttgagtgggagttagatgtattatataaaaatgtccccagcatcaaaatgactcagagtatgactgtatttttaaattaaatatcaagacctatcatctgacaaaacatatgaatgacaatgagatataatatttgaaattagatccgttctggggaatcaaagatattttgtaacagtatacacagtaggcattggtaagtaaatgagaactctatgagctgttttctggaaaagtttaaaataaaatttgtcaaatatcaaatgattgttataaaaaaatcagtggaggcagtatccttggaaaaatccagaaacagttttgtttgtttgttgttttttacatcaaggcagatcagcaggtgaacagtgtttgggaaatataggacgggagaccttctctcaagaaactacataaacaactgtaattaattccattgtgaaaattgcattctggtttccaatatctatacctcagcttagaggaagcaaactggctggacccgcaggtttctgttttctctttcggaatattttgctttaggatgccttagacagtcacgtgcttcccagccggccacagtcccgcctctgcctggctgtccacttgcctccgtcacactcttcttccccctctggactcttagaggcctgggtctgtgagccctgcatccggcgttagaatagcacggtggtgacatgctactggaacacaggaagaatattacatctgttttcatctcatccttttgaaaagtacctttttatttcagaatggttttagatttacagaaaagctgcaaagatggaacagagagttcccatgtatccctcatatcagttttctccattgtcagtgttgtacattactagggtacatttgccacacaataagaaaccaacgtgggtgcgtcactgtgagttaaactctatccttgattcagattttactcatgtatccgctcctgtccttttctgtcctgggtcccattcaggacgctcgatgacatctatcctccgggtcttcttagtgtcttccggtttatgatggcttgtctctccttgtttttcgtgacgttgagagtactgaggagtgccggtcagatattttgtagattgcgcctcattttgggtttctctgatattttccttatagtgagaaggagtcgacgtgcccttcttatgccgccgccgcaggggtgcccacctgacttgttggtgatgttgaccttgatcgcctggccggggtcgtgtttgccaggtttctccattggaaagtgactctttttggtcccctttctatattctcttcctgggaagcaaatcactaagtggagctcacactctagggctggaggcaggggctgggaggatgggaactgagctcccccttctggtgggggtgcatctacagacattatttggaattctttacgaaggtcttgtcccggttggccttgcttctaggcccgttcagtggatagcgctaggaaacctatgcatctacacatctctgtaattatttctgtatttatccatctggttaaacatgagtgtaactgagtccagtcccacagggctcattctagctttcctgtcttgtttatctgtaacttccctctctggccgtgagaaactaggtcccaccagctactcttcgttgacttatttgactccagtgtgcatgtaaagcactttcagagctgctcctctgcaccctgtgagaagcagctttaccaactagagtacacagtttctgtggcattccttttttaaaaaaatttttatttaaaaattatttttaatttttgtgggtatgtagtatgcagttccttttatctttagccctatggttttcagtcaaaacattgtcttccaaagttaccatctcatctgttttaatacttatttttgcattcttttaaaaatgtactaatatatactttaaataaatgtgcctattggggatgtattctcaaaagtgtttttttaagctcataagagtctgcaataaaaaaatggaagatctgtggatatagattgtggtgcgggtgatgcaaaaatatttacttttgactttgggatgcttagtgatttattgagttgagcagatatttattgagaaagcagcatgatgcagtggaaggaagaaaggctctgggggcgtagatggccctaggttcacattccagcttgatcacctacgaactgtgtgacatcaggcaggttacttaacttgtctgcataattatttcctccagtgacgttggttaatatgcatttcacaggatccctgtgaggtgggaaggtctagacctggatttgtgtctttacatgtatccagataccagggatagtccacactcttgctactcacagtgtggtttaccagctaagaacatcagcaccccccaggagacctgtcggaaatacagacccttaggcccctcccagacctcctgagtttggaatcacattccacagacccccaggtgactcaaatgcatgttcacgtgcaagaagccctgctttgtactgtgctttgagaagctgtgagccatacagctccccagctccacccattcttctctctctctgaattctcctgggggtccaggcctcagctgcactgttgctccccccaggagtcccgcactccccgcttgccctgtgccgggtgttgccgcgttcagcctgctgtgctggcatcatctgtctccctctttccgtctcactgtggtgtccttcattgcaagcactgtatctggcacgttgaatgtgctaataaatatttgctgaatacaagaacgtccttggtgctaggccaacttctcagactaccagaggagagacatggttcctgccattcaggaaatctcagcccagagaggaggcagacttggagtggacagtgacaccatacgattgtaaccacccaaggggttcactttgcctgctgcctagacagagcggattcattaagacaggggaattgcaatagagaaagagtaattcacgcagagccaactgtgcaggagaccggttttattactactcaaatcagtctccctgggcattcggggagcagagtttttaaggataacttggtgaaagccagtgagccgggagtgctgattggtcagggctgaaatcatagggagtcagctgtcttcttgtgctgagttggttcctgggtgggggccgcaagatcagacaagccagtttatcgatctgggtggtaccagctgatccatcaggtacagggtttgcaaaatacctcaagcagtgatcttaggagcggttcagggagggtcagaatcttgtagcctccatctgcgtgactcctaaaccataatttttaatcttgtggctaatgttactactacaaaggcagtctagtccccaggcaaggaggaggtctgctttgggaaagggctgtttaccgtctttgtttaaactataaagtttctcccaaagttagttcagcctatgcccaggaatgaacaaggacagcttggaggttagaagcaagatggagtcagttaagttagatctcttttactgcctcagtcatcattttgcaaaggcagtttcagggtcaccctgtggatgctgtgaatgctctgaggaggaagcagagacagtttccctagaatgggtgttgcttaagctgagccttggagactagatggccagtgcaccaagcttccttctcatcttgctgcacaagatgtgctggggaaaactagccttctctcgtttctggaattccaccacagggcgagatacagnnnnnnnnnnnnnnnnnnnnccgtgacaaatctcgcgttgttttcttttgttctgttctcttttgttttatattctgtgcttttgaagagatatggctgttttaaaaagcaacagggagctcattaaatgaaatatccctaagggttggattgtggcccaaatgtcaatacgtatctggtaaggaaagaggaaattaaaacccacatcactgtatttcatctagatagtccttgataccgaggcagatgcatctcaatagcagggctgcataccatccaaacagcaaaacaaaaccaaacaaaaaacaaaaacaccccggggttcgaattcagcctttatttcctcagccccttttccttaggaaagtcaccgtgctgctctgggcctcacggctctcatctgcaaagtgaggaggaggcgcctgccctgccctctttacaggctttttaaggggctccaagtgaagaaaggatttgtgtgttttaagactgcagtgctcttatgttaacatcggctcgtgttagggttctcaattccaaagctcattcccgctttatttgcaaaatattatcctacatttgtctcaaggtcttctctttcttctctctccttttctctatcttctcttcctcgcccactttattctcctcctcttttcttcctagtgtcctgatccagtcccctcacttgttatcaatcccacagttttctgtggagaagtgatgaagcatgcattcatctatgatgcactcacctatgcatgtagtttacatttaccgagtgttactctgttcctggcaattgctatgcgctgtggatataaaagatataaaatgacattttctcaaaaggagttcacgcgtggatcgttgtgtgtgttttcatgtcacaggtatgatctgtatagtggatcgttgagtgttttagtatcacaggtgtggtctgtacgtgaattgttcaatgtgttttagtgtcacaggtgcgatctgtacagtggatagttgagtgtgttttagtgtcacaggtgtgagctgtatagcggatcattgagtgtgttttagtgtcacaggtgcaagctgtgtagtggatcgttgtgtgtttgtgtcacacgtgtgatctgtacagtggattgttgagtgtgttttagtgttacaggtgtgatctgtacagtggatagttgagtgtgttttagtgtcacaggtgcaagctgtgtagtggatcattgagtgtgttttagtgtcacagatgtgagcggtatggtggatcattgttttagtgtcacaggtgcgagctgtacggtggattgtcgagtgttttttagtgtcacagatgcgatctgtacaatggatcattgagtgttttagtatcacaggtgtgatctgtacagtggatcattgagtgtgttttagtgttacaggtgtgatctgtacgatggatcgttgagtgtgttttggtgtcacaggtgtgatctgtatgatggatcgttgtgtgttttagtgtcacaggtgttatctgtacggtggatcattgagtgtgttttagtttcacaggtatgatctgttcggtggatccttgagtgtgttttagtgtcacaggtgtgatctgtacagtggatcgttgagtgtgttttagtttcacaggtatgatctgtatggtggatccttgagtgtgttttagtgtcacaggcgtgatctgtacagtggatcattgagtgtcttttagtgtcacaggtgtgatctgtacagtagaaccttgagtgtgttttagtgtcacaggtgtgatctgtacagtggatcgttgaatgtgttttagtgtcacaggtgtgagctgtatagtggatcattgactatgttttagtgtcacaggtgcgatctgtatggtgggtctttgagtgtgttttagtggtcagaggtgtgagctgtacgataggttgttgagtgtgttttagtgtcacaggtgtgatctgtgaagaatacatggtcaggggtgtgtaagtgtaagcatacaaatgctcatagggattttaaagcttcaaagacagttgataccagagctgggtattgaaagatgagtaggtattgaggttcctttgggaccttccagtcagcgagtgccctaggtccaggcacagaatgtgcctagtgtatttcaggagcctcagttacagttggcctctgtgtccatgtgggttccacagctgtggattcaaccgaccttggattgaaagtattcaagcaaaaaaactgcatctgtactgaacatgtacagacatttttcctatcattagttcctaaataatacaatataactatttacatagcatttacattttattaggtataataaatctagagagtaagttatacagaaggatgtgcatgggttatatacagatgtgctattttatatcagggacttgagcagttttggtatccaagagagatcatactgagggagggggatgactgtgggtggggtgtgaaggggtgcgggctggggagagactggataggaggagttaggaaggcagagaaaggaggacagtgaatgtagaggcggaaaagatagacaggggcctttgccatactaaggagtttagattttaaatgggtggtcctgggggttttaagcagtagaatgtctggatggaattaattttcagagagttcaaccctgggagcgctagggttacaatgatggattaaaaccgggattagaatttgtggctccaaggaagcactggagctgggactggaccctgtgttttctgaatctgctttttggacttttcccagaatgttgccttgtgcaaaatgacaaaatgtgttagcttctacatactgggagccttctttgcgttgggcactgtgctgagtgctttgcatgcattgctagtcattctcagaccagccctgaaagataggtattacagtcttcatttgcagcgatagtttgtccacaatcgcacagcttggaggtggccttggtcacctgacctcaaagtgcatgctcttcccattagcacagcgggcctcctgtggactggtttcagcctttccagtggactttctagcagtaggcacaattaccaaccaagcttttttttttttttttttttttctgaaagtacaaagatcccttctgcccttatggaactttgtgggagagtgtcatttctttccttctggctcaaatctgaacttcttaaacttgccagtgatataaaaaatggacagtttgtgctagtatatgttttcagctcaactttgaagatttatatccaagacttacattcagctgactcaggtaagaagctaggctttgcaatgcctacaacgtgaagcttctccctattctgaaggcaggtcactctgtttgggtgaaattcgtgttcatgattttaaagcttagatctgcaagaatctaggccttagttctaagtgtgtaatttaaatttattcccgtgggggaaatagccaatatctccagtagaaaagcacttcagaacacattttcacattttagattgatgagccagggatttgaaagattatttagaaaatttcctccaagcaactctggaatgaaggtatatgtggcagaggtgtttgaaacctgtctttccccagtgaaatacttgttttacttctgcaagatttaaacagccattcagctgggcatggtggctcacatctgtaatcccagcactttaggaggccgaggcgggcggatcacttgaggtcaggagaccagcctgaccaacatggtgaaaccctatctccactcaaaatacaaaaattagccgggtgtgatggtggatgcctgtaatcccaactactcaggaggctgaggcaggagaatcatttgtacctgggaggtggaggttgcagtgagccaagattgtgccactgcactctagcctaggccacagagggagactccatctcaaaaaataaataactaaataaacaaacagccattccttgggtgtttggggaaaatatccaataaatagtggctagtagtttttatatgattagttggaatagttaatagttacccatgtgacaagcagttcattcaatgcatctcatgttatgtctggttcttaaacctcgtcggagcaggttttgcaggtattgaagcgaggctctgcataatggggctgccctgactgcacagctggtgcgagggctgtgggcgggcagcttgctcctcccctgcaccatgctgcctgtttttactgctagaaaacacgccccaggcactgtgccaggaggtttctgcagatcaccttgctctgtggacgattgggcctgttgactgcagaagtcagccagtgacttcttctaacagagtccttttgcctacgttgaggtgatcatgccatggaatatggcacccatcactctagcatggctgtggggaaaccattttcagttaaataagtgaaatacacgtgtgccactcttgtgaccttgctttaactttccgaaaccctttcttaggcttgacaatttactcagcctgcttggccttcattgtctggatctggatttgcaaattatagatgttcagggaacctgtgttgaagcctggggttgattagaaatgaacacagctgatttagagtcttttgcttaaccaaagcttcaagatgttaacatttataaacaagagaagggataccatattttttcaaatttttgctatatgccaggtaccatccacaatcttttcaaatcctcattttagtcctgagtgatgcttctcaccctttggtggtggctaggcccagagaagtaagtaagtgatgtgttagtgtcatgttggaaagggtaggggaggagatttaaactcagggttacagactctcagacctgtgctccttccactgtgctatggggtattagccggtgacctctgccttttcgtggacagcatagtatttattgggggaaatttggggctgggcaagcatttgggctttctgttaggttgttcttgcattgtgataaagaaatacctgagactgggtagtttgtaaagaaaagaggtttaattgcctcatggttctgcacaggctgtacaggaagcatggtgccagcatctgcttggcttctggtggggcctcaggaagcttacaatcatggcaaaaggtgaagccagagccgatgtgtcacatggcgagagtgggagcaagagagagattgggaggtgccacacactttgaaacaactagatctcacgtgaactcacttgtcaccaaagggatggcgccgagtcattcaggagggattggtccctcatgatccagacacctcccactaggacctacctccaataccggggattacatgtcaacatgagatttggtggggacataaatccaaaccatatgaggctttaaagtcagacctgacttcaccactattagtatcccccactggcaaattactgagtttctgtgagcctcagtttatttgaaaaataagaataatatggatctcaaccagctcttgtgagcatggatgaaatgcgtatgagagcatctggcacgttgtcggccctcaataagagttagctttgagtttgtttcctgtctgtcttagtgatcaaagcctgagcgaatgcacttgtgccttggtgggggcagatgctgagcattgtagaggctattgtaacccccaccctctcctaatctggcctctccgagagactgcccgttcttctcatttgagaacagggattaacagcagacgtgactttggtcctggacactgaacttgagaatccgattgttggagaagccctcaaccatgcagcatctgtttggtggcagcaaaaacacgctgtagtcctccaaaggtttgctttaccctctattcgtctctgttcttatatatttgaccttctttctttgaaaggctgggcaatgaaacttggcacgttcttgaatttgctaagggtttaaaaaaagaaatctacttctcaaatagcaactttctagagtgaggaaggagggaaagccatggcggagaagaagctagcagtttgttcttccgcacagctttttgcctctttctctttgcagcctccttttgtgtaacacaatgaccaccttttctcaagtaagatctggttcctccaggctctgcctctgggtgtacctgggcggttgggcccagtctctctgaaccaattaattcctgcttgtaattccactgctcttcatcccttaatagggattagtcattgttttgttgttgttgttgctgctcttttgagatggagtctggctctgtcgcccaagttggagtacagtggcacaatcttggctcactgcaacctccggctcccgagttcaagcacttctcctgcctcagcctcccgagtagctgggattacagtcgcctgccatgacgcctggctaatttttttgtatttttagtagagacagggtttcaccatgttggtcaggctggcctcgaactcctgacctcaagtgatcctccagcctcagcctcccaaagtgctgggattacagacgtgagctaccgcgcctggccggattagtggtggttgttattatagccgttttctatagagttttagtaacttgttcacttctggtttccgaccagagctcctggtataggacagtggtcaacaggcgcttgttagctttgatttctctgttttctcagttcggttgatcacatctttatgagtatttgtgcttcaaaacttaccaagaatgtggcaatgcctaagatagatgagagagctatggaggccgtgcgtctgccctgtggaacctggctgttattcccggactggcatatgtggctgctgctgaggaggaggagtttagtttgtgtgcatgaggtgtggagaggaggggaagataagaccatagagagagctgaaaaccagatggcttgtgctaagagctgcaaatgcgaagcaaaagatttgggagattgtttttatttgtgcttatttttttcctatcacaaagtaatgaatgatccttgtaaaaaaaaaaaatctggaaacttgggaagactctaaaggagaagggcaaaacattccccaaaatctcactacccagaaatgggtgctactctcattatggcctatttccttccagtttttctccacgcatctctttaggtagctgaaatcagaccttaggagccgtctaggcctctattttactaaaattatgttataagcattttcttatcctatgcaagcttatttttaagttactgcttggtagaactgtaacgtgatttataaaatgcctcccctcttgttcgaggcttgggtcgctagtttttcccagtgataacactttggcaagaggagctggtcttctgaaatagtgagctggcagaacttctaaggcaaggagttgtgtatctgatcttttagggcggtcacttctgtggccatgcggaaacgaacctggcaggaggaattcctggagacagcagggaaactgttccttggttccagcattctttcagcaaatatatgccaggcatgtgttaggccacttaggaagctgttgaaagagcacaggcagagaaatgattcaattttgcagaaggcagttttagtgaaggtggaaaggagggaattgatgtgagaaggatttggttgaaaaacaatatttgtgtatggtatgggttccatacacagaagcatttgtagtgttatttgggccatgttgtggatggcaaagccatcccctgggttagaaacaacgggaggagggctggtttcagagggtatttgggaagttacagggctgcctgttggccattcaggtggatgtgtgctactaacgaagtcaatttcagctggaattctggagggaggtccagcctggtggtatcaattcgggaccatcagctgtggatagtggtcaaattgtgtgtggttccttggaatgaatcaagagagaagaggagcaaaggtagatccctggggaacatcggtgttgaagggggcagtcaggaaagtgaagagagacttgaaggaggaagaggtcaaggacatttcaggtctgggtgccagcaagtgtgaggcagaggctggtaaaggggaatgccatgtttaaaggcagggataggccagtgtggtcgggagatctgtgccatcaaggtcagagttggaggggtttggagttttgcagggagcagggattcagtagggataaagatataagctgtgcatagaaacaagcttgtagcagaatagagagttccaacttcccaacagctgtgctgagaagtaatgtgttttggagttcagaggagggagatgttacttaatccgagggcccattagggcagcagtcagaggatcaggagagatgcattcattcacgggtttttattcatgctgtcatatatttattcaattctgtgtttgtgcgttgattttattatctgtatgttttgtgtatctacttatggataccagggattgtttaaaatttaaatccctgaaggcagtgacactgtcactcattcttgctggggaaatctcccccaccctcaacctgctgaagaatattctattcctgctcgcacatttagcttctccttctcccatgatctctgggaggccaggatggggagcactattttcttggctgctcctggatattttgtggggagtaaactggaaaaatgagaagagccagatgagcccagaggatgtacaggtgtgggaggagcccagttcctctcccgaccacactgacccatcactgcttttaagaacctgtgggattttgggaggccaaggcagnnnnnnnnnnnnnnnnnnnnnnnnnnnnnnnnnnnnnnttgagcccagaagttgagaccagcctgggcaacatggtgaaacctcatctctacaaaaaatacaaaaattagccagacatgatggtgtgtgcctgtggtcctagctactagggaggcagaggtgggaggatcacttgagcccaggaggtcgaggctgcagtgagctgtgatcgagccactgtactccagcctgggtgacagagcgagaccctgtcttaaaaaaaaccaccaacagggaaaggccaggacgacgaggagaagttggtatctttttgttagctccagagtttgtgctggtgaaagaaggttaggatgtagaaaagggatttagagacatacagtggctgctcttcagtattcttcaagggtccaagtgaagaactggaattttttcaatgacatgcaacagttgacctgtgtttcaggaagtatagccttgagctgagtctcagccatgtgggaccctcggaagcagctacagcttcttagtataggtcgagcgtcccaactccgaaaaccccaaattttggagcatttcagattttccgagttgggatgctcagccagtacgtatattgcaaatacagttgtcccttggtctaggtggggcatcggctccaaggcccccgcgtatactcaagtactctagttggccttgcagaacctgtgtatatgacaagtcagccctctgtttatgtgagttttgcatcccacaaatactgtattttccacccacgtctggctgagaaaacccgcatatgagtggacctgcacaggtcaaacctatgtagttcgaggggtgactgtattcagaaatctgaagaaatcccaaatctttttaaaacacttacggtcccaagcacttgggaaaagggatacgcaatctgtagagtaccgtgtagagacgagtatcgagtgggtgtggttgacctgatgctcactcccactggaataaaaataacagcatttatctctgttgtgttttttaactggctttcatccatagatttattgatttgcttgattcaaaaaaaagggaaagattttgcaatgttgggtttaatttttagtgttaaaaataattaagaagacctgatgattctgcacctgagggcaagtgtttcaccagctgtacattcccactcacactgtcaagatcccagcattttaggattcctgtttttctacttgcttcaattaattaagagtaatgaagagatgcagaaacctcgtatttggtgaagtatacagtgaagaagaaaaggatacttataaattgtattgcttatattacaaatataatattaaatatgagtagccatttaataacttttttttttttgagacagactctcgctctgtcgcctaggctggagtgcagtggcaacctctgcctcccgggttcaagcaattctactgcctcagctacccaagtacctgggattacaggtgcccgccaccatgcccagctaatttttttgtatttttagtagagatggggtttcaccatgttggccaggctggtctcaaactcctgacctcaggtaatccacctgccttggcctcccaaagtgctgggattacaggcataagccaccatgcccagcctaataacttttaaaacaagacagaagtagttctattgagcaaggaacagtgataaaaatgtatagaaattgtacagtgactattttgtagctatagaaattctttaatggggttctttaaatttgctttgtaaattggtcaaattaagtttgagaaaatgttttactttgaagtttgtttagtaatttataattttcacagggctttattatcttttgcattatttgagcttcataacagacttgtgacaatagcttttgggtaacaataccccagcgtcacagacaaggagcctgaggcatggaagggtcctccttggcagccaccccttctccttgacttttttgttggctaattcctaccctcagtgtctggggcaggccttgagggcctcctggactccacaacagcatcctaattgcaccctgagcctgtagttcctctctgctataaagctacttaagcacttcctaaaatatatatttgtttgcatcagttctcacctaaaacccttccccatctccccatcagctgcgaaataatgccgggttcccgagcatggcgcccgcgacactgcaccacgtggcactgcaccacacagtccccgcccctcgctggtggaggcttcccctggtcctgatgtgggagtgcggctgagccctgggcaatgacatgtacagggtgggcagcatgaccagaactccgtcttctccgtctggtgggacacggcaggagtgatggcctaccttgtactcgcaggatcagaccacaccctggggtaggtagaacagcaaggtggactcggtcctcagccccctagagctgccctgttaggcctgaattgcctgggcgtggcagttaagggagagagaaacgcacttccacagcccttaaggcactggcattttggtgatggcgtagcacctggatctatgtcctgaccaggccacctgtctagcctcctctgtgcaagtgggcctgtccagcattccctgccgtgccgagttctctgactccacgtgcgtgtgtcccgctggactcagagccccgggagggcaggggtgcgtcctgtccttatgtgtgctgtgtgaggagtgcctgtcaccagtgtgcctgttggatgcttcccatgtcttctaccgtactcagcgtacatggtggtctctggctatgaaaaatgatcaattctatagctgaattgatgactgaatctgagaacatagtgggattataggtattagcctgccattattggcaagctatctcatggaaagagtgctcttctgtctagaactggtatcatgaacttaagaataaaaaattattttatttttatttattgcttctttgcaaatctaaaatgttgtgttagcagtcaggagagagggtgctctggggagggatgggctcggtgacagagcagacaggagagggtggtgggcgcaggcatgttctttttccagctgggtgctggatttagatgtgtgctttgtaataattcatggaccttattcatattttgtgtgattttctgtatatgtgttttacttcattataaaaatggtatttaggatgcttgtaatgccagcactttgggaggccaaggcaggtggataactgaggtcaggaggtcgaggccagcctggctaacatggtaaaaccctgtatctactaaaaataaaacaaaacaaaacaaaaattagtcaggcatggtggcttactcctgtaatcccagctgttcgggaggctgaggcaggagaattgcttgaacccgggaggtggaggttgcagtgagccgaggttgtggcactgcactccagcctgggcaacagagtgagattctgtctcaaaaagagaaaaaaataataaaggtatttaagagatagctaattttaatgattctaaaatataaagatggtttaaaaaatgagcattacttctaccaaatagacaaacagtgtcaacttttggtgaactttcttccaattctttttttttccttgtgtgttgcttttcaaagaacagtataacacttttaaaatggaaaaagagccacctgccatatcttcggtaaattagactagtgtagacttaaaaagaggaattatctgagatgtcactgggcctcacggatatgtctgccttgtttctgtgcaggttcactgctgtcctgctttcttgtcagctgtggccctgcccccactctcagcccacgactgctgacattggcagtcagttctccaggcccggtcacagggtagagaaggccagtgctcagaccaatggatcttctcttctcnnnnnnnnnnnnnnnnnnnnnnnnnnnnnnnnnnnnnnnnnnnnnnnnnnnnnnnnnnnnnnnnnnnnnnnnnnnnnnnnnnnnnnnnnnnnnnnnnnnnnnnnnnnnnnnnnnnnnnnnnnnnnnnnnnnnnnnnnnnnnnnnnnnnnnnnnnnnnnnnnnnnnnnnnnnnnnnnnnnnnnnnnnnnnnnnnnnnnnnnnnnnnnnnnnnnnnnnnnnnnnnnnnnnnnnnnnnnnnnnnnnnnnnnnnnnnnnnnnnnnnnnnnnnnnnnnnnnnnnnnnnnnnnnnnnnnnnnnnnnnnnnnnnnnnnnnnnnnnnnnnnnnnnnnnnnnnnnnnnnnnnnnnnnnnnnnnnnnnnnnnnnnnnnnnnnnnnnnnnnnnnnnnnnnnnnnnnnnnnnnnnnnnnnnnnnnnnnnnnnnnnnnnnnnnnnnnnnnnnnnnnnnnnnnnnnnnnnnnnnnnnnnnnnnnnnnnnnnnnnnnnnnnnnnnnnnnnnnnnnnnnnnnnnnnnnnnnnnnnnnnnnnnnnnnnnnnnnnnnnnnnnnnnnnnnnnnnnnnnnnnnnnnnnnnnnnnnnnnnnnnnnnnnnnnnnnnnnnnnnnnnnnnnnnnnnnnnnnnnnnnnnnnnnnnnnnnnnnnnnnnnnnnnnnnnnnnnnnnnnnnnnnnnnnnnnnnnnnnnnnnnnnnnnnnnnnnnnnnnnnnnnnnnnnnnnnnnnnnnnnnnnnnnnnnnnnnnnnnnnnnnnnnnnnnnnnnnnnnnnnnnnnnnnnnnnnnnnnnnnnnnnnnnnnnnnnnnnnnnnnnnnnnnnnnnnnnnnnnnnnnnnnnnnnnnnnnnnnnnnnnnnnnnnnnnnnnnnnnnnnnnnnnnnnnnnnnnnnnnnnnnnnnnnnnnnnnnnnnnnnnnnnnnnnnnnnnnnnnnnnnnnnnnnnnnnnnnnnnnnnnnnnnnnnnnnnnnnnnnnnnnnnnnnnnnnnnnnnnnnnnnnnnnnnnnnnnnnnnnnnnnnnnnnnnnnnnnnnnnnnnnnnnnnnnnnnnnnnnnnnnnnnnnnnnnnnnnnnnnnnnnnnnnnnnnnnnnnnnnnnnnnnnnnnnnnnnnnnnnnnnnnnnnnnnnnnnnnnnnnnnnnnnnnnnnnnnnnnnnnnnnnnnnnnnnnnnnnnnnnnnnnnnnnnnnnnnnnnnnnnnnnnnnnnnnnnnnnnnnnnnnnnnnnnnnnnnnnnnnnnnnnnnnnnnnnnnnnnnnnnnnnnnnnnnnnnnnnnnnnnnnnnnnnnnnnnnnnnnnnnnnnnnnnnnnnnnnnnnnnnnnnctttgcagtgtgcttcgatcagtgagcttagatcagcgtgcactaaattgccttaaaatagtatgaagttagggctgtacagtttcagaattagcagacactaatgtatcagtagtgaagctgttttctgtctatcgaataacagctttgggaagcggccattctcaaacatatttgtgaaatcgaatttagagtagtgggcagttacttttggaagccaacattcccaagccgtatttttttttttttttagttgaaatatgtagaaaacagttgaatagaccaaggtcttagggaaaggcaggcttcggaaacatttgcctgcttcaacccagagactataatgtaaagaatttttggataaatgtatgcactggaaagcaagatttccgggtacctgaagcaaagaggaaattcaaaatctgagtgattaacagaaactaaagccaaagtgcctccttgtgataaactttgccaaccagcactaggcttgtatgctgatgtaaagaagggagttcaggctgcagctccctggtactgagtcatgaagggcttccctcagattggaccaggaaagtctggtccccagactggggagaggcagggaagcatgccatggcctagcacctgaggatgcacagatttaccataggaaacctgcagggagcagccaacccaggtagaaaactgctccatagagatacttctctggccacagagacatggacttcccataagaagtaatttctgtggagcacgagtgtacagccacagacaacaaactacacaaggaggcagaccaccatgagggggaatctacaggggcagcagatgggagaatttatacctcaggaaagacacttttaaagaaccctgtttgatatggtcagaatggtattagaagaaataaaaccacaagtatgagacaaaagcaagctaatttgaaaaagaacctcatggagattctaaaataaaaaatatatagtgacggctgggtgcggtggctcacacctgtaattccagcactttgggaggccgaggtgggtggatcacttgaggccaggagtttgagaccagcctggccaacatggtgaaaccccatctctactaaaaatacaaaaaacaaaacaaaacaaaacaaaccaacaaaacttaactggacgtcttgtcaggtatctgtaatcccagttacttgggaggatcaggcaggggaatcatttggaccctggaggtggaagttgtagtgagctgagatcacaccactgcagtccatcctgggtgacagagcaagattctgtctccccatgccccccacctctcaaaatagatatatggtggttgaagtaaacaaaaacttaaaacacagagttgaggagttaaagaagagactagatgcaattgaagacagagtaatttggaagatagagcttagggaacttcacaaaatgggttacagtgagacaggtagaaaatgtgaaagaatagttgagagcatagaataagagtctagttggagatccaggaatagaaagcagaaaaaatcctggagagaaaaatattcaaagagatggcaactgagaattagcctgagaaatgcatgcatgaggtcttaaattgaacaagtacatcaagttttgaattttcaagtttaatgggaatgataaatcctcagatccaagaagctgaacaaaccccagtcaggatggacacacacacacagtcacataagttaatcaaattactgaaaactggttgtattgagaaaaatctttagccagaggaaaagccacaaattacatgggaacaaaactgatgataattgtagacctcttgttggaaaaaatgctcctggaagacagtggaatttgatctttcacttggtaaaaaaaaaaaaaaaaatagctgttaacttggaattctatatccagcaaaaatatccataaaaaaatacaaataaagacaaaagctgagagaattcctctccagaagacttactctgctagagtgcttaaaggaggttctaaggcagaaaaaacaatgcctcagatcttgaaatgtattagaaatggtagaaatataggtaaatatgagaataaatagaaatttatttttgaatttttacgtttccttgaaggaatattgatcacattttannnnnnnnnnnnnnnnnnnnnnnnnnnnnnnnnnnaaatatatggtggtaaattcttacattatatgtaaggttatatgatattatttgaaaatagattgtgatgagtttaagatgcacattgaaatgacagaagaaacacaaaacaaaagaatacaaagtgttatagctgataaatctatataaaatagaatcctaaaaaattcaattataaaataggggaggaaaagaagagaaaaggaacaaaaaagagacgggagaaatagcaaggtggtagaagtaagctcaacagcatctataaccacattaagtgtaaatgacctaagagcttcaatatagtggtagagactatcatactggccaaaaaaaaaaaaaaaaaaaaaaaaaaatcaagatataactataaattgtttataggaaattcatttaaatataaaaacatagattaagtagaaatggattggagaagatatattttgcaaacacttgtcataagaaagcaggaacaactttattaatataagacaaagttgaccagtagtattatcaggaataaagagggacgttttgtaatgatgaaagggtaaattcttcaagaacatgtgacatttcaaaatgtgtatacacccaataacagagcttcaacatgcatgaagcaaatagctgacaaaattgaaatgagaagtggacaaatccataattatagttggagatatcaccactcttggtaattgatagatcaaatagaaagaatgtcagtgaagatatagaagactttgacactcacaaccaatttgatctagttcacatttctagattgcttaacaacaacaaatatacacattattttcaaatacacattgaacatttggtaagatagaccatatttggggtgataaatcaagtctcaataaattttaaaatatttaaatcacatacagagtatactatgtgaccacaacagaattaaattaaaactcagtaacattaagatacattggtaagccccaaatatttgaaaattaagcaacacatttctaaataacccgtgggctccaagaagaaatcacagggtaatttgaaaacattgtgaattggctaaaaataaaaacacggcatttcataatttctggatgcaactaaagcattgcctcaatggaaatttgtagccatagatgcttacactgggaaaggagacttgtttcaattcatgagctatgttctgtctcaaaagaagaaatcaaagccaaagtaactagaaaggagaagaaaataaagatcagaaattaatcaattttacaacaatggagaaaacccagtgaaaccaagagcttgttctctgaagagatcaataaaatgcatgcacctctagccagacttaccaagataagaagacataacatatcaatatcaggaatgaaaaaggagacatcagtctttcctacagacattagaaggataataattgtaatggaaaacttcatgtgagtgaatttgataagttagatgaaatagaaaaatattttgaaagatgcacatcaccaatatttattgaagatgaaacggaatgcctaaatagccctttctttaataaaagtcagttcattattcaaaaatatttccccaaataaaatattagtcacagaatttcactggtaaattttatcacattataataaagaggaaatacaatttttataaaaattctttcagaaagtagaggagggaacatttcccaatttgtattatcaggctagctttatcctgacaccaacatcagagacactatacgaagattacagaacgatgtccatcttgagcatgtatgcaaaacccttgaaaaattagcaaatggaatccaatgatatatttattaaaagaagaaaaagaatgcagcattctatgaaatgggtggttcattgtgatctagtgagatttattctgagaatgcaaggctggttaagtattcaaatttcaatcagtgtcattcactatattaatagaatgaaggagaataaaaaccatgatcatagcaatagatgtataatgagcctctgacaaaatgcatcacacatttatgatacaaaacacttaggagactggaaatagaagcccacttgctaacaggcctctgtgctcaacagtatgcttaatggtgaatgctttcctcctaaggccggtaagaaggcaaggatgttcatattcattacttctatttcatattgtgctgaatagtctagttagtgccataaggaacaaaaaatgtgcccagattggaaaggaagatataaaactcgttattcacagaaaacattactatgcatgtagaaaatactaaggaatttacaaaaagtagagtaatttagcaaggtagtaggatacatgattaatatacaaaagtcaaacctatttctatatattatcaatggacatttggaaaataaagttaagaataccatatcatttataaaaacaaaaattatatacttggggataaatttaagaaaagatgtgcaagaattgtacattgaaaattacaagaaaatatacattttctcaagacaattataggagattgtctattcccaagacaattataaaagattgtcttgagaaaatgatccaaataaatagaaagacactgaaagatatacatggctatgggtagtaatacctcatattaaaaatgacagttcttcccaaattgatctttatattcaatgcaggtgtaatcgaaattccagcaggcttgtttttttttcttagaaattgattgctttattctgaagtttgtatgacgtatgtaggaactaaaatatcccagacaacgaagctacagtaattaacacagtgtgatattggcataaggataaacatagattaatggaaacaaaataggaagtccccattaatagtaatagacccatccataaatagtcaattgattttggactaatgtgccaaggtaattcaaagggggaaggattggctttttcaacaggtgatgctggaacaactaattatttatatgccaaaaattaactccgacccttaaccccacatgtatataaaaattagatcaaaatggatcatagacttaaatataagagatataaagcagtaaagtttctagaagaaaacattcaagaaaatcttctcagtcttgagatgggtagagatttcttgggacaaaaagtctaaaacacaaaggacaaaatggtaaattagacgtcatcaaaattaaaaacttctcttcaaaagccacttttaaagcaataaaaaagcaagctcagccttggagtaagtatttgcaaaacatgtatctgttaaaaagacttgtatccagaatagacataaagctcttacaaccaatagtaagacaaataactagattttaaaaataggcaaatgatttgaatagctaattcaccaaagaagatacgtgcatggcaaataacatgaaaagatgctcagcatcacttgtcagtaaggaaatgcaaactaaaaccatgaggagatttcattatgcgatccatttgaatgactaaaaagagtgattattgcaagcattggtgaggctacagagtaactggaactctcctatattatgaatgagaatgtaaaatagtgtgactactttggggaaatgtttagctatttattgttaaacatatacttatgtgatgacccagcaattcctcttctcccctatgtaccttaggaaaatgaaaacacggattcactcaaagacatgaccgatgcccatagcagctttattcataatagccccaaactggaaacaaaatgtccaggaacagatgaatggataaacacactttaacatacccatgcagtgcaataccacgtggcagtggagagaaacgagctaccggtatgcccaacacacagatgaatctcagaaacgttactgtctgtggaagcaagacacgaaagaatgcagactgtgtgattctgttcataaggaattctggaatgtgcaaagtgaaactgtcataacaggaggcaggtcactcgttgctggaggctttggggtgggacgttagatggccagagaggaggcaggaaggcacttttaggggtgatgggaatactctacgtgttagttgtgcaagtggatacaccagtacgttaatttattaggggtggttttgcatacacttggagtggcaacattttgttcatattaattatttctcaataaaataaaacaactttcatagttcaagagagatcgtctttgactgtctttccttacctctcagcctgtcgatgtgttcagtggccctgtattttcctttgtcacatcacttagcacacactgagttgcgacggtttccttccctgtctcttccatcagactctcagtttcttaagaacaaggaatgtcttttacgtgtctgtcctcagggcatagcccgatgtctggcatgcacattcactgccgaataagtgtatgttcagtaggatggcttcaatttattgattgcctacaatgtgagatagttgtagatgttttgcatttattatttctgatccttagtaaatgtttgctacacaaataaagaatcctcactgcattccagaagtcatggtacacggttgcacactgtcatggagtgtatagcattggagcacagcacacagagaggctggatggtttaaatattctgttcaatggcagtgtcaggattaaacccgtggatgtcgtcagatttcgttgttttacatctaaatcttcagctattgtctgcacatacttaagactcagttacttttctgtttttagaattggtcttgtcagcaagtagagtttactctggagatgtgagccttacattttctaatctctttggcgttcatttcttttgtttgaggctgtgattcaaagtaggaaacatgctggaaccaactctttttcagaacctggcccgcatctcaggtgctgcttgcttaattgcgtaataaaggacctctgtggtagaagcctggaaactgctgtggcgtctcttatgccaatgtctgcttgttccctttccctcaaagaaataatacatctcttgctgacactcagtgtaatggaggttcataattcaaaaaccaattatttggggcaactattggatgaattttctttggcatccttttgttggctgattttcctgttagctgtgtgtactgttttctaaagaaacatggtaagtggttgtctgttggaaattgaattgtaattgaatagattctgagatttgacgactgaaaccaggcaacaccatgtactccccatttttgttgtctgttaaattctaaagaggtttttaagtatctttgactttcggttacagtaaaaaaaaaaaaaaaaaatccccaggtgcattgaaaaacagtttggtagttccacaaaaaacatagttatcatatgagcccacatttccaccctgggtctatactcaagagaactgaaaacatgtttgcaaaaacttgaacacaatgttcatagcagtattatttatgatagtcaaacagtggaaacaaccgaaatgcccgtcagctggtgaatggataaactgttgtagattaatgcaatagaattattatttcagcccagaaaaggagtgacgtactgatccatgctttgacatgatgcaccttgaaaacatcgttaagcggaagaagccagacacaaaaggccacacgtcatatgacgccatttataggaagtgtccagaataggcaattccatggagacagaaggcagattgatggttgccaggggcttgggggaaagcaggagggggaatcgggagtgactgctaatgggtacatgatttctttttgggatgatggaaatactccgaaattagatagtgatgatgattgcacaattctgtgaatatactaaaagtcactgagttgtataccgtttccaaagggtgaattttatggcgtgtgaattatacctcaatttattttattttttaacttttacgtttgggggtacatgtgcaggatgtgcaggtttgttacacaggtaaacatgtgtcatgggggttggttgtgtagattatttcatcagccaggtattaagcccagtgtccattagtcatatttcctgcttctctccctcctcccaccctccatcctccaagaggcctcagtgtgttgttgtttccctctatgtgtccatatattctcattatttagctcccacttataagtgagaatatgtgtaaatctcaattaaaaaaaaatcctcaaagctaaacatttttccttcttctccacttttcttcttgccctttaccccccaaactcatgtcttctgaataatgattataatggctaccatggctcaggctcctgccgtgtgtcatctgccatgctaggcacttggtatttgccattttattaattattacaataaccccattttacagatgctgacatcatcagaggctcagagaggctgagccacttacccagtttcacgtactagtgagcaggtggagccaagactgaagcacgttctagtctgactactggacatattttgctgtctctgatatttccgtaccacattgatgaaatcttcctgataaatatttccaatgcatggatagctaagtttatgccatagtctatagacatatcttagactggggtgagcaaatgcttgcatggggcaagcgagtcccctactggaggtatgtggggaccagaagatctgtaccctgactgaaggcaattcaatcaccaagtttcatatgacactgagtgggctaaccagaagatttttttttttttttttttttgagacagagtcttgctctgtcgcccaggctggagtgcagtggtgcgatctcggctcactgcacgctccacgtcctgggttcacgccattctcctgcctcagcctcccgagtagctggaactacaggcacccgccaccaagcctggctaatttcttgtattttcagtagagacggggtttcaccttgttagccaggatggtctcgatctcctgacctcgtgatcctcctgcctcggcctcccaaagtgttgggattacaggcatgagccactgcgcccggccacagaagatgtctttaatccaagggttctagtttgtgattccactgccccatctgttccatcttggttctctccttcctggtaattcttgtagtagtcttgtagactattaattgaaagctgttatcagttaatgggttgtgcatacgtcagtataaaacctagtacaaatgcagaccctatggaacagcagtagcattatctctgcttatcttctcagtgtctgtctccatagctactgtctcatgcttagggccccatgatctcaggctttgaccacaggtattgtgcagctttttaaccagccaccagcttcagtatcttccctccatttcattctacactggacagccaacaagtgtagtggctcagagacagtgtgtgcagtcatgtaattggacctgagcacttggtagctgttgaccatggtcaaaggaatctcaccgaatcacagttttctcccctataaatttgggaatgatagtacttttcttgtaggttggttaggagaattatttttaatcatagtaataggtaatgttattgctgcttcctgtgtgctggaaactttctaaactcaaagcatttagcacagtgtgcggcatttctgagtgtcaggaagtgtcagctgctgctgctgctgctgcgatcgtagctctcataaaactcaagtaggctgttcctttcttaagtctcctccattgtaaactccagaggtagtttaaccccctgtccactgtcagaggtagtttaactccccctccattgtccagaggtagtttaacccccctccattgcccagaggtagtttaacccccctccattgcccagaggtagtttaacccccctccattgcccacaggtagtttaacccccctccattgcccacaggtagtttaactccccctccattgtccagaggtagtttaaacctcctctgttgtccagaactagttgaaactgacatcatggtcctttttcaatccgataccatcctggcttttaattgtatctcttcccgtctctggggagtcctccctgtgtgctcagagtgctctgtttcacgttgctgtgctccacaggtgctcatgctttctggtccagtgcaatgccacagcctctgcctgcccttcctcctgaataaagagacagttcttcctttgtgtggccacagcagttggcacatacttgagtgggagcaattactgcactgaatttctattatgtatttgcttagccttcagatatgaactcagcctttctccgagcctggctcagagtacctgcggcacccatagcagttgtcattttctgttgcttttctgccctcctcacgccgccagatactcctcaagacagagcccttatgttccgaatggtgacccctagcaccctcggtgattcctgcacagtgccttggttggtgcggccatactcctaccccagagtcctgctttgaatgcactaaaaagtataaatattagcatggcactggagtagagcatgggggcatctcaggaatatggacttggagttctcccaattttttcctcctacgggtccacggggtccctttgtccccctcagatgcactgccaggcagtgcaggtgctgggggctcgagagtggaagaagctgcatggcagaggacctcagctcttggtgcgctttgactcgacaggtacttttatcccttgctgtttgtgattcttgctgtaaataagtcttgtaagatctaacaggacatagctgtaagcatagagaatcacaaagaccctcaatgacttagaggatatgttttacaggtatgttcttcctgagaacttagtcttcagcagtggcctagatgatgttccattttatacatacagtaaaattttaatattttcaatggatgggtgaataaataaagttgcagcatttatttactaattgtttcttcttttaaaagagtatttttctttacctatatatgctgtcaccaatctgtttctgtctatagtgagataggtatttttttggtctctgtaatgtttatgcataagaatattaagattgaagaggatattttggttgtttagccagagatccagaaatgcccaaccccagctctaagtggtatattcagaagaggtcatttatcagctcatttaatgggaaagtgcagatggaggtttgttttcagtttcagacatcatctctcaactctctaacctgtttctcgcaacttgatgtcattcttaggctccaggtggcaggaatgtggctggccaggtgtcaggctggtgttttccaggtgggatgatgagaaaatagtgtgcacttctctgtcttcattgaaaaacctctgacccacctcttcacgacccagtcacctgcccgaggttcttggaggctggggctggctaggcctgagtctgagatctacctgtgaggctgcaggcctggccattctcaccccagcacaggagtagcgctggagctgggtagttctctagagggaaatgagggtgttgtgaccagaagaggagtgagctcatgttgggctataaaacaaccacgtcgtccttgctttccttcaaagagtgctcctgagactgcttttctaaggctctttctgatcctcatcagtttcccagtgagccttcttcatgcctccttgagtctctgtagctcattctgttatagaccagagtgggatgtctatatgtccccctaattgggtttcaagttcctgagaggtaaagactatttttctacctttctcccacaacccttggcatgtgtcagattctcaacaagtgtttcagagaggccacaggcaaagaggatgtggaatttgggatcagacacacctggcttcctgttggggctcttttgcttattggctgagcagcctttggaagatcattttccttctgtgaacttagtttcttaatctagagaacagacatgatactgtctcctttggtagagtgatttcaggattatggagggtgcctagcatagcatccaacagaaattagagatcatggctctcacatgtgtgacatagaggacatggtcatacagcaactccagctgtcctcaccccactgccacttccagaaatcacagattatgagcatcctgatagggcttctgtttgttaaaacagcaataaaagaacatttatataataattttattgcttccaataaaatgcttttaaaaagtcatgtaaaagactcatatatagcagggcacagtggctcacacctgtagtcccagcacttctggaggccaaggtaggtggaattcttgagtccaggagtttgaggtcaccctaggcaacatggtgaaaccccgtctctacagaaaatgcagaaactagctgagcatggcggtgcacacctgtagtcccagctattcaggaggctgaggtgggaggatcagttgagcccgggaggttgagggtacagcttcaaccgaaaaggaaaccctatacccatctagcagccgatcctcctcctcccgaccccggctctgaaaaccaccaatctgcattctgtctctatagattttcctattctgaatgtttcctataaacggaatcatatacactttcacttcccttctctcacttagcctgttctcaaggctcatagatgccgtgctgagcatcagtgcttccttccttctcgtggctggacaatatgtcatcgtactgcccttccacatccgcattctgtttgtccaatcatctgtcgatggccacctgggctgtttccaccttcgggttactgtgaacatgtgtgtgcatgtatttgcttggatgcctgttttccatcctcttgggtctgtacctctccgtggaattgctggatcctaggctgactctctgttgaaccgtttgaggagctgtattcgacagcagctgaagcattttccatttccgccagtcatgcgcgagggttctgaattctccacacccttaccaacacttgttacctcccagctgtgttattgtagccatcctagtggatgtgaagtggtgcttcactgtggttttgatttgcactcaataactattttttatttcaaatattatctatgttcactgtaaaaaactaatagcaattttatttttatttacttaaaaataaatgaatttttcccagcttcctcagagatgtacaggctcctctgggctcatatttcccccttgcttacctcatgcatgttggttcatctgcctgtccttccaggggaccgcgagcccctcgaaaacagtttgtgtcagaacctccagcatccagtcactcattcaacaggcatttattaaaagcctactatgtcaaaataggagcagagagcagtaaacaaattctggtgcatctccccatagaacttaccctctagtgaaggagacacaataactattcaatgcataaaagatctgtgggttgtggagaaaaatcattttggggagggaaagcatgaagctggagagagtgaaatgcaccccacatctggatggcctggccccaggcctgttcccctggacactggtcactcaggcagcaccacctctcctggccctcaatccgtctgtccttgccttcgagggaggaccagacatgacagcaagaaattccaaaggaaaacagacttcactctgaggacagcgaggaatcatcaaagagccctcctaactcgtgctagcagcagttactcagcatccatgagccttgagaacaggctaagtgagagaagggaagtgaaagtatgtatgattccgtttataggaaacattcagaacaggaaaatccatagagacagaatgcagattggtgattttcaggtcctgggtggggagaaggggcatcagctgctaaatgggtatagggtttccttttgggttaaaaaaatgttttagaactggatagaggtggttgcataacattgtgaatgcactgaaggctgccgaaccattcgtcactggagaatggttaatcttacattatgccaatgtcaccttcgatatgttattgacaaattttaaaaatcatcctgatcactttgaaatgatcaaagtacgtgatgacaaaatgacaaagttgccacactaataagatacctagatacctttaactacctcattgtcagtgcatctcgttattgagcaagttacctgatagaggagaaagctggggtttggggagtgggagatgatggcttggcatcttttttagtctcgtccatgtgtctgacatacagccatatgccacatttcatacagttgctgcatagatttctgcaaaactttaacttctccttttatccataatgcatattttctgggtgccggagttaccgttgctctttgagcaggttcattcagagcagaaccctcctgtgagagggatgctttcccttcagttaatcatcgagaaaatggagatgttcccatttaattactgtcgtttctttgtagaagtactgggtcagctttcgtgtggccttttgctttagaaatgaaagaaagagaaatacatattcatgcctatgaaatagcgggagcttaaaactcatcatcagccccatcttcgtacttgagctttcctcttacatttccaattttctttgagatattcccattcacataccttcatgttcctataactaccacatgtctaaaggtgaagctgtctttttgccagtcagacataggcttgagagtcattccagctgctgccagctgtgtggcctcagtcagccctcagaacctccgtttccacccttgtcaggtgaggatggtgatggctttccgaggactgttgtgaggattcagaggggtgctgtggtgtgcaaagtacctcatgtgcttttggcgtgtggtgtgtgtgcagaggtgttttttccccttcctatctcagtccttaaaccacttcacccctatttttgaaatcctcttataaaaatctgtggcacaaccattaatcctttacctaattgtcagtgtcctgcttatgtcccaagagccttagctctttctttattcctgtgctctgtgtcacatggatattgacatgaatcctgcatactctgatctcaaactgattgttaacaagttttttttttttttgaaagctatgaactgtcacttagattcttctgtgtcctgtgtgacctggtaccattgtgaaaatacaggcagctgccagtgaatactcctgtctgattgattcagctaccttttttggtcttcagtactataatggcgagatcatgcgttttgcattcgaacaagctaagtagcaatgatgctcactgggaggtggaggacaagttgctttctctccccaactgttgagtggaggcagcaccagttcttggctcagctgggagggagtggggcaacatgtcaggcctaggcccagtgcagggcttcagatgtggcaactgccattctttcattggatgaggaggctgtatacacatttggaagaaaaagacggataggcaagttggctaagctctaggtgcaggtgtctagaaaccagcactcccattccgcagagctgcctgcttgctttcttgctgcgtgtgaccttccagaccccagctcagtatctgaaattcctcatgctggaggagtggaggatcttctcacacatgttgccagaccctgagatgtctggggaaaatatttccctagaaacactactcatgatactcatgccttccctcccttctttaaccatattctgtcggactgcttgcacacgctcctgtgtgtgttcacagtcctgactccctgtgggagcttgagctccctggaggtgaggaccatgtgtccactccggtcccgaccctgggtgtgactgagagcatggccttccaggaggaacgacttttcaatcattgttgcatttggcaccctagagggttagggctggagggagatcaccttttctggcttctcttctttccagttgagttttgttggtctaagctcacatctggatattggtgtgatggcactcactgctgatgcccagccaggctgctgggaagggaaccatgggacctgatgggcatgcgttattgcacaggggttgattttggggagctttcggtcatgccttttgggcatcatgatgagtgttatcgcactgaggttgctattccagctggactccacaccacctggtcgtaggtgcacatatgcagagtgtgctgcggtgcatgcaggcggggctcctggaggagttatgggcagcatggacagtcagggcaccctggctgctccagacatcgagggaggcaggatcatggcgcttagcagaggcagcagcgtgagcagagaaaagtgcagacgtaggaagcagttgggtctcactgggtcatatcaggggtgggtacagtgaggggtgagggatgattctggggaggtaggcagaggcaccaggatagagtggctgataacctgggctcccgggcaggttgctttggtttgaactgtggctctgctcctgccttgcagataatctcaggtaagatacttgagctctatggacttcagcttcctcatcagtcaaatgaagataatggtagttcttcccttcccttccctccttccccgcatccccccctcccctttgcttcccttccctccttgcccccttcccctccctccttcccccttcccttcccctcctcttcccttccctttctttcatttctttttcttttgacagacactcattctgtcacccaggctggcgtgcagtggcgtgatctcagctcactgcaacctccatctcccaggttcaagtgattctcctgcctcaacctcccgagtagctgggcctacaggcatgcaccaccatgcctggctaatttttttgtatttttattattttattttgtttttatttttatttcttttgagacggaatctcactctgtcatccaggctggagtatagtggtgcgatcttggctcactgcaacctctgcctcccgggttcaagcgattctcttgcctcagccttcccagtagctgggattacagacacacgccaccacgcctggctaatttttatatttagtagagacggggtttcattcaggtgaactgtccacctcggcctcccagagtgctgggattacaagtgtgagccagtgcgcccagcctagtactcattttataaagggagtgttggcattgaatctgtttatccattaaaacatttggcacatttcctagtgcatagtaagtacttacacataaggcattaccttattacgagcaaggccaggtattgtggccccatcatcccagcagcctgctcatgctagactagagagaggcaggggctgctgctggtgggggtgagagatgatgcgggcttgagccaggagttaggtatgggcaggagaggctgtatacgggggacattcaggtgataaaatggacacacatcagggattggcaggacatggcggggtggattttggttcctgacttgtgtggctgtggatggagggaagagtggcaggcccatgcggagttccacctggactcgctgaggctgtgggcctgtgctgcacggaggcccaggagaccatgcctagctgtccagccaagtctgagctagagacagagacatggctgttagtaccaggcaggggagaagacagccacagaatgtcagcagccactcaaggcatgatcctgtgggagaggaaattgggccattgctgaattctgcatcccagcgtctgagggatgggaaaatgcagagctgttcacagaagagcctgaagaggaagaaggaagaaggatgggtggcagaaaccaaggcattgtccagaaaagatatacacgattaatagcagggagacccagcaggagaaatgtgaaaaatagcccctgaatttggcaatgtggatttgttgacgacttaggaaatttttaggggaagtttctatagagtttatgggcagaagccaaattatgtgctgaggagccactggggtacagtgagcagcagatgcagtccctcttttgtgaagtttggttgtaagcattgggagagaatgagtcaaagatgaggtgtggctctcgtgcatctccgtgtccccactgcctggagccgccctggcttgtgggggtggtcgctgtgtttgctgagtacatgtgggtgctgggtgacttctccccatttgtctgccacatattttaataaaagctacacagcatagagattttactccttctaaactttttgtatcttgtcttcacgaacgagttaaattagcaattcttttattaggtgagatatttttagtttctctaaaaatttctcctcctttccatttgttaattaatgctaaaccttctttttaaaatatagtttgtaagtcagttctctttttacaactctcttcttgctcctggagttaataggcttttgcattgaccttatccatgtttggagacctgaatgaataattctattctgagtcccctcccctcccccttatctcccttgaaaggcaatttattgaaacaaaggctacaataactattgggaaatctggatgtattctgaaggtatagtcaggctgaactgatttctggactcagacgtttccctagatgctggctgccatgtgagatgcaccgcacagcgttcccctgtctggtccatctgcccgccaccctctccgtttcccaccaaagtcattcattcagcgcttcattcagttattcattatttcattcggcactcagatagcagcagacttggaattgattcgctttggtggaaaatggcaataccatccagaaaactggacacagaatctctgctccatgtccggcagctactgttgttttctgctgaatgctgactaggcccaggactgcaggctaggttatgggcattgggagagactagtccctcacttcaaggcactcacagcccaagttagaaactcgaggaatttggctttgaaagtcaccgtgaggcagaccaagctgctgtgcttctggagctgagggttgatggccctggagtgggggctgtggagtgggtagcagctctgcacagggctggcgggactggtggttggcaagccctctgcgtgcatagctgccaccttcttgcaggaactgggcaggtctccagagctgaaagagtgtggactatgtttttaaaaaattattttaaaaaattgtggtagaatacaaataatgtaaaatttaccattgtaataatttctttttttttgagacagggtcttgctctgttgcccagactggagtatggtggtgcaattatagctaactacagtcttgaactcctgggctcaagcaatcctcccacctcagtctcccaagtatctaggactacaagtgtgtgccaccatgcctggctaattaaaaaaatattttcttgtagagatgaggtcttagcctattgcccaggctggtctcaaactcctggactgaagcaattcttgtgcctcagcctcccaaagtgctgggaacacagcatgagccactgtgccggcccctgtaaccatttttaagtgaggagttcagcggcaagaagcgcattcacattgctgtgcaaccatgaccaccatccacctcacagagcttcatgcttttgagtctgccctcttcccctcaactgaattattttgcagcgtggacaggcgatatagtttgttgatctttcattcatttatttaatacttactgagcacctattatgtattaagcactggacttagttctggaaatacagatcaaataagataggtactgtccttaaggcactcagtgtaatcagcagatcaataaaggaagcagtactggcctaggttagagtacgtagaaaagccttccacgcaagcagcatgtggagaagcagggggctgacaccacgtgctggtttggggcaaacacgagcagttcagtagggccggagcctaggcatgaggctgagtgtgagttcagggagtggcaggaggggagggaagaagcagggtggcaggctgtggctgtcccctgaatcactcattcttgaaagagaaacctcagtatttcactcattctcagtttcgcctggattctctcggtacagctcagtataatttacagaaatagagtggtaagccggaaactcaaggcagacagatagcgtcacagctcaggactagtgtcctaaccggtctgctggggctgctgcgggcagctgtgtccacagaggcaccttcagggaaagacagctcagggctcctctctgccggacactcgggcttggctgcgggaggctgcccgtctgcctgcaaccaggcctctttgtgtgtgtctctgcaccatgccgctgctctgggtatcctggtggcctgctctgcatctgtagcgccctgcccccttgccctttctgcctttctctccttccctcccattctcccctctcattgcccaaatctagttgctgagccattgccgtgcctctcttgtggccctgtgatatgctggaatgaacagttgtgcagatcgggcatccctaacttgaaatccaaaatgctgccaaatccgaaactttttgagcacttgcatgacgccacaagtggaaaattccacacctgacttcatgggatgggtcacagtcaaaatgcagtcaagactttgtttcagacaccagattatcaaaagtatcatatacagttaccttcaggctatgtggataaggtatatatgaaacataaatgtatttcatgtttagacttgggtcccatcccaaagatagctcattatgtatatgcagatattccaaaatgcgaaaaaaaaaaaattggagatgtttctggtcctgagcatttcagttaggggatacctgacctgtatctgaagtggaagaccagggagtgaatcttgactcggctgcacgctagctgcgtcatccggggccagcgacttcatctctttgagctgcagcttctacctctgtaaaattggggtgagagttacctcgagtgttgtgtgtatgcgaggtacctggaacacagtaagcacccagcaaatgcctgcaggtgatgtgttctcctcccctactgaagggttgggggagatgggcattcttgctttagatggaaacactgagtcccagcaaactctagggtctgtcagttcttagccatgagacgttttagcaagtcactgactcctccaagcctcaacttcctcatctgtaaaacggataaaaatagccacttctgatgaagtcaggcggttaatttaagcactggaaacattctacgatgcatagcgagtgcttaggaatctcgctcttgtttcagaactcatgataatctggttcactgatatctcctccctttcattgactattaaatagggcagaaactttttttttttcaggaatcttcaagcttcctttttattttatttatttttattatactttaagttctagggtacaagtgcccaacgtgcaggtttcttacataggtatacatgtgccatgttgatgtgctgcacccatcaacttatcatttgcattaggcatttctcctaatgctatccctcccccagccccccaccccccgacaggccctggtgtgtgatgttccccttcctgtgtccatgtcttctcattgttcaattcccacctatgagtgagaacatgcggtgtttggttttctttccttgtgatagtttgctgagaatgatggtttccagcttcatccatgtccctacaaaggacttgaactcatcatttatatggctgcatagtattccatggtgtatatgtgccacgttttctttatctagtctcttattgatggacgtttgggttggttccaagtctttgctgttgtgaatagtgccgcaataaacatacgtgtgcatgtgtctttacagtagcatgatttataatcctttgggtatatacccagtaatgggatcactgggttaaatggtatttctagttctagatccttgagggatcgccacactgtcttcaccaatggttgaactaatttacactcccaccaacagtgtaaaagcgttcctatttctccacatcctctccagcatctgttgtttcctgactttttaatgatcaccattctaactggcgtgagatggtatctcattgtggttttgatttgcatttctctaatgagcagtgatgatgagcgttttttcatgtgtctgttgggtgcataaatgtcttttgagaaatgtctgtttatatcatttgcccacttttggatggggttgtttttttcttataaatttgtttaagttcgttgtagattctgaatattagcctaaatagggcaggaacttctaaaacaggggccgcagactattttccctggcggcgtgaggaagaggaacgtggtcgatgcggtggcaggcgatgtggaacattgcagttcatctgtttggccacacagggctgccctttctcatgaaacagtgctttgcaccactgtgggcaccttacacaaggcctgtttcagaaataggattgagaatttgatttgggttttttttgctcctcttttacatgtaatgctcgattttctttggatttgcagagagacttgacttccttccttactttagctaaatgatttggatgagattcagaagacattctggcattatctatgaaatattgctttatttaaaatgcagtactctctttcttccttgcctaatgtgctgtatttgtggacatgatttggaggtaggtaggtggcagacctttgcagaggagacatcggcagatgtctaaggagttggagagcagtgggatacaggggaaattgcatgggcgatggtcaataattcaacaattacctcctgagggcctgctctgtgcaaggcactattctcagtgtgtgggataaatccatgactggaagaaagaaagattcctgattccgtagagcctgcattctggtaggggtgatagtaaatgtggtaatagatttaggcattttaaatctaaattttctgaagtggaattttaggtattaggtattaagaacaaaagaaaaaggcagaggaagagacttgcaggcttggcggcggcgggcgggggaggttactgtgttgtgggcagcaggacttaggcacccagcctggctctccacttcccgggtccgtccctggcagggaacttccgccaagggcagagactctgtcttacacatgctgcaacttcagtgcctacacttcagcgtctggatgttcataggtgttcttccagtagctgatggatgatggatgaatacatacatgcatctaagggaagtcacttgacattcttgagctctcatttgttaagttgtaaaatcgtgtcaaataagttcttgtttccaactttaggggaagagatgatatgaatccagggtagtgtttggcatatagtagatgctcaagacaatgttacttccattctggggacagcctgcccactgtccacagcaggggagtctgggtggctccggagcacagatgctgctcagcttgcaggactagaatgggaaggttgtagtgatttatcaaatatcgtttactttagaagtaacataattttaaaataaacatttaaatttattaaacatatatgtagttcttattgctgctgtaagagatactataaactcagtggcttaaaacaacacaaatttgttatcttgcagttttggaggccagaggcctcagtaggtgaaacgccttcactcccagcactcttggggagagtctgtctccctgccctcctggcttctgcaggctgcctgcatctcttggcttgtggctccttcctctgcctccagagcttgcagtgttgcacattcagtttcctctgacattcctgcttccttctttccctaataaggacccttgtgattatattgagagcctactaggataagccaggataatcccctcatctcagaatcttcatcttaaccacatctgcagtcccttctgtatgtaaggtcacatttcacaggttcttgggattgggatgtggttatatttgagggggggctgttacttggtctactatcatatacaaaccttttgactaacaatttcatgtcgaagaaaaaaatggatgaatgcaccaagatgtatatattaggttatctgttatagcattatttataataccagggttatcagaagcaacataaatgtccaacaacagggaatgaaattatgacatatgaccattaaaaataaaggtctagaaagactattaacatagaaaaatacctatgacttaagaaataaaaggcaagttataaaacagtgtgaatgatatgatcctgttcttataaaaatatgcatttatatatatgtgcacagaaaaatgtctagaagaatatacaccaagatgttaacaagggttatttctgtgttttgggattataggcaatttttcttctttttgcttttcactgtttcctaatgttttgacagtgaaaatgcattagtcttagaaaaagaaccccctcctttttttttttaaagaaagattactgaatttagtgaaaaagaaaatgtatgatcgaacacagaattggtatctgagagtttcactcattgaaaatgagttggatttttattttaattgcattcttagccccagattggatgacagtccccttgcttagcatctctcatggtgttacatggaatctcattgttctgctcctgaatcttcccagacccctgcactcatttcgtcattcgttgagggtggattggttcctccctcccttctcctccctcccctccacctggtccacagaaagaagagaaggaaggcttttgaatggaaaagggaggcttttgaatggaaaagggaggcttttgaatggaaaagggaggcttttgaatggaaaagggaggcttctgaatggaaaagggaggcttctgaatggaaagggaggcttctgaatggaaaagggaggcttctgaatggaaagggaggcttctgaatggaaagggaggcttctgaatggaaaagggaggcttctgaatggaaagggaggcttctgaatggaaaagggaggcttttgaatggaaaagggaggcttttgaatggaaaagggaggcttttgaatggaaagggaggcttctgaatggaaaagggaggcttttgaatggaaaagggaggcttctgaatggaaaagggaggcttctgaatggaaaagggaggcttctgaatggaaaagggaggcttttgaatggaaaagggaggcttctgaatggaaaagggaggcttctgaatggaaagggaggcttttgaatggaaaagggaggcttctgaatggaaaagggaggcttttgaatggaaagggaggcttttgaatggaaaagggaggcttttgaatggaaagggaggcttttccaatgtttcctgcagcacaatagctttctgctcattttatttgggcctctgcttttttgaagctctccccttcttgcattaaatttttgtcattctgtctgctttcacacctttttattttagcatcttctctgcaatatctccattccacagctcctctgacagccctcatattgtatcagtggcggtactcttttcttcatggttgtaacttagaaacagacgatttttcttcatctctctgagcctgaggctgcatcttctgtttctgcagaggtcatggaggaagcagggctggagctccactgcttcagcagttccattcgaatattacagaactccgaggctcccgctgcagagacaggctatggccagatttctttcaggaatcatgtggtctttctcttgtatgatagaagaaggaaaataaatatgtaattaaaaaataatttgttagtatttctacttgcagtgataataacccaagtttcacagagtacttttgtatccatttttcatttgagcctcgcaggatccccgtgtgggagcattatcattattttcacttttcagagcagaaactgaggctttaagatgttaaatgattgcactgaagttacataactagtgaatgtccaggttgcattgaatgctcccgtcaccttgctcccaggttggtgctgccagatgtctgtgtgtttatcattttcttcaggggatcataggctacacgaagcaggtggtggcgggaggtgttgagcatgcggatggtagcctggtgttgtggtggttctcttctgattcacccagctgtctgcatcgaatgttaccccttcatttagcaaggagtgagctgaggctcagagaggtcaagaagactgtcctcaattatacagctaacatgactggagggagctcgggccccccagtcccaaacctcaccactcccttcccctccatgtgttccttgtgggccataagcaagtgtattgactgttatgcctccccaagcaagttatgcccttgatcgtcagtagtggctctcagataagttattttaaaggtttgcaagtgtctttgaaaaagagagatgatatctttgttttgttagaacataacccctttcccatgaggcattgccaatccatttggcaactgttgcaaaaatcaaattatacattcaattggtttagctatcctgcttttttggacattgatggacagccagggggtcccatgtcaatagacccaaagaaatgtatcttttttggctgaagggttacgtattaaaacaaacgagattgtccttttaatttattaaagagatttcttagagcccgagggttggaggcagcctgcatgatcgcctgtgtgatcatctgcgagctcccctccgttgtaacatggatcttctctgcatctctttcccttgttcccggctttcatgtaacaggtgttcaacgaacactcttgaacatcaggaatctagttgaagctgtagcaaaggcagggctgtgtggtggctgtggcgtcctgcttggtaacagccagtggtgggagcacacgctttttcccgtagctaccacccgcagcttccactcatgggtcctggtccctgcctttggagcctcaccaagtcggccttagcagctcctaatcctgaggcgagggagtctggagtccttctctcctaagcctctctgtctttgagtcaaatggccccggtggagaaacccattgtgatctcctcaccccttttatggtatttaccaatgaaaccttttgtcgttttaacttgtagcccccagaatccacccatcccttgaatacgccttccagtcgtgagatatttattgagcctcggctgagtgccagggatggccactaagaagcctgtccgggtgaaactcacagtccagtaggagaagatactcaacagaggattctaacaggatgccctacatggtatgctaggatactgacaaggcacagtggagcccgcaggagggaactggccattcctacttgagagttacagtgataaagattttgcttaacaaatactttattgagtgccttctctgtgccagccatgtgctggacaatagggacatgatgacatggtgccttcttccatgggtttatagtctgtagacatagtaatttaattcaaatgaggatattacttcaaactgagataaaagctgtgaagaaaagggatgtgatttcataggcaggcctagacaagggtgtaagaccaggtttttctggggagatgaagtgcaagctgagatcagaaggatgagtaatcgttagtgagttgaaaggaagagagggagaatgctcaaagcagaggtggcagagggctaggaggtgggagcagtggtgggggaagaattgaacacacagttttagaggccacagtggggttgggtattattgatcatcagagcaacgggagccttttcaggactgcgcttgaggaggagcaagacaatgagatttgcaccccagctgctggatggggaggccagtgtggaggcggagggggtcagtgaagagactgttgtacaagatgagggaaaacatggtgataacttggaataaagtggatgtggagccagagagaaatgggtggatttcagagacacttgggaagaagaaaaggacatggagagaggtgatgaaatcagtaatggctcacagatttctggcctgggcgttggatggggagtggaatcgtgcttgagctagggcacgtgggaaaggaaaggtgttctctttttattggcagaggtaaggtagaggcgatcatgagtttagtcctagatctggcgagtttagggtgcctttaaaacatccaagcaaagtcgacagctgtataaacaaatctagagctcaaaggtgatgtttgagctgactcttgagaaaatgattgggtggtttccaggtaaatagtagggaagggtgttcaaggcactctgaggcagacggtgtcacataagcaaacgtagaaggcttgaatgagctctgggtgccagttagagcatggggtatgttacaaaagatgcgaatggagagaggtgggctcagggcagatcctggagaatctttgataccctgtgaagaaatttggacttgatcctgaaatgtatctgcggctattgaaaggtttttagcaattgaatgttataatcaaatttgcactttagaaaaatcactgtgctggtcaagtgaaggattgatttgatgagtcattcatttattcattcattcattcaacaatgccatatgtaatatactatacgcaggtgctgtgttaaatgctgtgaaacaaaggtcaataaggcagagacaatgcctttaacgaattgattgtctatggagaaagacagagccataaacataacattagaatatagtatggtaattgtaatgatacacatgtgcacagagtgttgatagcataggagaaaggaagcttacctacattgcatttagggaagttttctaagatgaaatcatgcaatttaaaaagaatgataggggcaaatgaatggtcatagcaattgcattccaagcagaagggacagaaagaacaaatcatggagggaagaagtaacagcgtatgttaggaaatcttaatcaatttgttgccagaagtcaaagggcaaagcaaaactggtgagaaatgaggaggggcctgtgcttggacagtgtcctgtagtctgaggaaaaagctgtgacatcatgagctttgcattttaggaagatcacattaggagctgtggggagaatggatttgcaggcaagagactgagggtatcctttcatgatacaaatcagcaggaaacagaaccaaagtctcattagaaataaaggtgaaattccttaaatggataaaggataactttgaaaaaccctcagctaacatcacacttaatggtaaaaaacaaagggttccctctaaaattaggaataagataggaatgtccactcctgccacttagattcaacattgtgcaaaaaggtaataattgtgttagaaaatgaaataaacagcatccaggttggaaaggaggaagtcaaatcacctcaaaaatagcaaaataattaggaataaacctaacaaaaagaattgcaagacttgtaaactgaccaccataaaaacatcactgaaagaagttaaacaagacctattaatgtaaagacataccatgctcatggaccagaagacttaatattattaagatggcaacatggccgggcgcagtggctcatgcctgtaatcccagcactttgggaggccgaggcgggtggatcacgaggtcaggagatcgagaccatcctggctaacatggtgaaaccccgtctctactaaaaaaaaaaaaatacaaaaaattagccaggcgtggtggcaggcacctgtagtcccatctacttgggaggctgaggcaggagaatggcgtgaacctgggaggcggagcttgcagtgagctgagatcgcaccactgcactccagcctgggtgacagagcaggactccatctcaaaaaaaaaaaaaaaaaaaaggatggcaatattacccaaactgatttacaggttcaatgcattctctatcaaaagctcattttttggtagaaattgacaagctaatcctaagagtcacttttttttttttttttttttttttaaagcttaagttcctgggagaatggcttcatgcacatagttaacttaatgaatagtcaacatgtattagacactatgctgtccgaggcttttttctaatccttttatgtgtgttaactactctttatagggagcctatcagtccacataactaggcgaggaaatgggaaataaccagcccaaggtcatagagctgggaagcaaggagagcagaattgcagccattccggctccccagtgcgtggtcttagcctccatggaatatggctcttttcccagggcaaaagtgaatgccagagcagtgtggggtgtgtcgaggctgaggtgctgagcaggcagttgacatcacatctagaagtaggagagagaactagggttgtggtaaagatttgagtgtcattggcatgaagacagatattgctgtcattgtggggtggagatcactagaatgtcaggtgaggagagcagttagctgatgacggaccttctgggtcacaggaactgaaagagtattatgggttgaatgacattcccaccgcattcctgtgttgaactcttaaccctcagcacctcagaatgtgatcttacatggagagtctttacagaagtcatccaggtaaaatgaggttactagggtgggccctagtccaatgtgcctggtgtcctcatagaaaggggacatttggaggcaggctcacgtacagggagggcacatgggagcctgaagatgccgtctgcaagccaaggagagaggcctctgaggagccaatcctgccgatgtcttgatctgagccttctggtccccaaagctacaaggcaaggaatctgtgttgcttccactgctgggtttgcagcctttatcacagcagccctcccagtctaatacagagcgggaggaaggatgtcccatagggaagctcagcagggtcagagtcaccatgggacggaaccccaggcctgctgtgagtctgagcccggaggcctgagattacagctgctgcctaggggcagctttgatgctgatgccacctgaggctgtgctccccaccagcgctgagttgtgctcctggccccccttgaggagaagtaggggtgtcagataccttccctcgttctttatcccctcccctgctgtcaatctccacttccccatttctgttccggtgcagctgatttttttgaacctaaatgtgggagctagacgagtctctgttagctaaatgtcatcttgctggttttggttctgtgtatcagccagtagaagtcgtttataatttcagctctgctgtctttcaggatagcgttccctacagacctgtggtgtccacagcattgaaacaaacatacttcttttgtccttatttgaagtcactgaggaaaaacaaaaacaagctgcaagacacggtgacagaggggggtggccgagcctggaggctgcgttgagggtcttcctcctcttgcctctgggtccccggacccttgaagctgtgctcatccgatttcttcctaggttcatcttctccccaggcccctgggatgtgggtgctgcccagggtctggttgtcacccatgtgatctttacaccttcctttccctgcgtggatgatctcatctcctctctggttccagctcctgcctgctactatcagtgcccctttggatgaatcctttagtctatttagtatccatcccaaccaactcttgggcttcagtttcctcatctacaaaatgaggataataatacgtacacatgaggttcaatgattaaatgagataattttgtttttttgagacagtgttttgctcgtgttgctcaggctggagtgcagtggcgtgatctcggctcactgcagcctctacctcctgggttcaagcgattcttctgcctcagcctcctgagtagctgggattacaggtgcctgccaccacacctggctaatgttttgtatttttagtagagacagggttttgccatgttggcctggctggtctcgagctcctggcctcaggtaatctgcctgcctcagcctcccaaagtggtgggattacaggtgtgagcaactgcatctggcctaaataagataatagtagagaacttggccacagtgcctagtacatgctaagcccttaagacctgatcaccatcattataaccactgccactgtcatcatgtgacacacatctctcatcagagatggactgcctctatgtccttgctattggatggaggctacaaatgtttgagctctgttctggctgagtaggtctcctggttcctcctcttaccaagtcttgaatcttatgggatttaaatagtgttttacataacacctagacatacgtacatgcatgtatgtatgcatgatatacagagagccacctcacgtaggctccactgggctcgcactcgtacttcatgtgctgcgtcaaggcgagcagacctttcaaggagatgagaaggggattagtaaatatttgcctggaaccgtggatgatgactcacgtacattcgagtcagacagcagccccatgtggtagagattttatcctcatttcacaaatgaggaattgaagccgtcactaatcgcagggaataatattcttttttttttttttgagatggagtcttgctctgtcacttaggctggagtgcaatggcatgatctctctcagctcaccactacctccgcctcctgggctcaagtgattctcctgcctcagcctcctgagtagctgagattacaggcaggtgccaccacacccggctaatttctgtatttttagtagagacagggtttcactgtgttggccaggctagtctcgaactcccgagctcaagtgatccacccaccttggcctcccaaagtgctgggattacagctgtgagccaccacacctggccccggggaataatattctcattcctatttgagagctcaaggatcctgcatttgtttttgaacttcctggtccattggaagtggcttgtcttctaggcccgtgctgaccatgctgctgttgggactcattagtccttgtctgcaggtagaccagagcaatggaacgagatcagagggtgacatctcggatgcctgcaggggcacgcggatgcttgtcctgccacctggaaagctttttcttatgtattagcgccacaggacaaactggtttagcccagcaaagcacacactgaaatgtaaaagccttgtgctcttttttgttttaaagacagtgaacataagaagaaacccacccccaaatgcattagcttcttcaggaagcatcatcaatagaacatggctataaataatggctgtaaattaacaatttgcaatcccaataaagtatgaacagattacaacaacaaatagaaaaactgaacccaagaatgagaataactctatccaagttgttcattatatcattcttgttgtgctgaaaactatgagcttactagtccccaaaatgttttttatgccttctgttttaaggtaggatatgagtctctaaatgaattgcttggcattttctctcatctggagcaaggtagctggaaggcataccggaaaggaaagctttctagggggaagctcatagggtcagggtgagtggggacatgaagctttcactgagatgtgttgggactgtgggatgttggcatgtagccaaaggggttcttggtgccctgagcttcaatgtggactatttatggccttgtggcacattaaaatgactctggacagtgaggatgagatgataaatggacagctctgaagtttctttgcatatagtgagtccatgaaggacactgggaattttcttttctctgacaatggaaaacttggcatgaaaaagagtttagtgtaactaagctaactaagccgagtctagaatgtgggtgtgaaagtcaggtgaaatgtggtttactcccgtgaatgaatgatgaatggaaattagctctgaaaatgtggaataacgaccgagagcatcattttttattaaaatgatctgggtgtttacatacaaaatgttcaggatacatctgactccttctggctgtctgagggctgtccctcctccctgcacacttccctagccctgggcctcatgtcctactcggtgggggcttcccgtgtgcgtgacaagggagcacggagcacaggctccaggaggctagggtgtgtctgcttcactgctgtgcccccggggccagagccagtgcctggcacacagtgggatctcaggaagtgtttctcgagcaggagaataagtgcatggctgccttcccccaccactgagttccagggagaagcccagcacctccgtgtgcctggcacgaggtggcaacgccttagacctgccgggtctggtcacaggctccatgtgcttgtcctgagccgccgccgtgttgctttgctgaggtctctacttcggctccagtgtcatctgtaaattaactctctgtggcttattttgagaatcaagtaaagtaatccatacgaaaatgcttttaaaaccgtgaagtgttattaattgaacactgattaagctgtgtctgtctaccactgtctatcactgtcattatgctcattgaagccagagtgatgttcactgaaacataactgtaatcatgttgctaagttctgatttaggctttgatttctcatcttcttgcgctgaagttatccatgtataataaatattatggctacttatgagaaaggcattgaaacaggacttcttgtctgacacggccagctcacctttccagtgccggccaccgcacctgagtcttcatgccgggaacaaggcctcacctgcggaattgagacgttcgtgagttgtgaagttctgcctgtgtgctaggagcgtttgtgctgccctcactcaacaaaggaattcacttaaatctatcttagagattcatggcattagggttgacccagaggagagatccagacatcgaaagaggttcttgccaatggcagcacttaggctttcctggatttcctgcattggttcacgctaacgtgtgcgttctaagaaggcagaaatagtctaagaaaaccaggaaaaggcaggaacaacaaagtgggtatttggctgttcaatgttgtagggtagagtaaaatatgaaactggaaaatgagaggaggcaataatgtagaaagaaaagaagatgctgctacttttagtggcaaaaactgcagttacttttgcaccaagccaatagtttgaatagaaatgttgacagaaggaaatgaatctttattgagtgcgtgggtaacaggtactttcacatactttttcacatttagttattaaaatcatattggaaaataagtgctcttttccctgcctttttttttttttttggttagaaaactgaggctcatagatattaagtaacttgcccaaggttatagagtttataaaatgacagagcaagtagtttcacagcctggcccatgggacactgtaagaagcttatgagttacattcattatgaaatattagaggcataggaagatgagagactcaggcaagagccatctcattaaggtggaggtcacagttttaaaggaaaatttaaaattcaaattaattacaaaatgtcatagttaagaaaagtcttttaaagtagatgtggtttccaaggttcatgctgttttttttaaaaaatggagatacataaagtggctgaaatagaagttgaattagaaaaaatgtgtatatgcacacaatcacatgcatataccaccctccccacacccagcacgcatggttcccactgacaaattctcctcaaggttgagtgtgggatttagttcctggccaaatgcgacttggaacctattctgagtgggcagataggtgtctgctgtggccactggcatccatgccggggtggcccccacagctgcctcctgcatgtgcagtggcatgtaatgcatttctgaaccaggcagagaagatatttagaaagtccagcatgtagaagaattgagtatctggtgaagaatttattagatatagcctcataaattccttagatatataacatttccaaattctttgtccttgaaaaaagttgattttgaaaatttgactagtttattgaacatatatcagtttgttaattggattgaatcactattatattccaggtattttactaggacctttaatatacactgtcccatgtaaggtaataagtactgagtttaggtgaaagtatgaaaacaggagagatgttgaggatggaattattgaaaaggaattggccttgaattctaaccaagatagctaagtaaggtcaggctttgatttgtccttgccagcaaaaagacttaggcagtaacagaaaacatgtgaaggaagaaaataaaaaatacctctgagttaaaaagtgaggtaaacgtttcatgaaatggaaataaaatccagtatgaaacagttagctaggttcttggtccaaaaagttcaccagtgactaggattttagcatactaaaaaaaaacaaaaacaaaaacaaaaaccccccaaaaaaactaagtgaaatattagcaaatcgaaatctgcccgagataaaataaactatgtcagaaacaagtagagtttatctcagaggtgcaaagatggttctacagcagaacatttcccagtgttacatatatagtagcagattgattgaggaaaaaataatttaaattgttacagaataattcagtaaagttcaccatttatttataataacagctcttttaaaacagactgcaagagagcattattggcttaataaaggatgtctgtcaaaaatctctaggaaacatacttaatgttgaaactctaggcacattgcttttaaagtcttgaacaagacaaggacgtctgccatcaatgcttctgcttggaatttctcagttctagctactgcaatagggaaaaagaggtatattaattagaatggaagaaacaatactgtccttatttgtagatgagaggattgtcagtatggaaaattcaagacaatctatggataaactgttagaattagagaaagaggctgggcgcagtggcttatgcctgtaatcccagcactttgggaggctgaggtgggcggatcacctgaggtcaggagtttgagaccagcctggccaaaatggtgaaaccctgtctctactaaaatacaaaaattagctgggtgtgacggcacacgcctgtaatctcaggtacttgggaggcccctgaggcaggagaatcacatgaacccgtgaggcagaggttgcagtgagcagagatcgcgccactgcattcctgcctgggagacagaatgagactccatctcagaaaaaaaaaagacagagaaagagttcaacaggtttcctctattcaacataaattagtaacattcatctagatccataaaaaccagttagaaaaatacaattaaagctgggtgcggtggctcacacctgtaatcccagcactttgggaggctgaagcaggtggatcacctgaggtcaggagtttgagaccagcctgaccaacatggtgaaaccccgtctctacttaaaatacaagttagctgggtgtggtggcaggtgcctgtaatcccagctactcaggaggctgaggcaggagaatcgcttgaacctgagagatggaggttgcagtgagctgagattgcactgctgcactccagcctgggcaaaagagtgagactccatctaaatgaatgaatgaatgaatgaatgaatgaatgaaaagaaaaatagtctcattcattagccaacagtaccctgaggtaccttgaaaagaacctcatgacgtgtacaagactttatgaagaatattaagaaacaataaacatacaaaatgtaaatgtagacctgatgaaatagcaaaatataccatattcatggattagaagactcaatattttgaagatgtcaacttactctctattgatgaattgcacataactcctggcaaaattccaacaggaatttaaaaatcaacttgagaagtaaatgttagaattcatatactagaagaaggagccaagaatagccaagataaactgaaggatgtggccaagttaaggggtcttggcctattagatattaaggcttataaagcaatagtaattaaaatagtcttatacagattatttatttgacaaatagacaaatgaaagagaatagaaagccccaaatcagatttataggtatagagaagtttgatatgcactatgtcagtaattctaggaagcatctttgttttattcttgaagtacagattcatcttacaatctctggagttttataattgttgtcagccagatggcagaccatacatagttttatgaaaaccttctgataagaattttagaattgatggaatatggaatggcatgggggcattataaatcagtggaagaaaatcagaacttttcataaaagatgctgggacatttggttatgcatatgaaaaaatttgaaatgccactaacaaaatcagcacccggtaggataaatacacaggtatgaatgacaaacatgtttaaaattttagaagataatgtaggagcctgtcttaaagaccatggggtaggaaagagtttcttaagcttggcagataaagcacaaaccaggaaggaaaagattgatcagtttgattctattaaatgtttacaaacttctaagaaggacattatgagcaaaatttacatgcaagttacatgtgttacgcatttttctgtatatatgaaatatcccaaacgaagaaaagttagagaatttccaaaaggggaggagacgtgactgacatatagccatcagaggactggtatgtagactataagagtgagtcccactgatagatcagtgaaagggagtcagggaagtgggcagtgcagctgaagcctgaatgagcagggcacagatcatgctgccagggcccctggcatgaccatgcccagacttctgcccagctgtgctttgattgatggatgcctgtacaccacctggagatgaactatttttgataatgttcttacaaatactaatcagggaaacgcatgctaaccagcacactgtctcagctgcctttattctctgtcctgttcctttctatatttgtgtcccagagctcactgtggagctccagccactcattcactcactccactaacagctgcttttatcctgggtgctgtgctacttggatatgtagtttgggtgatatggtccctgctttccagagggttttaatgtatctgagtagaagagtgagtgagaagaggaagaaaactcacaagttggacactaccaggtgcgaggcatttttcttttactctctgatttattccttatagcagctctctacatttggcatttcattatgcctctttacaaatgaagaaatgaaggtttggagaggctaatttatttaggccagtaaactaataacgtggctaagctgaaattaaagcctgcaactgtctagcttcaagcaccctgatcctatgtggaaaataacccatcttttatgagaaatgtgggtaagatgtccctggagtgtaaaagtgggggaaataggagaagactgcatggaagaagtgggctgtcaacctggcagggctgtgagggtgggaatcagccacctccttgctgggagcagctattcagtccagcctgttgtctccaatgtgaggccactgcaggagcagccttcccagtgagcagggcacatggagcctgccagggccacactgccatgtggacaccggggctgctgcggtgccggcccacaccagcctactgttgcatctggaccagcacatggctgccctttctgttttggaggtgctttttggaatctggcaatgaaagaggaaggtcatcagatgtcacattgtctattgtgtgcctctaatgttcaattcttggcacttggagaaaaaagaaaatgaaaaatctttctgtgcgtgtgcgaatgtgtgcacgagatgccgtgtgtctgaggacatgtcttcaaatgcaagcgtggggagctatttttaggcacctttcctcccaacagtgctgtttaaagattcagctcaggctgctaataggtatatttataaccattctgtcgactgccccagcatgaatgctgctgcagatgatgctattcttggaggcagttgccatggttaccattaacccttttgccttggaagagtctatcagccctgtgctttgttcccccagggtgctcagcagcatttgaatgcataaatgtactctgaaacggaaaccaaaatggagtgcattttatgtttcaacagtgaataaactggacaaatgagtgggcagcactactaattaatattggtcaaggttccccctgcccttaacatatataacagtaaaggtagctaggtagccactgccgcccgccggggtgctgaagtcatcttttgattttgaatatggactaaccagtcccttaagatctgttgttcctgcttcactgcatatgatttctctcatttagcaacttattgattttaaaaatcaaagtatctctttatgaatattcatttgttaactagagcaccactacaacaagctgtgaaactggcatcctttagggcatggtgcagtcctgatttatctagaaggactcatgggtcagtgggttcaaaacaaacagaacagagacatacagtcgtcccctcttatccttgggggtgtgtgttccaagacccccagcagatgcctgaaactgtggatagtactgaaccttatgtgtactgggttttaaaaaaatctgataaccaaggcagctcctaagtgactgatgggtcgagagtgtctacagtgtggatgcgccagataagggcggatgctggtcccaggagggagagagcagggcggtgagagattcatcatgctactcagaaggcactcaatccaaaacttacaaattgtttatttccgctattctccacttaatatttttgaaccacggttgaccacgggcagctgaaaccatgggaagtgaacaggggaaaagggaggacaactatagtctaataagtagacttacgaattccccatgcttttaatgaactctcccatgaggaatgccatgttagaaatgtggttggttctcctgcccacaagttgcttatagttaagtatgttagcatgaagaacaaaataattattataaaaagacagtagaagtgctctgtagaaatgttgaaaagctgccatttggacatctcctcgggattaactatgattagtattgcgagggaaagtagtagagaagtgactggctgaggggaaaactgaccgtgcagcccattggggtggtgattgtagcagaaataaatctctggagggatctagtggaagttgagcctggaaagataacatggcgcttgaccactgaaggccaagagcaccttactgaggaatgactacttactgaggagtcactgcaggtttcggagggaagaactgacttggtccaactttgctttacgaagatagctatgtgggtaatgtggcaagatctgggaggcagaaaggcagtgggacatgagggatttatgggtggaattctgaagtgcatacaattgttctctctaaatcactgtatgggaggatgctttgttgaattgtttcattcgctgattgatgtatagaagacacacttcgatgctcttgttcaatgccagataacaccaagcatactggggaaagcaaggtattaaatatccaggccaaaacaaaaacaaaaaaacccaccgaaaaacccaccaccacacaacaccagtaggaaaacagaagtttcttgctctttagaacttctcacttaatcggaggacatgcatctctggaatgaatagcctatctgaacaagttaaatgtaatttataaacatgcgaaggagtggtttaaggaagccaaagggctgccactgggagctgggatgtctgaattctaagacaaaggagagagccgctcctgattcaatgagtggttcatcaaagactatgggatgagtaagggctacttccaagaagcccttgactggttccctgcccctgcgtgtgctcacccctgcacttgccctcgtgggacacacagctgtttgccactcactgcacacaagcaccccgttgtggtcctgccttcactgggtgtggtcgttgttattcataatgaacatattccactccctcagtaaatggtagctgtttgtttaagaatgaactttttattgaattaaagcataaactcagaaaaatgcacacatcataaggtgacatacagcataacgaaatactgactaccctggcaaaactgcgggcttttgaacgctgttagataaccacctctcagaatgagaaatgcgacatcagcagctctcggagggcctcctgcggtgcccctgcccattcactgtccgttcctccccagggtagcagctgtcccaaacctaataccataggttattttgcctgttttgaacttcacataaatggctttgtacgatgagtactttttttttgtatctggcttttcctcaatgttatgtttttgtatgtggcagtagtttacacatttttcactggactaccgtattcccctgtataatacaccacagtggattcattctgctgttgatgggcctttgggttatttcccatttggcgctgttatataaggatgctggatggatgttttcgtctgtgtctttttggtgcacgtattcacatcgttctgttgggtataacccccgtgtgaaatgctggatcggaaattctgtgtctctctttatgagaacattcctgtgagcaccgtgtagtcaaggtgaaagggatacaaggtgggaggaggacctaactctcccagggagggttttgaggagggtttcacaaaatctgagcaggccgtaaagtagggataggaatgtgccaggccagggatgggacaggctcccggcagtgggaacaggagtggcaggaacccaccattccctgacttgctgtccccctcagccttctgtgcccattggactcttgacttcaaggatcccttacctgtgccatccttcacttctaaatccttagttggctgttctttctagaatgggtgtgatgtggacttctgtgcctaaacctcagagcttccaggtatcgtgcgtggcctactcccaattcgctgagcattaggatgtcattgagtctctgactctgaccgagcacagccggttttctgtgatggttcagccctctgcaccctcagactgcacacctgggtcactgccccaggctgcagacattggccactccctagatcagggttgaccatgctgccgtgtatctgacaccaatccccccattttgtttatctttttaagagaaaaaataccggcaccaacctgtttgtttgcttaccacttgtttccctcttctgaaggccgagcacagcagatgcattcctgctattgtgtatctctgctggtttatactgcgagtggacaaggcagaatgcgcttactgttctgagctcctgtccccatacagggaagcatcaacccagagacagaagctggtctcaccttctgggatcagtcaggccagaactgaaaattaccataaattccagcaagcacatagagggaccgggggatgcagtgagagcacatcacactgagagagaatagaactggcaaagacgctactttagaaagggcctttaggacgtggggcatcctttttacctctcccgagccccttcttaacaaacccggagcccagagagagattgtgtgttaaacatacacacagtgcctaacacatagtttagtacactccaggattagttgctattttatttttacatttatttatttatttatttatgagattggggtctcactctgtcgcccaggctggagtgcagtggtgcaatcttggctcactgcaacctccgcctcccagattcaagtgattcttctgctttagcctcctgagtagctgagattacaggtgtttgcccaccgtgcctggctaatttttgtatttttagcagagatggggtttcaccatgttggtcaggctgatctcaaactcctgaccttaagtgattcacccatctctgcctccccaagtgttgggattacaggcgtgagccagtgcacccggtcagctgctattttaattattgctttaataagatgacagtaatattggcacgtattatgccaatatctcatggagatttgctaataacacatgatatgcttatgtgcacaaatttcagaatcaaacatacctggatttggttttacttattgaaaaattataatcgtatatgtttatggtttacaaagtaaacatacatggatttaaatgctaacctcgttacttggacaaaattcgtgatatccccaaacctcagtgtttcatatataagatagagctgtgaatatctactacgtaggattgtaaacgaaatactgaagcgtgaatcagatgcatctcagattttaaagaaaatgtaaaccattggtggaacgtctagttaaaatgtaaaacctgattcagcaggtgcggggtggggctggtgtgggagatcctgccgcagtggcttgaccccgaccgtcacagtgagtgggcagcgtggggtgaggccgcccagggccggtctgcggtaggcacccaggacgtgctcgccaccatgttatctgccgtggaaagctcactacccgctccagagtgatctggactttggacagcactttggacactcatctctatgatgagtgatcttggacagtcatctctatgatgagatccagcacttactaattacgcagacctccttgagtgccaggtgtggggccaaggtggtcactggagcatgtggtctctgctttggagtcgctggcagcccagtgaggagcaccgactcccaggaagacttgagtgaggggatgcggtgagccctcctggcatactgcatggctttgtctatttgccaattgtggccctgtttcaagttaaaattgtcaggccatggtgggtgtgcattgcccgagccctgtgggtgctggcccttcctttcccctctccccgctttttcctgagaggcttttgccctctcctgctccaccatgctttgggtatcttgtcatttctgtcctgtccagtcctgcagcttagttgggcatttttgtccctcctccttcaaccttgggtttaaattctcttaattaggtgggaagtctgcaaagcacatgcttcctgctttggaatcaggccttcctcagcacccttggtcagctcatgtctctggtcctgtccctctgacttgggcaccctgtccgctcgggctgtacccagggtgtggcacagcctggatctcccactgtcccatcagcctaggcaacttttgcctccctggttcaagtgattctcctgcgtcagcctcccctgttgctgggattacaggcactcacgatcacgcccagctactttttgtatttttagtagagataaggtttcaccgtattggccaggctggtcttgaactcctgacctcaggtgatccaccagcctcggcctcccaaagtgctgggattacaggtgtgagccaccgtgcccagccagactgccctaggttttaagttcctggaggacaagattagagtttgtgactcatttctgtacttctagtgtcacactgttccttgcccatgggtaggtaccgagaagtaaatgcatgtatgtgctcagtaaggccccatgaagatggcactcagacaacaggctctgagcggggagtttgtcctgcttgtgcctgccaggcagccgggcctcgtgcccctgtcctcctgtgtgggctcctgctgcttcagggaggtcacacccggatcccctgatggtcacctggttttgtgtggctttgctttttccagtggaacctgaaatatccataccaggtccttcccacagccctctcctctgcccactggtccctaagccaccactgcccttgtctgttttttttttaagcctttgcagggcgtggggaatgtacctacctccctctccaaatcactggaaacataacagatgtgaaaatggagagagaaatccatttcctttttttctccccatgccccactgtgatgtggtaatttgtaatttcatcttttcctgattggagtttagtaatttgtcacttttgttttatcatcatgatgcatctttctaaaacacagagctgactctgttacgcttttctatatagaaggaaagccaggctcccaccaccttatagcagcaatccctgaaccaaccactgcttcttaactcagagcacagcgactgctacctggttttgttctctcttttaaaaaattgtattgcgacatttgtatgtaatttcaaccattttcacatgtgcaagccagtggcattaactgcattcaccatgttatgcaactcttgccaccacttccagaagttttccatcaccccaaatagaagctctgtatccacgaagcaataattcctcgttcttccatactcctagcacctggtaacctctaatctactttctgtctctatggatttgcctattctagatgattcagtatgtggaattatacagtatttgtccttttgtgcctggcttatttcacctggtataatgttgttaaagttcattcatgttgtggcatatgtcaaaatttccttccctttatggctgaataatattccattgtgtatatatagcacattttgtttatccgtttatgcttggtttgcttttgccttttggctattgtgactaatgctgctatgagtattgggataaattatatgtttgaatccctgaggtatacatctgggagtggagtttctatgacttacgaggattctatgcttagtttttggaggaactaccaaaagtttccacattggttgcaccattttcactcccactagcaatgcacaagggtttcaatttctcgacatccccccagcacttgttattttctgtttctctaattactgccatgctactaggtgggaagtgttatctcatcgtgcttttgatttgcatttccttgatgactagtaatgttcagtattttttcatgtgcttattggccatttttatatcttctttgaagaaaaatctatctaaggcctttgcccatttttaatatgggttattttttgtcattgagttgtgggagttctttagacattctgaatattaaacccttatcagatacatgatttgcaaatattttctcccgttctgtagactatctttttattttcttgataatatcctttgattcaccaaagtttgaaattttgatcaagtccaatatatctgttttgtttcttcatttgcttgtgttattgacaagtctaggtcatgaagatttatttgtttttcttctgaaagttttatggttttaccccttacatttaggaaactgatactgtttgagttaatttatatatatggggtgaggtaggggtcaacttcattcctttgcatgtggaactccagttgtaccagtaatatttggtgaagagactattatttcctcattgcataaacttgacacctttgttgaaaatcgattggctggccaagcatggtggctcacacctgtaatcccagcactttgggaggctgagatgggtggatcacaaggtcaggagttcgagaccagcctggctgacatggtgaaaccccgtctctactaaaaacacaaaaattagctgggcacggtgacaagcacctgtaatcccactactcgggaggctgaggcaggagaatcgcttgaactcaggaggcggaggttgcagtgagtcaagatcacaccacagcattctagcctgggtgacagagcaagactctgccccggaaaagaaaaaaaaaaagaagacaatcaattggctatagaagtatgagtttatttcttgactctcaatcttattctcttggtctgtgtgtctattattatgtcagaaccacaatgtttgtattaccgtggctttgtagatacttttgaaatcaggacatgtgagtcctctaactttgttctttttttcaatattgtttttgctatttggggtccttttgcaattctgtgagaaattgagggtcattttttccatttctgaaaaaataagctgttggaattttgaaagggattgagttgaatctttgttttgggtagtattggcatcttaacaataataaatctagtatccatgaacgtgggatgtctgccatttatttaggtcatccttttttttttcaagcaatgttttgtaatttgtagtgtacaagtcttttacctctttggttaaatttattcctaggtattattccatatactattttaaatggaattgctttctaaattttcttttcagattattcattgctggtgtgtagaaatacaacagatttttgtgtgctgaatttgtatcttgcaacttacctgaatttattagctctagtagctttcttgtgtgttctttgagattttctaatgtaggctcatgtcacctgtgaatacagagagttttacttcttcctttctaatttggatgccttttatttctttttgttgtttaattgctctgaggaagactctgattcgggattgaatagcagtggggaaagcaggcatgctgtcctgttcctgatcttaggggaagctttcagtctttctctgttgagtatgatgttagctgtgggtttttcatagataccctttatcatgttgaggagttcccttctgtttctgttttgctggttggatttttatgttttatcgtgaaaggatgttgaattttgtcaatatttttcctgcatcaggagagatgatcatgtggatcttttccattatattaatatggtacatcacattgatttttaaaaaatgttgaactatccttacgttctaggaataaatcccccttggtcatggtacatagtccttttagtttactgttcagtttggcttcctagtattttattgagggttttgcatcggtatccatcaggaagactggtagctttcctcttttcttctgatgtctttggcttgatcttgtttcagggtgatgctgctggccttacagaatgtgtttagaagcattccttcctcttatattttttgagagtttaacaaggtttggttttaattctttaaatgttgggtcagattttctagtgaagccatctagtccttgacttcctggtagggaggtttcagatgacccatcccacttgtagttccttgggtgcccatggcctctcttgcgtgctgccaagccttagcacttgctgctgtgtccaccatcaaggatttctcccctttcctgtttcctcctcctcctcctcctcctccgacttggcctcctcttggaaggttattctgagcctcccacttgcacctttcccaggcattctgcatgaccctgtcctcatcagcgtcttgtcattgtcttgtgtcctatctctcttgcccactagaccgaggtctccagggctaaggtcttttcggttcacttggtgagtgcttgttggagggattaggaggccccgccgtctgcgtggggactgctgtttgttctgtgtttgtgtcaagctctgcgttggtgggcttgatggagtgaagctgcagtggtgaaagtaaagccctaatctcatttctcagtgactcacagtggaaacagggaagatgatggcagtctactgaggctgaggtttgggtgataataaaataatatgagagaaaatcatgctgttttacaaacgcctctggcaaataaaaagacccgtgggtgtcaagattagaaatgaagtcttacgtggtttcggcccctttttaatggccttttcctcttctgagtataaacacttcttacaaagggaaagtccaaggagcacgttgttttggaggcaccaacttctgcagcctttggacggaggactgtgctgtgctggaccctgggtgcagagatgagaaagtccccatcagtcactacccctatttagtttccaggcaacagggtcttgattggggatggctgtcttggcatagcatggaaggtgacagcagaggtgtgaccagggaggatccggagagcagggactatgtggccttcagggcaagctggaattctgtggctgaaggggtgagagatgtcctcattggggggccgactgtgaaagttcatgctgcatccagtaaggtgcagggacagcggtcccctcggtcccctgggaagagggctgactccaaacccttctaggatgtgaggctggagccaactgtaagctttaggccagattaggaagagctttggtggactttttgctaaaccttgaagtcggtgagatgttactgaatgtgtgtgagtgaggagttgtctgggagccctggattgtctggatggagaggaccaccaggcgactcgccctcaagcctttgttccctcaaggttctttgtgaaagaacaggtcttgggtttgaaccctgaggggagaaaaagtcagtgcttcatttttcggtggcagggttgtctaggacggggccgtctaggagaagcggtgtgcagtttccaccacagagccgcaccccttggcagccaggaggcctggcgcatcactgagcctctgagcctggcattctctggatgtagttggaggttcgtgctcatctcttttcttcctcagggggctgttgcaggggccagatgaactatgtctatgagaaagccttataagcagctaacactggacagatggtgatcgtgttaaaattcaaagcactttttagcagatactctcaatacagttgtgtagtatagtttagtgtaatgtttctgcagggaaatgtggcagtcctttatgtatcaagaaccttgaagaagtctgtaccctattacccagtgattccacttttactgatataccctaaagaacaaaacctgacgtgcatatactgatgtgtattgcagtgttctttatcacaaaggagaaattggaaacaatctaaatttgaaataatagaggattggttaattgaataattgaacacctttacaatggaataaaatgtagccactgagaaagttttaaaagtacccttttaaaatatctttacagtataatttcagcttattaaaaatctattcatcgcaaaagcattggaagtctgcgtatggaattaatgacagttacctcagtgatgagaataatagattattttaattttctgtcctatttcctaaatgttttacactgaacatttattgtgcttggcaatttttctgtgtgatttttaaaaattttgacgcaatcccatacttacagaagattgaagcatagtacaaagaaccccctcagtccgctgagctgttaacccgatgccctgtcacccccaagcactttcctgtgtgtttccaaacaacacacagcattctctgtaccccacagcataaccatcaaaataaggagatggccatccggtcctcagaccctgttcacatttgccagctgtcccaggagtggcttttagatgaaggggtcccacttagaatcatctgattcttttagcctcagtctgtgatctggagcattcctcaggctttctttaatgttcatgaccttgatatttttcaagattataattcagttatttcggaggatgcccctcaagttggctttgatgctacctcatgacaagagtcaggttctgtaatttggacaggaatactacagaatgatgccatgttcccatcgtacctatcaggtggttcatcccagttctgacagtgtcacaatgatcacttgagtaaggtggtgtctgcccggcctctccactgtgaagttactctgaaatttggaagcatttctacgaaggtgctgtaaagtgatgtaaagatcctgttctttatcagccttccggtctgtgcatccctttcttcacagcactatgaattcacagtctcattctgtttaatggtgatgatccactccagttctttattttgatacccagattgcctcagacttgaccagtgggcgcccctcaagctgcctgtgtccttctgacacgtgggcatcactctttgagttcttccttgctttctggcgtgagatgctccaggctaacgttgtcctttccctgctccagccctgcaatcagtcatctctccaggggccctgattcctccgaagccacagttggggcctgaagtgtgcatgtagctgattcggatgccactgctttcaggccctctcagtgaataggtcatgtatgtatgtgcgtgtgcatgcgtacacgtgcatttacatttctattcgtctatccatctctatacatcgcaaaacatgagttctcagagatccctccaattccgatccggtatcactggctttattttaattttctctctctgtgtttgtaactcccttttctcttggggagaaagctggctctcaccataacttccttttctctcggggagaaagctggctctcaccatccttccattgctgacttaggtgttcaatcctcctgtgtgtacccagtctcccatcgcctctactgccccctgccccctgtgtggacatcctgcccacgcagctcgggttccatcccccgtgccggctcaccccgtgtgtagacaccctttagacccctccttggctccgatgccctgggccagcttgcccctccctgggatcgcttcttctccctacttgggctcttcacatggcctgtttgggctccacctctaggaccccgtaccctgctcaggccctgaggtctcacacacggatgtccacttcatcctcttggggcttcgactctcccctgggcatcctcctcagtcggtgccgcctcaccttgcaaggggccagacacacccgagccagcctcccctcctcacggatacctgcctgccctgcctcacccaggaacctcaggcctgccttgttcagaaaggagatggacaccaatctgttgttaaagaaacagatttaagtagggaattagcatatgctttagaggtgactggacgcttagaaagaaggactttgcttctgctaactgaaaatccccatgaaaatcaacctcattggcagagcagcagatctgtaggagaggagtcttctttttttttatatatatatatatatatatatgtatatatatatatatttttattatagtttaagttctcgggtacatgtgcacaacgtgcaggtttgttaaatatgtgagaggagtcttaatggggagcttgaatgactgtgaagttgtctgctttcgaaaggaagcagctttaagatctcccatgtgcaggccttttcctaggactgacccatcgccaggagggtgtaactgaggcagaatggctaggtggaaagagcagtggttttgcagctggacagagctggctccccatctcggctccgccatttactggcgaaatcatgccgaccccttgggagtcccagttttctcttgaaaagtgtagcactgataatccccaccccacgggatcattttgaggatctgccgtacaaggagcacagtgggtattcaattagtgccagtttcctgccttcacttctctcaaagagaatgaatttgcctcacccagacttttttggaaaaattggacacagtttataccctagcctttgtccccacccttggcctttagccgctcattaacctcagaccattagtcactgcttcttgtatgcagcctccattctggctgggcacagggtgacccactgtggtctctctgtgagcaccagccatctcccatggatggcttgcttacgccagagctggagctggtttccatgaaaacttgtgtgtgtgtgtttgtgtatttttctttttttctttgctccaaagtaaatgaaaccacacttgggctgtctcaccaccgagcataattgtgatggaactgttctatggtgatctgaattaggctgcaactaaagagccacaggaaagtaagataaacatttgttgcctttggtattgataaaaacaaattaacacaattgtaaattctaacttttgtatatgccattgtctgtgctgtctttgtttttggctgaaaagccaatttagctcttcaccatgaatcattttagtaaggcaagtagatgctatctctgttggtttataactcaccctgcaaaagccaccacactgcttacactttcttaatacaggtgaatttatgctttagaatttatgacttcaggttaatctagtaaactcactttagctcttatattcttggggactcatttttggcaagaaagaagctggtagagcaacacaaatttgtaaactgagacttttagtgtcatggttttagtctcatgctagtttctgtataggagcaatgcttttggatatggtagctatttcctgtgatgggaatgcctttgcaatcaagaacgtatctcctttaatgtttgttgataaaatgaaattatttctggaatatgtatttttgttatcagtgaaatctgtggtttataaaaaaccctgcatccttaacatgattctaaatcaaggaggccaagagatacttgtttctttagctccgtggatatttcctgagggcctgctccatgccaggtaccaaccttactgctgggatagggtcatggatgaagcatggccactgtcctcaagatgcttagcatctgattgaagagagctgtatgataatgcgttttatagggtatgatgtatgattaaaatcaccaaaaataaatttaattctgtttcttcctactctaacatagttggttgtgtatgttcatgattctgttcattcatccattcatttgttcagtcagtggataaatatgtcctgagcccctgtccatcacgcaggtaggcttggtgcatgcctcacagagcttctatccagatccttgtttgttccaaacctgcatgtttgagagaaacaacgattagacatctcctttgagccaagtgccatgctaaatgcctttttgcacttgaccatcttaatttccagagcccattgagaggagggtttctctctcttggtttgaaagtgaagaagcggtgtctccagatacatacgttagagatgcccagacatggctgctggagaaaggtagactccagttccagacccagctcttctctgcctcgtctatcacccagccccatctgggaaaggatcgggtgaggatgagagctcatggctgtcagtggtgtgccatgaagctgcgaacgcacaattagtgatgtgttcagtgtcgtccaaatactgagggtcacagcgcccgtgagtccactccctgcccccacacctgccacgctaggcccaccctgcaggatttcaaggcttcccttccacatctctgcctttgtggggcctggagatgagatttggtaaagttagccagactgagctacttctcgctacttatgctctggctaaatacactgtcctaattaaatgtttctttttcatttaaaattccacagtgctgtaattcaaattagaaagctgctgttgtgacagatgatgtcatttaatttcaggatcattgtgctgcttgtattcaactgcagacgaaattggaccctatctcagagcttttatcgctatcaaatatgatgttcttacgagtgtctgatgaacttctcgtgacggggtgttcgaattcccttccaccgacgttccttgagagaactccttgacatgggactggggggctgattcgttaacgtctttgtttggaacctggtgcctgagagtctggttctgaaatggacctgtcggttttcctctgtctagtgtctcacggttaagatgctccagatggggcccaccgtgtctcctcttccagcctggtcctctccctccctggccatctcagtggataccccgcattggagagccaggagaagagctaagagcagctttgcccctcatctggtttcctccgagtctgcttgacaatctctttcaaatcaactttactaaggaagaagttacgtaccgcaaaatgccctcatttgaattgtgtaaagaatgagatttgacaggcttggtgctgtggctcatgcctgtaatcccagcactttgggaggccgaggctggcggatcacaaagtcaagagatcgagactatcctggctaacacggtgaaattaacaccacttcttcactttcaaaccaagagagagaaaccctcctctaaatgggctctggaaattaaagatggtcaagtgcaaaaaggcatttagcgtggcacttggctcaaaggagatgtctaatcgttgtttctctcaaacatgcaggtttggaacaaacaaggatctggacatgaacccgtctcactaaagtacaaaaaaattagctgggtgtggtggcacgcacctgtaatcccagctactcaggaggctgaggcaggagaatggcatgaacccgggaggtggagcttgtggtgagccgagatcgcgccactgcactccagcctgggtgacagagcgaggctccatctcaaaaaaaaaaaaaaaaaaaaaaaagaatgagattcgataaatgaacatgcctaagtcctagaatgttcccgtcacccacaggtcccctgcacaccttccccttgctgccattcccggacagacactgccatgctttctgaaatgacagatgacgcgctttccagagttccatgccagttagcaatgacctcataaacctgagttgaccccgtggtctgcgtgcccctgctctgtgtcagtgactaggttctcgtcgatgcttcctgggtcaccgcagccgtctgctgagcagcactcctttcggtgcctcccctatttccagagtgatctttcccagaaacaacccagcttggtggttccctccgagtgcccctgggccagttacctttgaggcccttagggaggccgtgtcccgcccccgagctctgggtgggcctctgcctgctgacctcggctgctgcatcaccatcggcccagctcctgctactgtcccttgcctcacttcccctcgcagccccgtgaggaggtgggcaggggatgttgccatctctctttgaagaatgtgaagagcagtgtccgggttttatctgaggccacctggttgggggacagtgacaccctgcaatttttatcaagaacttgccttcagggtatggggctttctttccagaaatggcaacattgaaacccaaaggtcttctttttaagctctacaaaatatgaaactacgtattaatatttcctagagccaaataagtctcttttctcccattgatcacccctactatggcagattctctgattactgccaggtatatgctgccctccctgtgggagattatacccccacctcactgccttcagacttcgagagtgattttggtcctcccctcggagggtcctcccccgcgagggtcttcccctctgagggtcttcctgtgaggggctgtgcttccctgcctgcgtggtgtcaggcttgggtttgtgatttgctttggcccctgtgaatggccggggcacatggtagatgcagtaatgcccccccgcccaaagatgtccacgtcccgatgctcagaccttgtgtgtcagaccttgtgtacatgtgacctgacgtagccaaagggactttgctgatgtgatgaagttaaggaccttgagaaggggaggcgatcctggatcatccagatgggcccagtgtcatcaccagggtccttccaagagggaggtagggctgggcagagagaggggtaggggctgtgactatggaagccagaggctggggcaatgcagcaaggggccacagccagggagagcaggcagcctccagaaactggaaggggctcaggcagagccccccctgcaccctaccccaggaacgcagccctggagacatgctggtgtgcaggcttctgacctctagaactgggagattatcagtttgtgttgttttaagccactaaatatgtgatcatttgtcataacagcaataggaacctaatacaggggcacatgtaaactgctgagcagaagtttaaataaccagctgggggctatggccatctttcttttgcctccagcataaggtgagcaaagtcctggtggggacacttgctgcttcagccagggtccagagtgagacagacatggaccagagcctgtccagtgaagaaatgaaccttggttgtaagccactgagatttggaggctgcttgttaccacagcataacctagcctctcctgatggacccatttcacctgcactcctcacaaagaactcaagacttccattcattcatcagatactttgcagtgtcctttgatggccaggcactgtttggcccctagtatactatcagtaacaaacagacaccgattgttcttactcttgtggagcttatagttttcctgggaagacagaaaataaataagcaacagaagactatgcaactataatttttgatgagtgatgtgcgagaagtacatggggcatgatggaataaataaggtgcagtggggtgagaagaacccagctgtgcagttggggtggggctcgtggctggagaggaagcagtatgtcagtaccccagatgcccatggcagagtgggtgtggccgggctgtgagggcagggcagggagagcagatgtgaccagtccagagctggcaagtctgggttctgcaaggccatgcacgtgcaggggtctgaggtctgcatttgagcaagaggcagcaggtgccagggaagggtttttcagcaggaaagtgaaatgtgcaatttcacttaaaaacagatccacttgggagaatgtgtgcaagatgcaagcgtggcagtgggaggtccggctggagcacttgtgagcttgggtgagagtggggtgtcatggcggacgtgactgtgggaagggctctgaagaggggtcggggacagtgaccagcaacaaggtggatggtgtggccggttactgagatggggaagcctggaagaggatcagatttaaaggggtaagtaagaaatgtggttgcagaggcagtaatttgaggtatctgtgtgacatccaaacagagatgtcagattggcagctgtgtgggtgcatcttgctcaacacattaaataaaaataaaaatgtataggacccagtagcacttttcgatgtgcacatccagcaaacattaagtctatgcaaactgtgaataacctcgtgctcgggatggctgtggatcccatgtttctgaccccagcctcacaaaatcatcggggcccttcaagatgggctcaggtgccccttctcgagagaggcttcctgagcctcatggctgagtcacctgcctcccatctgtgctgcacacttgccttgcagcatggatcccctcctcagacacctgaggcagctttgttcctctctgccgctccctactcattacccagtctttgaggtacagaagaggcattgagttctttgtgttggacttagatatacacttaaaaaaatttaattctcacagaaacatcaggatgtaggcattatttctcttagaaagggaaaactaaggcttagaaagcttttgtctcttaacccaagtcacagaggtaataaatagcagatataggcactgaactggatctaagacttttgttcactcctactatatgcaatagttatctattgctttctaacaacttgtcacaaatgtagtggcctagaacaacatatattaattagcacacagtttctatgggtcaggagtccaggcatggctcagctgggtcagacaagctgcttagagtctgacaaggctgaagtcaaggtgttggccagagctgcagtctcatctgaggcccaactggggttggatctgtttctaagctcccttcagttgttggtggaattcagttatttgtagtcataggagtgagagctttggtttctagctggctgttggctgaagaatgcacctcagcatctagaggccacctgcagatccttgactcattgaagtttcccagcatgactgtttgcatcctcaaagacagtgtaggagggagagagggagggagaaagggagagagagagagagagagagagagagaaagaaagaaagaaagagatggactccagcaacatgagcctacagtctcatgtaatgtaatcatagatgagtaatcacataggtcctaccacctctgctttaagcaagtcacaggacccacccacaccctcaaggggagaggatcacatagtagtatgaacaccagagggtagggatcatgggacccctttaagagcctgccctacagacacacgactctgctgtatttatcactttcacccctactggaaggagcacagagctctccagaggagccctttaataagtgatggtgaagtggaagccactgatttttcatcaaagggcctatagttgagtttacaataggatagacatgcaattttgcctttggtaatgacttcacagtgtgcctataattataacattggcaggaaaatctaggtcatctctctgaatccactctgtcctctctggggcttctgttgctgctgctgcctgggccctgccacaggcctgcaccacttctcccctgggtcactgcagcactttctgccctggccttcctgcctcttccttactgccagagtatcttaagtgacaatctgactgtgatttccccatggctctgaaataaaactcaaactccttagataaaccaagttctccatcgtcttttcctttcttgcttctccaaccctgacccttaacactgtccctcttgcatctcaaggtccaacaacacccaggcccatggatgttctgatcacactgttctgtctcaggcctttgcacccactgtgttctctccctaaaaatctcctttcatccccttcctcacttaaatttcccacataaatatgtggcttagtgaattcctacttttctttcagggttactcctcagtggaggcatccctgatatcctgagggaaagttgatagagagctcttagagaacccaacatcttgcctagtgattgggttttgttccttgacccttaaaaaatttcacctctgtattctcagaaacttccacagtatttgttgatggcatatgcccctcacatcttgattgaaagggtggatggatggttgaatggatgatgttggatggatggctgttgaatggatggatggatgaatgaatgaatgtatagatgttggatgaatggatggatgaatgttggatggatggatggatggatgatggatggatggatggatgttagatggatgaatggatggatggatgttggatggatgaatgaatggatggatgttggatggatgaatgaatggatggatggatgttggatggatggatggacggttgttggatggatgttggatggatggatggatggatgttggatggatgggtggatggatgaatggatggatggatggatgttggatgttggacggatggatggatgttggatgatggatggatggatgaatggatggatggatgttggatggatggatggatgttggatagatggatgaatggttgttggatggatagatggaggctagatggatgagagtattgcagaaaagctgtatggaagtgaaaatcttaaaaacaaaatctatttaaaattccttcctgggagaagcactctatattgtattaattaactcagcttgctaatcagggaaatgctaacgatctctccttccagttgctgaggagaggtgctggaagagcacccgcctcattcatcatttcagcttggtgctggctctgtttatttttctggtaaataaggaaaagaaattacaccatactttgagctgaaggtattttctgttggagttcaaagctgccttaatttctatcttgtggatgcatggtatacgttatctaactcaaggctggggctgtgtcacctcttatctgtcacagtgcctagaccagtgctgaacacatacatgccaaacacccaggggttcaccttaagaaataaatcctaaaggatgtgctatgtcagtttatcttcattcactttctcaacatctactgaccacccattatgtgaaactgtggcatcctggaatctgaatgggactaagaagcaaggaattcagtcttgccaagggtactgagatgtgtatagaaggaagtaggttagagggagatggagggaaatactttgagaagcccacaaacagttctacaggagcccaggtgagaggaaggggggttcctttctggtttagaggaactttgaaggttttaatagagaaggtgacatttgagagaccccatggtatgaggtagaataatttggagttaaagacctggttaaattccctggtttatttctcagctgagccactctgaaaatattgcgtgacctcttcttacctcagtttttaaccccaaagatgggaatgttactatgtactcaagtgtgtatatgtgacggtctaattacttaataggttatggaaatgccttaagggattacattcatcttcattaggttgtggaagcccttagagggtggctgggagttgtacatgaagaagaaagcactttacagccagaaacttgcggggtgagtttctccaaaactcacggggtgaggcgtggagtgaggatgcccctggtcagtggtgctggcggcgtggtggggacttgcgggaaagggggttgggaggaactgcttgaggggccatcctgaaaggacttctgttttgccttatcatgcataacatttttgtttagccaattcatcatcctgatcacagttttcttaggctatggctaaaattagcctgagtttcctgaactcattccagatgacagccccgtgtgcttgctggctgcaggacgccacgcctggcgtggtttggctggctgcctttttgtcctcttctcctgctgtgcactccggctttctgctcctcttttctccttgccttatcttgctgtgacactgttgtgcctacctgggtctcctgcagatgcttacatttcagatggccttggcctgacattagactgcatttggaaggggcctgtttaaatgaagacccttgacggtagttaacaaaatcaccttcacactgtcttaagccaaagagggactgtcctaggggaagcttggtgactcacaggaagccaggacacactgcagggccaggccgcaggtgggacccgggctggagagtcctcagaaccagcctgccaggctttctgcaccagtgtgtactgtcgctcaagtgctgtcacttgctctgtggcttcttgtccttcctttgtctttttctactcactggctcctctgctgcttcaaacccattcccctcacccatagctgtctcagcccccagttcacatcatgacaggtgaaacctacagccctgataggattctctcagcaccaactccagacccgcaggtggaggcatcttcttggcccagcttctattacgtgtccttctctgctcctgccacctggggccagtgggccctgagccccttagtgacagacatggctatcagaggcctttcctgtgcacagacgacagttcccaaagaaggagaccattgtgggctagaaagagacttcacagggtgtccactaagatactcagacattacagaatcctttgactactaacggaatctctggagcctcttgaaggccataacagttgaaatggtagacgttcattcattaaacatttgctaatcacctgtaatggcaggcgctacctatattctgggggtaaagtgtgtgttgcagtagttgctttgttctagctggacttgcttgaacttcctgtctggttcccattccaggcggctggtctgttctgtgggtgctgtacccactggggtcttgctcctcggtatcaaagcgccacccacgtgcatctcatggagctttgcctggagcaaatcttggtttctgatttaaatgggattaatagtgaccatctcatagagtttatgaggtgtaaatgagaaaatatatttgtatggactttgtaagctctaaattagttacacagttatgacttcaaattcctagtggttgcaggtaaatggtatagttcagtcatgagaggtaaattacaaatgcactgttggtctttgaagctctttagcttgagataaatctattttttattttctagacaatgtgcatttgatgttgtatcttgtaactgtagtgatgaatcagaatttattttccaaattctctttaagagaaaaaaacatcaagcttacttttgctgctcagtgagttctgttacgcagcatgttagaggctcactcacttcctatgtttatttttttcactgctcagcactaaataaaagctgccatcatatgtcttgctatggtttgaatgtttgttctctccaaaactcacgttgagatttaattgccagtataataatgttaagagatgggacctttaagaggtgattagggcatgagggctccgctcttgtgagtgggcataatgctttcataaaagagctttggggagtgggctctcttggcccttctgtcttactgtcatgtgaggaaccagcgtgtccttctccagaggatgtagtatgcaaggtactatcttgcaagcagagaaaccaggctctcatcacctgctaaagccttgatcttggacttcccagcctccagaactgtgagccagttgctccttataaattaccttattgttgtttccttataaattacccagtcttaggtattctattacaccagcacaaaatagactaagacatgactactgtgtggtgagcactttgcatgtatcatctcatttttatccttacaccagtctacaaagaacatattatctccactttacagatggagaaactgagtcttagtgtgtcaaaatggtgtgcacagttaagtcagtaagactctcagactccagagacccttctcttcccacagtaccccactggctcaagggtcagaatggggcggtgttagaacttcaggtgagaggacatctcctcctcctgttcgtgtggatccagcctgtggccggatgctctggctgtatctgggtggttggtgtgggagagcctgaactccgcctactcactgaactccgcctactcactgaactccgcctacttactgaactccgcctactcactgaactccgcctactcactgaactccgcctactcactgaactccgcctactcagccccaccgtcgctgctgccccacctgtagggaacctctacggtacctttggactgagaaaccatagatctcttctctctagcttgtccgctgctgccagaagtgtgtaccccagacgtgggcagcgcctggggttacttctcaaaaccacagcaagcatttattgtctttaaaacacaatagcatcatgaatcaattttagtgctagagagatatatgtgactctttaaaatggtcccctaaaatttgtaaattacaggcatcagcatcaataaaataacggcaatgccaaacaaatgactcatcatcttccctcaggttctgtacaagtcttaccttctctcaaaggaagaaaatgagtgcttagttggctgcttaactggattcctctgaaatttcacaaggagagaacatgtcacatgtagaattggtgcctctaggggagtgataatcgttacttttaggtatgaatttcctgcctccgaaagttggccatggactcttttaacaggtgcaaaataaaccctgtccagcttccagatagctgccagcatgatctttctataatgctggtacgatcacatctcaccctactttaaaccttttcgttattcctcattgccttaagaataaaaaatttacccccttcgcccatcagacagacacacaccctgcccctgcctctcccctgacccctcatatcctgcgtgcagttgctgggctcactgttctttgtcacacctctttgccaggtgcctgctgccccctctgctgggaacagccttcctcaccttttatgctcgtgagctccttctgatttgtgctcaggcactgccttctatgcagtctttccttcccccagtaataatcataatccgcacctgttgtgcgccaggtggtcttataggtgttcacgagcactgtcacattcgctcatcacaccgtcccttggagggtgactattactggcccttggaaggagaacaagggccccgggcacagcatcctcagtgacccgtagcccgtaagtgtggaacaagcctttaagcccaaatctggttccaaaggctgtatgctctccccttcgccaggctgcttgtcccaggtgattatccagcccctgctctgtgcattcactctacagctgggccttactgcatctgccggttccacatccttagattcaggcaaccatagattgaaaatatttggagaaaaaaaaataatacaaccaaaaaaatagagtataatggccaggtgcggtggctcatgcctgtaatcccagcactttgggaggccaaggctggtggatcatgaggtcaggagttcaagaccagcctggtcaagacggtgaaaccccgtctctactaaaaatacaaaaaaattcgccaggtgtggtgtcaggaacctgtaatcccagctcctctggaggctgaggcagagagttgcttgaacctgggaggcagaggttgcagtgagcctagatcacgccactgcactccagcctgggcgacagagcaagactccatctaaaaaaaaaaaaaaaaccattataacaactgtttacaaagcacttacattgtattaggttgtaagtaacctagacctgatttaaattacatgggaggatgtgggtaagtagacatgcaaatactgtgccattttataccagaattcgagaatcaaggatttcggtgtctgtggggttcctggagccaattccccatggctgcactttttattgcttcaattagcacactctgttgtcatttattacctgcagttttactttgcttacattgtgggcttccttcagtcaggaagtgtcctgctttattcttctctctccttccatggtctagcacagacccagctctcaggaggtagtcagactcctgactgaacttaattgaatgtattattccgtggatattgcatctttttcattgagtcctatgttattactcacatattccggatcatcgacagttccctccctcctcttgtctcttggctcctttcacttccttcctctcacagaaactttttctgtttccgaggaggctttgcggttctccctcccgctcccatatgcttcctcctcacgtgccacatatttgctctcctaatcacaggcacttcacctctttcctccttctttgtctttaagtcttggatgtaaggacccagggcctaaaagcaattatcaaatgattgcatcggtgacggatggtcctattatgataccttcctgtgctgggattaaagattttaccatcaggtgccaaggatggctacattaatgtcatctttctgatcaagcttaattcaaatttttgtcgaagagaacagtcaaattaatgacattatgatatcagatttctactttggactacatgggcctaaagtaccatgtgtcttttgcaacgtcagcagttgctgttaggaatattttcttttgtgaggttttttttttttttttttttcttcagtccttttcgtccttatgaacccatcactaggcacatagagacattcattgttgactgactcgctggatatatggcctgggggtggtgttccatttactcctcaaatgtaaggacagccttctgacctggaggtgttagtttaggtgaggggattggaaacaggaataacagtccccgctcggaagcagagtgagttttgtgaggaactcagaccagctaccagctatgctactggaggtgcatactgggtgctgttgaagtatgcaagaggccacctcactcaaaggaagggcttagggagggattatggaagcagtcaattctgatcagagacttcgaggcagctcttacataaatgagccagaagttccgcagatgagcaggcctgactttccgatcgagtgggaagcgtgggtgcagctgcacaggctttgattgtgtcagggactctaatgtggacatgtagagggtcttttgagttgagggccaattaaaggttgggaggtgaaaactgtatgtgcaccagtcatcaagttggcagtgaagaattcggtggatcagttctactcacatgggcttgcggagactccctggacttgaacttatcccccaaaacttgaggaacctgcctctttgtgacttggggcgtaggaagtggaagttgcttcctacggacaggcagagcccaggttcacagtggagggtccccgctgagtctgcctggcgtctcctccctgacttctccacgcccaggactccctctgagcagtgagtggccaggcaggtgcctgctcctgcaaccctgaagccgggaaagggtggtctctctccccatccttgacatagaaatcaccacccgacatttttgctgttttaaaacagttcatcctgccatggtaagtgatggcaaacatctgtgtcatttcattctcaaaggcccaccttctgtgtgctgcctgcttctggacactttcctgatggtcctgctggaaataccgtccctgccgctatgagtttgagagcgggcttcagcctccccatgatgcagcacatgctgcctgggatggcgctgcttgtgtcaatctccctgaaatgaagcaccctctgtccaggggactatgttctatttgtcgaaacttcacaggacataagtcactgctgggcctgtgctctttactttcttcaccaatctctctgctccccacataatactagacatatttccaacccctgaaattcccaactgctctctcatatataagtaagcaaaggaaaaattatgtggaagaatttttttttgatgtcaagaaaagaggaatttaggctggctgcagtggctcatgcctgtagtcccagctactcaggaggctgaggtaggagaatcccttgaaccaggaggcggaggttgcagtgacctgagtttgcgccactgcacttcagactgggtgacagagcgagactccatttcaaaaaaaaaaaaaaaggaaattaaaaaatagtgatatgtctaggatatagcatgatgcaaacccaaaccagacagacctgggtttgaattgcagctcatgatctgcaaggccacctattaaaaggggcctctaagcagaatgtctccacctgtgaatgtggccattctatctgacaggatgttatgagactaggagataatgacgaacccaccggctctgacctgcagtttcttctgtaaagatggggacagttcatagatctcttgagaggatgaaaaatcatgcatctccagcgtccagcctggtgcctgacatgaaatggaggcttactggtcgggagctctgacattatctggaattctccattactcttctcacacctgtccaccatcgtctggaattctccattactctcctcgcacctgtcccaccatcgtctggaattctccattactctcctcacacctgtcccaccatcgtctggaattctccattactctcctcacacctgtcccaccatcgtctggaattcttcattactctcctcgcacctgtcccaccatcatctggaattctccattactctcctcgcacctgtcccaccatcgtctggaattctccattactctcctcccacctgtcccaccatcgtctggaattctccattactctccttgcacctgtcccaccatcgtctggaattctccattactctcctcgtgcccaaggcaaggcgagccaaagcttcccgttgacatgtcagtattattattcctcctctgtttatgaaagtggccaagttgatgaaggagaagggctacccaaagatgttcttttctggagaaagctgtgaatattttatgaaacataccaccaagtcctgccatggcgcctgcgcctgagcctcctgcaggagtcaccttattaaaatgtccctgttgatggagtgtgctggcgcatacagggagagcttgcctcttttcagaatcactcaaaagccataaatattttaaggagttttatctgcccactgttttctgtatgttaatctatcacaccgatcactttttcaggacaaagtatcttgccttgttcttaacagcgagtcgcaaatcctgctgtcagtgtctttcctttctgctttacctccattttgaaggaaagttctatgctgtcctcatacacacattgggactcttttaatgaatgaatgactctcatccctgagaaatgtgagcatatgcactcaggtttgtatcttagggagacctgctctgggcgtcttgctctgctcacgggcatcagtgcagctgtcgctgagtgcccacctcgttccaggtgctgttagggaaggggctgggagtgggggatgtacgttgttctctgtgctcctgcttccccccaccatgttccagaggcagcaacagtaagtgaccaaggagcacagcatggggttagggtgctcatggagctggcggccaaggtgttgaggccagcctgggcagaggcaggtggagaagagtctggatgggtgtcttgaaggtaatgacctctgagtttgcctggtaggaggagctgacctcacctgagcctcagggaatctggtcagcatgtgccaggtttaaggcccaaactgaggagtaactgaaaaagaaaggggcttttaatggatgtatcagtcagggtccccacaggaaacaggcagcacactcagaggggtaactggggacagttgaataaaggggactttccaaggacctgggtggtgaagggaaacccaggaggcatgggaagcagcctggggctatcagcagctggggactttggaccctccaggtagaaggacaagaggaagcagttacccaaacaagtggggagctgctgcaggggctgcaggggggagctactgcagggggagctttgggggagctgctgcagggggtgcaggggggagctgctgcagggggagtatggggggagctgctacagggggtgcggggggagctgctacaggggttgcagggggagctgctgcaggggggggctgctacagggggagctgctaccgggggtgcagggggagctgcttcagggggagctactgtagggggagcataaggggagctgctacagggggttcagggggagctgctgcagggggtgcaaggggagctgctgtagggggagcatggggggagctgctgtagggggaggtaccacgggggatgcagggggtgcagcagggagctgctgcaggagggagctgctgcaggagggagctgctgcaggagggagctgctgtagggggagctgctgcagggggagcatgtggggagctgctgcagggggtgcaggggggagctgctacagggggagctgctgtagggggagctaccacagggggtgcatgggggagctgcttgccagagggcagctgggctctttgggaagagcagagcagagcagagcagagcctggcagtctagggtcaggggagcaaccactgcggccctactctccactgtctcatctggggcctcccgtgggctgagcctggccagaagctcaggggcatgcggagcctgttgatgctgtcacctgagtctgtctcttggaacacagcagagggtataagcaaatcaggaggagcatacagagcatgttcagcatgaaggatttaagtgtaattaatttttacaaggcttcaaagcccagtctccccagcctctgttgaccttcctcagtgttcatcagaccaggaaacaggcaggctggcctgcgtggcccagggtaaaacactgggctgtgtctgccttctgttttgatgctttcaggtgggagaggttattggttggcaaatgaggaaaggaattttttgagaggttcaataacttgccccatattccccagtttttgacagggtggaatgggaaggcaccattgacccttagctgcttctcactatacccacaacccctgaatacagtaaggtgcagtagattacactcatatatatttttttcttatttaatccttaaccctgaggggtaaattgtatagtatttttttcaaggtcatgcagctagtaaatggcaggcctggaatttagacccagatatgttagtttcactgtaccacatggtctgttttctcttcgtatttttgagtggcaatcatattttgctaggacttgaccctcctagatgataatcatccattttgaccagtggtgaccttgcatttaatgacctcctgctggttattaccagagtgccctatgccccagtttgtctgagacaggccctgttcatactgccctggagtaattattattagtgccccctccccatctcagaatgtcctggaatcacttgggttgtcctggtgctcagcaggtaggggggcctccatttgtctctgtgctcggcccacggatggcgagaggcttgtgtcgacctcgccttccctttgcttgtgaggcatcactttcattatataatttttataaaatccaaacatgtacctagaggcattttggaatcacatttgtttcagaatcggaaaggaaaagtaaagtattttgggtagttataaattacctctgttttggtttttggaaactccatttatattgcactgtttttcagtaagtaaaaaggcttctcgaaactaaggaaaagaaaaaatatctcccctctggatagtggttttcaatctattcttagtcataggatgttgcttcaagtgaaaccttcacagatcccccaaatacataacagataaatgtcacgctgctctgactgaagccaaatattaactacacgggtcatgaggaacatctggccagttaattccctgcatacttgctgagggccttctgcataccacgtgtgcttctaggcactgggacacaacagagaacaaacccaacaaaaaacaccatcagaaagatgctcttctaaggtcggggagtctgacaaccacccttcaaacaggcttcatcctttcaacttatcttcctggtcatacacacctgggaggcctgtgagggtaggcgtagatgtcggggccaggtgcgccctgggcaaggggggcgagcgggagctttgtgctaccaaaatgctgtaaagtcaaatggacacttggctttaaacgccttctctgtgtcagggactatgctgggaattgtgcagagcttctgtgtgactaggttagggatgaaagaccaaactagctcatcagaattgagcaagtgttgcccatccactctgagaggctgccaggtatctaagatacgtgatgaagggctgtgcccctagtggctgtgggtgcagggctgggcatctgcagtttggcttctgattctggttttccaaataactaagagacttgtttgataattatgtagttggctatttaccttctctaggactcagtctccttatttggaaacagaggactgtactgggaaattcttaactccccgcccccaccccttctccattcatcctccacagattatgaatcagtgaattgtgagttcggatatcacccagaggataacctgtctatgtataaacacacgtatcctcatatctacatgcatatatgtgtgcgtgtctgtctgtctcatccccctacaccccacccccaccacacacattttgaaaacctggagcctcatacttgctcttcctagcctaaattgtgggcaagatggaaactgccagacttaaatgtttcactcctctctgccctgcacagattgagtctctgtgctgcctctgtgacccccagtcagagtgcgccatgcatgccttcccatctcccttacaataaagcccatacccttggccagtcttgcctcagctcttctcatggctgtcttgtggcctggccacaaggaaatgatttccatgctttcgcctgtaagccttggccatgcttacctactgcctgaggcaccattcctcttctcccttgcactggctttctcctcctccattctcaggtgtcacttctgagaggcattgctggaactgagggccactcccacggtaccatttgcctccaattctggacggcttggctacatgcccctttcatagcatccttcggttctcttacaatgacagttctccagttacttagttttatctttgttgcagttgtcttgagggtggggactgttccattttacttgatgttctggtcttagcataaagcaccatgcctggtgcactggaggagctgaactgaatacttagtaagcgaataaacaaaggaatgaccgtaaaaagccttccatttctaccttcctgtggatctgagatttcataattactaagaccttgtacagacagtaagtgctctgagacttcagaggaggggatttgaattgaaccaggacttgaaagcagagtagaagggaggagaagaaggatatgctcctggtggtggtttcaatgcctgtagtatggtggtccttgctgtatttttggccaaggacttctttgaatctccaatttaaagccatggatcattccctcaaaagaaaggacacacacgcaaaatctcctctctatgtctggaggttcttagacttctggcgctcatggagctcaggatccgaactcctatcttgaacagaggcaccactgaaatgtaaacgtttgcaaatgtttattaagactgtattatgtgccaggcactttgctaattgccagggatgtaaagatcagtactactcaaggagaaaaacaggaaagggatctgtgtttctgagtatctctgtggagcttggcactgttcaagccctttatataggctatcttgcttcgttcttgtaacaatacgtttgaggtcggcattatcctctttttttcgtgggaagaatttgagtctcagaggtgaaatggccttttcaaggtcacccagctggtcagtaaaagacttgcagtctgtttctcttgctccaaagcttgtgtttccctgtcctacctcactgccccctcgctcccccacgaccaagaacacagctggtgttcacagtctgctccctccatgtgtagttgctttgaatgaccatcccagcagccccataggccgtgacatccactcaccctgcgggcatcttggcaaggcctggcttgacctgcattcctcagtgactgatgttgtgtgaacttgcctaggaactggcaatcccctctcaggcatcttgtctagttttgggataactgacagttgggaaattctttttgatcttcagtcgaaatcagttacctaggtacctgtcagcaacttttctggcttttctgtgaacgactgtctgacacaaaaatgcgaacctggtgttgattctttgggacccggggcctctgctctgatggcacgatctgatggctgttgttcaggtgctgaatgaggaagcaggcggagaggctttcgtcctggcaacactgaccttgcctttgttctgaaggttgagctgagccctgtgtgattcatcatcccgcactttgtcattggtgttgctttttgatctgagcaccagactttttttttttttttttagttcatcattacaaaatccacatttgacttggtgatttagctctttggataggcttggacctttgattgctcgttctcgtcctttctgcttttaaggaaagatgagagacagacccttctgccacacaaggtctcctatgaaggagtggccagcctggtagtgctgcccgctggccctctgtcactgaggacagaccctctggtgttctgagattcagactgcatgcagtctctctccttcctggagcctccccccacagggtgagttaggtaatgaagatgcgattaaagacaaaaagaaagtgtcccagaggagacataaagagggcagggagaaggagctgaggaaaggcttcacagaggaggtactgctagatctaggaggagacgaggtgtttaccaggtgggtaagagaagcatagatggagctcattccagaaaggtccacagggtgctcaaagggagggaagcgtgaaaagatagggcacgtcaggagggtttatacacatggcgctctgctttctctcctaagcaggtgtctttatgaagtatagttatttttttctctcttgacaataaggaggcccagtagttccaggaagaaaggcactgtactgtggccaggaaggaaccatccgaccagcccagggaatcaaactggataaccagggggagacagattcaacagtgttagccgaagtctcaagagaagtgctgactgttcagaataaattaccaattcatccatcaatttgccatatatttatagaccatttattatgcgtcaaccactatttgagcacagtcgccatttcccttgacatgaggcctctgggtgaggccactaatgacaatgatatgctgctaatcacagtaagaaacaggaacctaggactttatgagctggggttggaaaggggagacctgggggagggtagaagaggatggaccaggtctgtgtatctgcataaccttcagtcctgggggcaggtggctggagccggccaagtggtggctgagtacgtttgggctgtcccaggagccacgcagtcagggctgctgctgagtgggaccctgccacgatgcagcatggatgacaggcccagggggcaagcggaggcagagtcaactcagggagctccatgtcgttaaatgtcgccattaacactgtttctaaaagggttagaaagaggaagtaaggcttcagttcgaggcaactctgggaaatgtcctaatcacaagaaggatgtttaagaagtaccttgtcggtgtgaaccgttcttctgttagctgggtaactacagctggtccgggcctggtgcctgggctgggggaatggcacccccaggagggtgtgtgtcgtagctttttacagcacctgtgtgtgacgcagcattcctgccgcctgcgttgtcatctccctgcctcagagctgctgcatttcagactgtggctgaaaatatcgggagaaacttggcctctttcatctgtttccctagctagttcacagctccccccatcgtgccatcatactacttgcatattatttgtctaagatcatgagtgcccacttagatatccaactatcgcacgggcctgtgagtatctcagagatcgcagggtctcagtcatctttattcctgatgatattccatgttgcctcatatttctccctcccgagaacatctttcttcattgatcttcctagaaaatgcctcgttcttcaagacccattgcagagcggggagccctcctggttccgttcaggctgttgcagaggtctttcatctggctccatagctctatgcttacagccgacagccctggcatacagtgtagcacatgtattctactgtcattctttgtttacagatctgccctcccaggagacagtttcatccctgcatctccagcctggcatatggtacaatgcttggtacccaggataagtgctaagtaactgctgagtgaatgaataaacataggaagcaaagggatggtccagcgtctggatttagagatgcatgccaataaattattcagatatcttcattgatatgctcaaaaacacgtatttctgttgctcaggaatcagctggtggtatacactgtctctctctcccaggtgggagggtggagtgatggaaagaacacaggagttgggctgcccaggttcaagacctgatcctgtttcttcttagctgggtaactcttggcaagtcacattttgtcttagaacctcttagtaccttcatctgtaaaaagaatagtcgtgtgtatctcagagggtcattgtgaagaccagctgagatagcgtcatggctaaggagagtgctttgtagtcatgacggtatcattagtaatatggtatcaactattcttcattgctactcattagattctaggcactattctaatatttcacatcaggacttttcaacagcagcactatgacattttttctagataattctttgcggttggagggggctacaggatataggatgtttaggagcatccctcacttcaacccactggaggccagtagggtcccttcctgccccaatcgcttgtaccaaccaggatgtcaaccagatattgccaaagctcccctgtgggtggggttggggacagaattgcccctgatgagaggcgctgcctcacgtgagctctgtcatttaatcttcacaattctccgaggtgggtcctattactagtcctggtttacagatgaggaaactgaggcacagggaggtaaatatttgccccgataatgctgcactaaaaatgcttctgaaaaagggaagctcgtaaacaattgtcatcgagggtctggaagagagcgctgatgtaattaaggagggtgtctcaggctgagtatgaggaaaccctattgctaaccctctgttgttacctcccatccctcggtcctctcgtctgtgctgtgggagtggggagcggcaggtctttcatgctccttctgctagtggaattcctgctttctagcatcccttcatttcatcactgggtgcttgtttgctcaggattatgcctcatcttcgtaagtcagacatgatcctggcgcttcagacactcagctttgcaactccctcaaaatgggagccacaggcatgtcgggggttgagctttatcctgcccagcccctcgctcagtgggggtgaacagagtgagaggcaggacttgaaagtatttgcccagaatcatacagcaagatagcatcatgtgcaagaggcagccatgtgtactccgagtccacactgccattcttgttggcctttgcaggccggcctcctgaaaaacttgtctctgctcacttcttcagtctcttctccttctgtcttcccttcaacctactctaatcagaagatagagacagaagtaagcagtgaactaggcaggaccaaaccaaaccaagagttgtgtgttgaccagccaatgaggaagttatgtgtgggagagaacatggtaaactatgtcttcttctcccccatgtctatgtctgtgtgtgtgcgtgcatgcgtgtgtgtgtgtgtgtgtgtggtggggggaggctggtattttatttattggacaaatatttattgtctagcactatgtgccaaataccaacttaagacatctataagaatttcaatttctctgagacccaggctaagattttccattaaattcacatgagtctattacatctctttctttcatttccacctgggtagtcaggaaaacacattagacatatttttaaaaattaaagttaacacagagtgttacaaactttgagagaagcaataattttgagttgcactagtaatcacagcaacaaccccaaataccacatttattgtctcttacaaagcatcataagttacattaatcactggttttaactacattctgttacagtttggactctagtaactaggcaaatacaaaccaacaaaacagcatataaaaccacatggaacaaaaagcacactactctccaatatgcattttctggagccaatctgatatttaactgggataagacattctaaatagcaactgaaatattgatataccagaacatcatgaaataaatatttttcccaactctgaagacattcctttcctcatgcaaaatttaccaaaaagaaaaaaaaaaaggaaaaaacaaaaaataaacaaaaaaccaggctgggcatggtggctcacacctgtaatcccagcttgggaggccgaggtgggtggatcacccgaggtcaggagtttgagaccagcctggccaacatggtgaaaccttatttctactaaaaatacaaaaatttgctggatgtggtggtgcatgcctgtaatcccagctacttgggtggctgaggcaggagaatcgcttgaacccaggaggcggaggttgcactgagccgagattgcaccattgcactccagcctgggtgacaagaccaaaactacgtctcaaaaaaaaaaaaaaaaaaaaaaaaaaagaaaaccctacaaaaccaacccaagttcatagtaaccagaattttcaaatatttctctgtgatcagcacctaaaaatgtattttaaaatgcttattttaatggccaggcacagtggctcaggcctgtaattctagctgggaggcagaggcgggtggatcacctgaggtcaagagttcaagaccagcctggccaacatagtgaaatcccatttctagtaaaaatacaaaaattaggcatcgtagtgtggacctgtagtttcagctacttgggaggctgaggcaggagaatcgcttgaatctgggaggcagaggttggagttagccaagatggcaccattgcactccagcctgggtgacagagcgagactccgtctcaaagaaaaagatatgctcattttgatttggaataaagctgcctggccaaaagatggcttgtggctagaagaggaaggacaaataagaaaacataaatggttcaaatagcactctatgtacaaaaacatgaaaaggtgaaaatttcttaatttcaactttttgttagaaattagtacgtcacatatagtcctccagggagcgctctgaggctgttactagtcctttagttaataaagcgagaaggccctgtaacttagcctataggattttagcgctgacgcctccgaacccacccaggctttcgcctcggaaaggcacggaagaggccccatgttaatacccgcagtctaggacacggagtcatcctcagggccctgtcacccgtgagtgagattacagtcacaaacacaggcttcacagctcgcagacgcacggccaccctcatctccagcgcccttcccttccagagcgcgtgagcctgaatgcagagtccgcttcggatccggtgcgagcacagccctgccaacaaggaggccccaatggtgcccaggaagggaggggctgagggcggggccgaacgtacgaccaggggtgtttacgctgcagtctgcgccagagccgcagcggtacatggaagacctgggcgggcaggcgtccttactacgcggatcatgttgcggctgaagtcgcgaaccgagacgtagctgggtgtcccgaccctgcatacagcagtagaagacctgggtgaccgtcagtaccctgtgaattgaggcactcctgaagccatgcgctgagacctggctgggtgtcgctaccctgctgacggctgcggaggaccttggtgggcatcagtaccctgcggattgtagggatgctgaagctgcgcactgagacctagctgcgtatctcccctgcggaaggctgcggaggacttgggtgggcgtcaataccctgaggattgtggcactctttccgcagttccctgctctaggctgcggaggacccgggtgggcgtcaataccctgaagattgcggcactccttccgcagtcccttgctcttggctgcggaggacccgggtgggcgtcaataccctgaagattgcggcactcgttccgcagtcccttgctctaggctgcggaggacccgggtgggcgtcaatactctgcggatcgcggggatgctgaagctgcgcgctgagacctagctgggtatctcccctgcggaaggctgcggaggacctgggtgagcgtcagtaccctgaggcttgtggcactcctgcagctgcgcagagacctagctgggtgtcctcccctggagaaggctgcggaggaccagcgtgggcatcagtaccctgcgcgtcacggggatgctgaagccgcgcactgagacctagctgggtgttcctaccctgtggaaggctgcagagacccgggcgggtgtcagtaccctgtggattgcggcactcctgcagctgtgcagagacctagctgggtgtctcccttgcagaaggctgtgggggacccgggcgggggtcagtaccctgtagactgcggcactcctgcagctgcgcactgagacctagctgagtgtcttccctgcggacggctgcggaggatctgggcgaacgtcattactttgtggatcccgggatactgaagcagctgagacctagctgtgcgtcgtcccctgtggaaggctgtggagaacccgggtgggcttcagtaccctgaggattgcggcactcctgcagctgctcgctgagacctgtctcccctgcggaaggctgcggagaactctggagggcgtcagtagcctgcggattgcggcactactgcagttgcgcagagacctcgctgggtgtctcccttgcagaacgctgcggaagattcaggagagcgtcagtaccctgcggactgcggcactcctgcagctgcgcagagacctagctgggtgtctcccctgcggaaggctgcgcaggatcacggagggcgtcagtaccctgcggactgcggcactcctgcagctgcgcactgagacctagctgagtgtcttaccctgcggtggcgacggagaaccccggtgggcgtgtttaccctgtgaatggcctagcgctgctaaagccccgcactgagacgtagctgggtgtcctcccctgtgcacggctgtggaggatctgggcggacgttgttactttgtggatcgcgggaatgctgtagctgcgcactgagacctacctgggtgtcctcccctgtgcacggctgcggaggatctgggcgggcgtcattactttgtggatcgcgggattgctgcagctgcgcacttacatctagctggtgtcttcccctgcggacagctgcggaggacctgggtgggcgtcattactttgtgcatagcaggaatgccgcagctgcgcactgagacctagctggtgtcgtcctctgcggacggctgcagaggatgagaggagggaggaggcgtcgttactttgtgcatcgcggggatgctgaagccatgcactgagacctaactgggtgtccccacccagtggacggctgcggagaacccgggcgggcgtcattatactgcgggggcgggcgtcattatactgtggaaggtggtgctgcgggaactgtacagagacctagccgggtgttcctgccctgcggatggcagcggagaaccctggggggcgtttttagcctgcggatcgcctggtgctgctgaagccgcgcttgaagacctagctgagtgtcctcccctgcggaagcctgcggaggacctgggcggactctttaccctgtggattgcgccgctgctgaagccgcgcacggagacctagctgggtgtcttcccctgtggtaggctgcggaggatctgggtggctctggagatcgcaggaatgctgaagcctcgcgctgagatctaggctgagtgttctccgctgtggatggctgcggatgacccgggcgagctctttaccccgctgatctcagcgctgctgaatcccctgcactgagacctagctgagcgttccctaccctgcagatagctgtggaggaccccggcaggcgtccttaccctgcggattgcctggtgctgctgaagccggcactgagagctacctgggtgacactaccctgcggttggctgcggaggacctggtgagcgtctttactgtgcggactgcggcaagggtgcgactgcgtatgttggtgggcatccttatccttcagacggcggcaattctgcagctgctcattgaggacatgagctggcatctttcccggtaggactgcggcacgtctgtagccacgcactaaggacctgggtaggcgtcatgaccctgggagcagcggcacagctgcgactgcgtatggaggacccaggcaggctcctcactctgccgactgcagcgcgcctgtggttgtgcaccaaggacccacccagacaggcgttcttaccctgtggacagcggcacagctggggctgtgcaccccaagatccagctgggcattcttatcctgccgactgtggcacgtctgtggccaggagtttttatggtgtggacagcagcacagctgcggctgcacactacggacccagacgggcgttcttgccttgtagactgtggcagggcggtggcggggcacccacgatgcaggcgagtgtattaccctgcgactggcaacacaggctgcgcagccaggactcaggcgggagtccttactctgggggagtccttaccctacggactgtggcacaactgtggctggcacaagaacccaggtgggcgtccttaccctgcagacagtggcagggctgcgcatggcggactcgggtgagccgtctcatcctgtggaccgtgttactgttgcggctgtgcactcaggacctggtggggatggggtgtgtgtgttcctcttctgctgactgtgactccgtgccagctgcacggaggaccagggcaggtgtctttgctttgtcaacgacagcactgctgcagcagtgcacgagaaccagacctggagccgggtagaggaggtccctccccttctgactgcaacacagctccacctgcaacctgagacctgggtgagcatctttgccctgccccgtgccattgttctggctatacaccagcgacctggacaggttttcacatctctatgctggatgggctggcccagccggttgtgcactgtgaggtgctgcaggaggagctgcgaggacacattcttcttgacttctcagcataggaatgtctcacgtccagtccacgtccctgtcctagtcctcctctctgctccttccacacttcctcacggtggtctcctgcacgctcgtggctgtcagtatcagacgagggcagcttctgcattttctcaattccaaccactcctctccacttacctacccagtatctctactgggtgtcttccagtcatcctgcactcaacgcgactgacaatttacttccaaccggctttacaatttccctgactttgttgatggcaactttttccttccagttgcttaagccagatacgttggagtcattctttaccattctgttcaacttcatacctattcctcaagaattctggtttctctatctctaaaatgtatttggaagcagctacttcttaccttcttttcacggattcaggtcaccattcacactcacttggattattgcaataatttcctaactgggttccatgtttccagcttttctgtctgcagtctgttttgttttcaacatgtggccagagggatcctgttaacatctaagtgaaatatatcatttctctgcagtggctccctagctgctcagagtaaaatctaatgtttttacaatggcctgaaaggctctccataaccttatcccctcccacttacctccctgtctcctctcctccctccgacactcagcccctgtgtattttagctattgaaagaatatgtgggcacactgctaatttattgtctttgtggaggcttggtttgtgcattccttatttcaaacacttatgggtggactctggtaatgggcagtcatatttatgagtccccctccaagtgaggagatgtactaggtggaatgtgcgccctccctcacgtggtatactcttgatacagagccaagcaggtagtaccgttggtcctgctttgtaggtgagggaaagcagacccaaaatgaaggaagttgtccagggttacatgctgggaagtggtggaggtagaattcaaacccggagcgcaggcgttgtctgcacctcggagaggcaccgctcttcctgaaatgctcctccctggttatctatgaggctgaagtcctcacctctttcaggtctttgctgaattagaaccttctccataaggcaaggctgatgctgagcaccccactgaaaattttcctctctcccaagaccctcttctcagtccctctacttggctcatttcaggtgtctagcacgtcacgccctttaatacattttgcaagtatttctccacgagtgtgagaaagtggttttctttggtgggggttgatttttcatggcacataaagggcagcagggtttctttgggtcctgtctggaggcctgaaggtcacgctgggcttctggggagcgggtccccttcctgcagcctccctctccacttgcgtgtttctcactcctctctctccctgggaagtgttgcttgataaagatgcagcttttaattaatgtaactgttcaagattacagccggtcatcagctttctaaccagtgcctcacagctctgctggaagagccttgctccggtgatggttgatttgccattctctgtcccagcccagagaagctcccctcactgtcaacgtgccatctgtcaggtgcatgttataaagctgtcatcatgatcagctcattcacgcaccagctttagctttgaggaactgccggccatggcgttgaagacctgctgaagcctccagccagacatctgatgttcaggtctcagggggtccttgctgcttgtgtagcctgacaggtgtggccacggcaggcacaccatggtttggagtttggaaagaagagaccctgtgttattgtagagtgaccactggattgggcttctggaaatccaattctaatcagacttgggttatgcatttactatttcaataaaacatttatggatggactctggtaatcaacagccatatttttgagtacccactgcaggtgaggaaataaatgtactaggtgcgatatacatcctcatgtgctgtgctcttgatacaaagccagtcgggtaggactattggtcctgttttgtagatgagggaacttagacccagaaaatgaaggaagctgcccagagttacatgctgggaaatggtggagctgggattcggacccagagtgcaggcttgcctctgttgcggcatagatgtcttgcttgccagggcaccgtgcccagtgctaggtcagatatgaatgcttacaggacgaggccctcttcttgaggacttccctctccttccctcccctctactctgctgcctctccgagtagctgtcaggtcactggtaggtaccagttgtgttgggttacatggtggatacacgatggagtgctgtggctaacagggtggccaaaggcaagacgtttcccctttctgacctttcctttggcagcctctgggtggtggtgggcaggaggtgtgagggagacattgagtttgaggtatggaatgaccgtgcgtggctctcggagccagcccgatctgcgcctgcctacgctgccacacccacaggctgtctacatgttactggaaacccaagcatgagtttcttctgcaaaatggaagatgaccacccttttgtactcctgggatgaggcatactgtgggtgcacctccctgcaggcagctgtttctcagtgagcggtgcctgttgctatttggaagtgaccaccatgtctcctccagccaaagaatttggcaattctaagttcagagtggtgggtgttggtgagagagtcagtccacagggtgaggtgcgatgagtgggcagaatgtgcctggtagtcagagtggagatggtctaggtgtgctctcatgacctcctcagctcttcaagggaagggaagccacctggggagggtcagtatggaacccttcctggactggctggtatgtcctggagggaacttcgttagacttcataatcgatgcagtgtggactccatggggagttttggaaagaaagcaacagtcatgaggatgactaagggtgaaagaaattaggtgtgtggccatggttgggattctaagtctagccctgccagtcattgtcaggtgacctcaagcaggcacctttgtctctggagggctcagctttcatctctgcccaatgaggggtcaggtttggcctctaaattctatccagctttaaacactttagtttactgtctgaagtcttttttttttttttttttaagacgaagtcgtgctctctcgcccaggctggagtgcagtggcacgatcttggctcactgcaccctccgcctcttgagttcaagcaattctactgcctcagcctcctgagtagctgggattacaggcacacgccatcatgcctggctaattttttatatttttggtagagatggggttcaccatgttggccaggctggtcttgaactcttgacttcaagtgatctgcctgccttggcctcccagaatggtgggattacaggtgtgagccaccgcaactggcctgaagccttgtttctaatagttgttggactttaagagcttgttcttcaggtcaccatctgctgggaatcatccactattcccaagactaggcaaggaacaccagtagaactccagcctcacagggaccccgtagcaacttcctgcacaggatgcacctccagggaatgcagagaacatgaatctctgtcaagaagtattggtagctactagaacaaaagccacagggaaaggtccttatcccagattttggaggtcttccaatggcaaggatttttgagtgtttggggatggtttatgtgtaggctgacaagaggaagatgagcagggggacattctggaaagctttttttttttttcattcagatacttgcattaggccatgtgctaagtactttatatatgctgcctaatttgatttcataataatcttgaagtaaatggattatccccctttaacaaattaggaaaataaagcctagagggtgtaagccctcataactcctaagtgactgagcctagaatcaagttctttctgaatctgagttccattctcttaacccttatgctgtatgtttaaaacaaatacaaaaatatggaaaatacagaaatgtcttaaaaagtcaccatcatttccagcacccagagatgatcacgtagtgagatgttttctctccatcatccatttgtcaccagaggtaggcagtagtaacttttggtcttattggggtgggatatggggaaagagaagtgcttgaggggccagtcagtctgtggtttgattcctggactcattagctgtgtgcccttggataagttactcagtctctctgattccttttctcacttggaaaacaaaatgatatatattttagatgctctatgcactgtggccgcgcgtggtggctcatgcctgtagtcccagcactttgggaggctgaggcaggtgaatctcttaaggtcaggagttcaagaccagcctggccaacatggtgaaaaccatctctactaaaactacaaaaattagcctcgcgtggcatcgggcgcctgtaatctcagctatttgggaggctgaggcaggagaattgcttgaacatgggaggtggaggttgcagtgagccgagattgcgcccttgtagtctagcctgggtaacagcaaaactccgtctcaaaaaaaaaaaaaaagaaaaattaaagtaaaaaaaaatgttgaagaatagattaaataatgtcttttattagtagagtacataactaatggtggcttccatcaatattttggtaaaaaaggtttgttttttttttttttttggagtgcttggaaattggctaagtggagctggccggcaggaggagggaggagtttctagactgaggagacagcagaggtctgggctgggggtggtcagcgttctgcggctgaatcgaagggtcgctgtggggccggcgggagatgggtctgcagaggtggaatgggcgccactgtagaaggtcttgaaagcacgctggggttggcctctgtccccaggcagtagggagtcaccgacagttgagaggagactgctgggtagagcagtcctgggttgaggacagtttttaattctctgttatttttgtaacttcatcgcagcaggcgggacagcagatcagaaccctttgaagccaacttcagaggcccctcttgcccctgccgcagctgacttcctgctgtctttcatctctgctgttatctagatcactgcagttaattatttctccaaatattagctccatccttgactttataatgaggttttccctcatcttccaaagagaacccctggtttccacaggaaatacccttggtagtaacattgcggtgcctaggaagtagagacattttcaaagtgtccttccttgaagcaagctcagctggaaacttgggaggagttcttgggactctgaaagccctggctgccctttcccagagcatgaaacggagacccctcctattaactcagcctcgcccatccatcttcctgccagtctttcttgcacatttattcagcatttagtgtgagccaggtctggtattaggccctagggttatgaagcctgctgaggccatcatggtatgttggacccttgacaggaaggcagatatctcagggggtgcaggatgagggggcaggagacggagagcctgcagcgacatgcatggggccaggctgccacctccgagtcgtggggcttcagatgagctattgcgtctcactgtgcctctgctttcattaagaagggatgtgatctcttacccagggttttgccttttatgacttgttcttatataattatggtttgttgtctctctctctgcagtcttctgtcagtccttgaggctgatcctcagccttttggactgcgacttttaatttttgtagcactgggagcgctcgagtctctgggagcagggtcacaccagtccggcttctggagctaagacgtatcacccagaagccagcccattaatatggcctagaaatggtctgtccatcacgtcagcctgttggcctccgctgtcaatgaacagctgcatgggaagccaggctgcaaggcaaggctgctctatgagctcaagatcggagccaggcattaatgagatgcccagctctttaccctccttatcctgggatgggctcatgtactttgttctgaaagcagggatgggtacacttggtgggggatggcgattttcagggttagccatgaagtgtgctaagggcctggcccggacctctacgcagctggcgtggccaggaaatctggaattatggattagctccaaccccctggtctcccgggtgacctggaaatgagtcacctggttcttggtaatacgccagtggagctaagataataggttattttttaagagtataagctgtttaatgtcaggtgaagaaatgaaacttgccttccacttagggttcactctgaacctggggcatcgtaagagctgagttctctcagccctcggtctgagcaggtgtggcgtgcggtaggagggcttctgtgggagctgctcatggggcgggaggcagtgtctggtgccaggtgaacagtgtgtttccgtgtgtatatattggtgtgaatatttccatattatgggcagaacctgaattcatacagacacactcaaatgacttcaaaccgggtcaacctacatatgttataatagccagaggagaccaacatagtcacagttgtatttgaatttgcatagacattgcctgcccttatttttgttgttgttgtgttgttgttgtttttgagacagagtctcgctctgtcgccaggctggagtgcggtggtgtgaactcggctcactgcatcctccacctcccgtgttcaagtgattttcctgcctcagcctcccgagcagctgggactacaggcgtgcaccgccacacccagctactttttttatatttttagtagagacagggttttaccgtgttggccaggatggtcttgatctcctcacctcgtgatatgcccgcctcggcctcccaaagtgttgggattacaggtgtgagccaccacacctagctgcctgcccttatgtttttaagcaaacactcagaaggtctaccagcctactcatctatcaagtgcgggacctctcctgtgtgccagaccctctgcttggctctgggaatctgtgataaagaaggcgaggttctcatctttatggagctcagtgtctcttggggagacaggcaggaaggcagcttaggcagctccatggccctctgcctgctattccaaaatccgaaaagctccccaaagaaaggcttttcttttcatgaagatggtatccaagcccattagtggtgaaacctggcataaatttgtatggggccatttaaagtcttcccttatttcacgtagtaggactatttattgatttgactgcagacttaatgcatctggttacagggggctgcctggtccatggtgtatataccctatggtctttctaaaacccgagcaagtcttagttctgaaaaacacctggcctcaagggcttcagatgagtgtatttctgacctctgaaagatagagacattcgtgcggatagaagaggatgaggtgctgcctctggggaacactcgggggggaagaggcttttgaagcgggctgcccagtgggagagaagaaaaaggccatcagtgcattgaggggcttcgaggagaaacttgtacagcccacagtgggagcttggtttgctaaatcatgaggtggagctattgtttttatttctgtgtttgttgtttaagtgcagtttgcttaaatatgattttcatttttataaatacaagcacagcagaagggtctagagaaaaaggcttcccaaaccttactacccagaaatcgacgttattaatgttagagaaaccttcaaacagacccgtcctctgcatttacgtgtgctgagaaagactggcaggaaggagaagttatttcccctaaaagtggatcgtactctacttgctcttttaaataaaactattaatttaattttacgttagcatatcagagaaaaaaataagtcgaagtgaagtttatggaattgctgagcttctgatatgtttattcatgacgagagatatgattccctatcaggtctctttaagatgaagaaaaaagattgtgaaaaacctgaggaagtagcgtagttgtattgttcaactgtatatgtcacattttcaaattactgatgagtttcttgttaggaaaaataagggaatttatgcacttagactttttaccatctcccaccccaccttcaagtactggccatttcttctttgttaagggttatagcatttatattcagctctcaagtcataatttcaaaaggtcccagtcctcgttgtgtgtttaagcggagatgaggcttgccacttctgtgctacaacttttccattcccaagtttgttcttgtttatctctaggttggtggactcttatcactaagatggttttgaggatggatacctcttaggtgatagattttcacatttcttgcataactatcagttaacaaatactgagcacctactatctgtcaaatgggttttgggacactggaaatacaattgtgaacaagacatttaaagtcctgccatcacggagcttatattctaatgaggagagggtaaagtatgaatgtgaacaaataaatcaaatagcttctgagagtgccagttccaggaagaaatatgagtatatggtccagaaggactagggaggcttgtatagccagagtgaccaaggagcatctcttgaggaggtagcatttgtcctgaggtctgaaccatgagaaagagatagccatctaaagagctaggggctctggtaagccacatcttccaagcagaaatcacagctggtgcagaggcccagagatggtaccacgtggtaatggaggagctgggagctgaagcctgctctccaggaccttgtcagtgatggtgggtttttctggggctggcggcgacaagctgcaggagagagccagggaatggtgcggttgctcgtcatgcatgagaatggtcactgtgactgctggttggagatggattgcagggtggagagggaaacgtggacgagtagaggcaggggagacgaggtggggagccagtggcattgtccagacaagcgatgacagtggcttggatgagggcggcagcagaggaggttggcgacagtggtcagaccttagatgcactgaagaataagcaagggtgtcttttaaggttttggcctgagcagctggacggtggttgttttatttactgagatggaggaagctcggtggggattagaatgtggggaaaacacaaccatattcttcaggcgagtcatgtgtgagcaccgttcggctcttcagcggggctgtgcgggagcctgttggtgttccatctgtgctccagggagaggtctgggctggagggagaagtgtgagagtcagcagcttagaggcagcgtttaaaatcctgggcctggatgacattcctgagggggttgcagagatagagtgctgtgctttcgaggcaccccgacatctgcagggtgatggggccggggggagggcacgggagacagaggaggaagagccagggactgggaagaaaagcaggcagctcaaaagctggaaacatggggcgtggcttaggagcaaatgacagctgctgagaacgtcaggaagacaaggccaggatgttgaccactggctttgagattggaaagagtcatttcagaggagtaggaggatggcaggctgacggtggcaagaagtagagccagcccgagcaggcagtgcttgcaggagctctgctgtagagaacagggaaacaggatggtggctggagggaggtgtgggatgaagagagggattttttttttctttttttgagacagtctcactctgttgcccaggctagagtacagtggcgtgatcttggctcactgcaactgctgccacctgggttcaagcaattctccttcagcctcccgagtagttgggattacaggcgcctgccactgcacccggctaatttttgtatttttaaaaaagtagagatggggtttctccatcttggtcaggctggtcttgaactcctgaccttgtgatccacccaggatcccaagcctcggccgcccaaagtgctgggattacaggcatgagccaccacgcctggccgagagagggatgttttgaaggtggtgttggcagtgtgtgattgtgtgcactgacaaggattgaacagtggaagagacgggtggagcaggacgggatggggtgcctgggaccaatcccccagaggcagcaggagctgggcaccagggcacaggtggagctgtggcccctgagagccatggggaggctgctgccctcatcacagaggaaaggggctatgtggggctgcagtgcaaaattgttggtggagagacgtgtcatttcaaccgactgcctcacctgctccccttccatttctaccccgcttcttctgtctcttcttgcctctccctgctcctttcatcgtcttcccctgtccttcttcctctcccaccatctcctctctcccctccttcttcatcctccatactctgggatcctcttgtactttctttgtggtagcacatttcaaaacctgtgtctttcacccacaccatacccgctctccagcacacgatccaagccctggttaggctttgtttctggtttagtcttcaggaggatgggaaggatctggtaacctgctaggttgccttctgcttcaggtggggaaagtcatagttagaaaatggagaagtcttcttagagttgtgtgtgcaagtctgaacggcttcatttttatttccttctgccagcctacccttagaaaaaaccacagtgattcctaagggggtgtggggtggggggaagctataggcttaggggagagttctgccagcactttgaagaagaaatgtttatttttaacaatgaatcagagaaatgagaggcaatgcgttgacagagataggctgtggctccccatgtggaacgcgccagatcgggacacgattacccacagcagaggctgtcatctgcttttgtaggggcagggtggcgtggacctcagcaggctgctgccgtccatgacttgcccctttcttctctaagtgagtaggcagagcagaagggggatgctcactctgaaatagcagaattggtcacctggtgggattgaaagtcctgggctccctccagcacgtcggcttcagtgaacccagtcctcagagcttaggccgggctgcctgacggggcttccctggcatttccattcgagagaggttttggtggttctcatttcacaacagaaagagcttctgcatggaaaagaaaggatggtttatatttaaagagagagattttatcaggatggtaaagatacaagaggttgaaatttctgtttttcagtctagaccagtggtttccaagcctttttttttttttttaaacagtaagattctttctgcaaacatacttatgcagcaggaacccaaagtgtaaaataagggcaagtggtgtagtcctgctggacgtgggcgtgtgggctcgtggagccttcatcacatagtccacgtcactcctgtaactacagcaggagagactgtggagcgtcggggaactctctttttcaaagagtcatggggcatgaggtttgcaaaaggtgtttgcagtgaaacatggagctctgcagagtgtgctctccctgcacccccatctccactctccatgaatctgtacctggattggctatagatcacacagatgtaaagctttcagagtcgagcgttgcgagcataggcctcggagtccagcctaacgctcatcccaggcctctcctcttgggcaagttaccataccccactggatatcagtttcctgtctgtaacaggagcctaatgatacacttactccaaggatagaagataccaggcaagagcttagccctgtggctggcacttactcatgcttggtaaacgtctccaagggaggaaaaagcttatcctaccctttgaggtttcaggccccagagccagggctttctgacagatgcatcacctggctgaggggccaaggaccataccagatctttcaggatgctgctcaccactgggagccttggacagtcctgggcctgcctgtcagtcagcagccttgtcctcggcggttcttgggcagaagaactcagaaggcgacattagcactggggaagtgatacattctgatttccatgctggccttttagaaaggtaggcttgggtcagatcatgaaggcccttgagtgtcatgtggtgagcctggatatcatcctataggctactattgaaggcttttaaccagagaagggacacgctcagcctgtttaccatggatgaggcaattatatgtggattaaaacagctgggttcccatctgaggcagaaaggaagtgaaagtgaggagactaataatatttttattaccctatctatttaggatttttaagtggacagttttagatttatagagatttattttcattatagcagtataacatgtttactatagaagatgctaaaattgtaagaatgttggaggaaaaaaattaaccatggttccactgcccagcctcaatcattgtatgttgttattcccttttctatgcataattataataataatagctaccattttctgagtgcctactccatgatacatactattctaagctttttattaaaacagtcacttggatgatggtgcctgtgaacagccactgcactctagtccgagcaacacagcaagatcctgaatcttaaacaaacaaacaaaaacccaagcctgggccaggtgcggcgctcatgcctgtaatcccagcactttgggaggctgagacgggcggatcacgaggtcaggagttcaaaagcagcctggtcaacatggtgaaaccccatctctactaaaaatacaaaaattagctggatgtggtggcccgtgcctgtaatcctagctacttgggaggctgaggtgggagaatcacttgaacctaggaggcaaacgttgcagtgtgctgagatcacgccactgcactccagcctgggtgacagagcgagactccatctcaaaacaaaaacaaaaacaaaaacaaaacaacaaaaaaacaccaaacccttctgtgggtattcttttctccagtttacacaaatagaaatggaagggcagcgaggttaggtggtttggccaagacctcccagcttgtgaacggtggtgctgagatttccgtcctcacctttctctctgtggttctcgctcttccctgggtactgcgttgcgtgtgcgtttctgcgctctaccttattcactcagcgctaatacagaagcattttcccattccactcaatgttcgtcagtgtaattgtaaagactgtcagcgatgttatcagaatattctgaatatttttcccaatgttagaccttgagatactgccccatttatttgtaattttattaaacactgtttgatatctccgtggaaaggttttcctggtcatattattaggatagattctctgaagcagaattactgagtccaaagatgtgaattttttttttgagatggagtctcattctgtcacccaggctggagtacagtggcacgatctcagctcactgcaacctccgccttccaggttcaagcgattctcctgcttcagcctcccgagcagctgggactacaggcacatgccaccatgcccagctgatttttttatttttagtagagagggggttttaccatattggccaggatggtttcgatctcttgaccttgtgatccacctgcctcggccacccaaagtgctgggattacaggcgtgagccaccgcgcctggccaatgtgaacatttttaagtcctttgttacctgctgtcaaattgcttcccagaaaagcagtcccaagtcaacgtgaccagctgagtttgaggatgccccttgtctgaaatacatagaattgtgacctccagccacacaatcttgaactaaatcagaccattttgatgtattttgtttaacaataggagaaaagaacgtgtttaacaatcttttgcaaaagctgtatttctagcagaaaaattaatgtgaacatcaggctggaaaaatatgaagttaataacagtttgtcaaaggctaggctattcaaagcagtattttcaaattcagtcatttatattcctttactcctttaccccttttcttttgtgtatctgtcaccacctaatgttaattaggttgttaaaatgcattaacatatcaagacatggtggcactttcgcctctcacctgtctttattatttgggaaatgcagatgccctttctgctgatgcttctggggcattatttctcactggggcaagctgggatggagttatatttgtgtcgaggaaaaaaaatgattccacactttattcagcacatttttcatccttagaaaacacattgctgtctaatgttatatttcaggttcttccttcctttaaattcttagggaaaaaaaaaaatcactgctgggcccaggtcagaaaaacatgtagcttttatgtggctgttgggtctgataacagaaacatgtggctttcatatgggctggagagaaactcacatttcagataaggaagaaatgggtcaaaacattttaaagctgctgctttccctgacaacatcctttgcttgttaagcacgcttcaatttgatttggttcccaggcttgctttgaagacatgctgtgtgctagagaaggctgggcctgaggagttggaggtgagtaagagtgtgcgtggtcccctgggagaggcagagatggtaccaacatctagaaactgcagtgagtgctagttaagtcatattcacggagttcctcctgtaggccgggcctcgggcgcaatgctgaggacagagatatggactgaggggcacatggactggtgggtggaaggcagccttgtcttgagagaatagcagattgaaacatttgggtgaccatctttttctggtccccgccccaaaagaacgtgcgacttgacatggttttccctcatttgtaagtgtttttatgcgaaatgccttacacaggaatcaaatgtgcatttctaaatgtactgattggccgggcgcagtgctcacgcctgtcatcccagcactttgggaggctgaggtgggcggatcacctgaggtcaggagtttgagaccaccctggtcaatatggtgaaaccccatctctactaaaaatacagaaattagctgggtgtggtggtgggtacctgtaattccagctacttaggaggctgaggtacgagaattgcttgaacctgggaggcggaggtcgtagtgagctgagactgtgccactgcactccagcctgggcaacagagtgagactctgtctcaaaaaaaaaaaaaaaaaagcattcattttattcttcaccttgactatgtggagcaaaatactgagaataaagagaagacattggagccatcttctgtggagagacgccagagctgggattccaggctgatgggtgctgaacagcctgagatgtggtagtggactgtgaggagcagaggtccaggcagagtgtgctgctgaggaaggagggcaggcttctcagctgcagacgcactggggatagatggcataggatggttaatcttggccttgcttctctgagaaaactttggtcacacctccagagccagggtgggtgcctccctggaggagggggctttcctggttggtggcacagcaggagtccaggctttgtaccgtggacaccatgggctatggcaacaccttcctcaccatccttccatgaggacctcgggagagagtggacatgaaaccctttgtgctctgaagcattcaacagaagctttctggttctgtgcctatttctttggcacttgagcgtgtttgcaggttcattacacacatgatgaaagctctggcccatagcactagaattcatgtttttagggtttgtgagtgtgacaggtgctatggtttggatgtggtttgtttccaccaaaactcttgcttgaagtttaactgccagcatggcagtgttgggaggtggggcctagcgggaggtgattgggtcatgggggctgaaccctccggaatagattggtgctgtctcctgagagagttctcgctgtcatggggctggatcagtcaacatgagagtgggttgttataaagcaagactcactccttatgcacgtctctttgcatatgccctctggtgtttcttcttgtctgctacatcttgacgcagcccatggccctcaccagaagccgaacagatgccagtgccatgcttgtggacattccagctaccagaatcatagcaaaataaacctcttttctttacgcattacccacactcaggtattctgttgcagcaacaccaaatggactaagacaagaatgagtgtggcgtggtgttttgtactgttagctgttgtgcatcacaagtgaaagaaagtttactcatgtggttctcaatttccacagtgctgagtgttaagttacagggagaactattacagacccacacatgatatggaatgttcatcactgaccatgtatgtgccttctatgaccttgtatgtacttgattcccctggatcattcaacatctcttcttgggaatcttggccttttgatgaaacagggttaattccaaggtgtcatttcttaaagcaaactttgagctgaaataacatctgaccaggggaaagtgatgccatcgccttcttcttcccctcctcctcctcctccttcttcttcatttttattattatcattattattattattttgagacagaattgtgctctctcgcccaggctggagtgcagtggtgcaatcttggctcactgcaacctccacttcccaggttcaagcgattctcctggctcagcctcctgagtagctgggattacaggcatctaccaccacgcttggccaatttttgtatttttagtagaaatggagttttgccacgttgggcaggctggtctcaaactcctgacctcaagcaatccgccctcttggcctcccaaagtgctgggattgcaggcatgagccaccatgcctggcctgcctttttattattatgcacaattagacgtttttgttgccagtgtgccactgtagttataaagtggggagaacaatagtccaggtccttgggtgtagggagagcacttgtaataaatatgaacaaacttcactgcccttctgcaggtgcctcttttctgctggagccgctgcttgtggcctctctggtcctggaggcactttccaggggagtgttatcttacttctctggggcctcatcaagttaaggaacttgccaaattcaaacacctgttaaaggagcagaaccaagagtgaactaagtgtcacccattcaaagtctgaactcttctcagattctttgttgcttctggccatctgtattagtctgttctcactctgctaataaagacatacccgagactgagtaatttataaaggaaagaggtttaatggactcacagttccacattgctggggagacttcataatcatggcagaaggtgaatgaggaacaaagtcacgtcttacatggcagcaggcaagagagcatgtgcaggggaacagtcctttataaaaccatcagatctcgtgagacttattcaccatcacgaaaacagcattggaaatacccacccctatgattcagttacctcccactgggtccctcccatgacataattcccatgggaattatgggagctacaattcaagataagatttgggtggggacacagccaaaccatatcactggaaagctgtacagttgctggagagatgataggatccatccagctttaggaatgtcagagttgaaaagccttgagccattgctgggtaggccccctgttgactggtggtgactgggggcagggaggggaggtggctgacctggtgttagagtgcagacctctgagtttgggactgtggctcctgtgtacctgcatgtgacatcctctcagttcctgcatgggctcctcagaagatgacacattctcaaccctgagctgcctcttcttaaagtgggtgcagttcctctatcagacccctctttgtccttgtgattcatgtttttgcccatactgccttcagttcctagaataatttcctttccccacctaggaagctcttttccatccattcatccctgccccatcccacctctggccttctgtcccatatctggaagccctcccccgtgttcagccatgtacctcactaagcctccatccagtgcagttgccactccaccctccctgcctgaggccaagattttggtgggatcaaagagtgctgaaaagcctgggcttgaacttgagtccagccactcctgcgtgacttaccttctctcagcataacagcagtgtcttcccatggcactgctataaaaccacaagcacttttgcagttttctccttgccttttgttaaaatgaaatgttctctgaaaagttcttccaaaattctatacaactttgtatttttgcaatttgaacgcagagaaaagcatgaagagatggtttggaacaggttctttcttgtctggaagctgattctgggacagtttttctttctttcacagtaatttccagttaaatggagatgaactgcatgctttgaagacagtttgccttgcagtgtttctactagtgttactggtttttcacactttgtatctaattattttatctccatgacaaatgcaggataaagttctccattttctgaggaaagtcatgtttttccataagaaacatcacgattgtccatgctggacttttctatctggggccacgcagccttttccatctcctctcccaggtttctcttgttctggccctgcggtcctgcagctttcctgcctttccgttttctacacaatcattcttccgcctgcattgctttctccccatctcaacatttctggtcccatccctggggcctggcccagctgccgccttgttcaggaagcgactcctgatgtccacagtgggaagggtcctctccctgttctgtgtccttgccttgtccatcacatcacatcgaccagccacttggccttggagtccccccagcaagcatctgccctgctcaaatgcatgcaagcagaagatagcggaaggcaccttctctgggctgcctcagccctggggctcaggctgggatctctggggtcagctcttagagagtaggcatctggtcacacctgccttggtacctaactctctgagatgacagaaaagaaagctagaaagtcattagattatctttttattttttattcttttccactaagctacatgttccctaagagcaaggattatgttcattcacccatttattcatttactcaaccattatttattatcttctgttgaacaagtgaaccatgatccctgtcctcatgaagctttcagtctaatgggaagatatttgttcaatacacaaacaaatatgtattatatttatattttgtggttatattttcttcctttttttttcttttgagataggatctggctctctcactcgggctggagcacagtggcacaatctaggctcactgtatcctttacctcctgggttcaagcgatcctcctgcctcagcctcccgagtggctgggactacaggtgtgtgctaccatgcgcagctaatatttaaattttttatagagacagagtcttgctatgttgcccaggctggtcttaaactcctgtgcttaagccatccttctgcctcagcctcccaaagtgctgggattacagatgtgaactattgtacccagctgattttgtggttatgttttctatacattatataaatgttatttacattttatgtttatgtcagatgtaattacatctatgtcaactacaaattttaactggcgcatgatagttgcttgcatggatgaactcatagcagcttggatgtggccttggtgagggctgtgtgacagtaggcgccgatgccaaggccagccttggggtgccacggccgatcttcgtgatcgtattcagacctcacagtgagtggcctaggaatcgggtgttgtcatctctgagtttcagatgggcacccagaggggatgggccccatggcctgagggacacagcgtggaatgcggatggacacacgttggctcgggaggcctggcgctctcctctgcactcttcctttgacctcactttctttgatgtttgatcctagctagatcctggctttttcagaaagaacagtgtctgtggactttttactttgtgaagcaaggatgcacgagttgtaaagcaaggatgcagctctcacggtggtgtcactggagagtgtcaccgaaggcccactgacgagcaagggccacacacacagcagccaggggagggcagctcttttcgaggctctccggggcgccattttggcagtgatgtcatcaagtggacatttataggccatgctgtgttccacacatgcaaatcagaaactctcttccttatgtagactcgtcacagtgctgctatgtatatatacagtgcttaagagtggttggacagcttgcgtctctccatctccccacctgtaaaatggggatcgtgatagcacctcctctcaggactggcctgaggtttacaagaatcatgtgcaaagcctgcaggaaagcaagggcttcctgttagctgttattattagcactgctcttctcgttatcgttgcattagaagtgggctatcataagagatttcactccaatgtttagttgcttcaaatcagtaactgcaaaaggcagctaagcagaagtgagtcaaaatgccccgtgtccagcttcagaaggatattttccttacagctgttgcagctgaaggtgaaaatgtgtacagccctagaaatatcacagacattggctctacatccaatgtgtcggatgcctctacagtgaagggcatccgaacacttggcagcctcttcttttctcctatggaaaagtggttataggaaagaagggggatgatgctgtgccgtgctcactttactgacgtgcatataatatacatgcttaacaaatgttggagctgatgatggtggtggcagtgatgacactggctagctacttatatggcggcagcgaaggcagttccatggggctgaaaccctcctaatggaggaggaataagtgcctttgcatcccacatggtggcgataagcaggctggaggaggagagggatgtggggactttgtccataatgacagagttgaggtctgacattcgtgctgtctgtgggctgatcttctctgtcttcactccgtgatgaccacacagagctgctactaagttggccccaactagtcaagagttattaaaataatctttgtaatgagtaacaataaaaacatagtttctctgtgaatagttttatgtacattatagcatttaacctccaagacagtctagtgtggtaggtgtcggtaactccattttataagacgcagggcctagaaggcaaagaagggtggtgtttttctggagtcacctgctctggggccgagccctgtctgcagggctctgatggtcaccttcttgatgggcacacattgcctccttttattgcagaggagagtgggtcagaggcaggaggtctaggcttcagatctcttctaacatgaaggctgacattgggcaaatgatgtctcttttctgggttccagtcccctcatctaaaaaaattgggtagcaattttcctgaggtgcttacagggatcagcatctgaatgcaggtcataccactggcgatcaacagcaccagaggcccagctacttgctgtggtcccgtagtccctgccctctgaccccttcctgtctgtgcccgacgttctctcttcctgaaggacctccagagctctccactgagcggcccttctttcaagaggcctgcattgcccacaatcagattgtgactccaccgagctgaggtctttcacagcttgatcctgcttgtcttctcctaaggaattggccccctcagggcggggactgtctttcctctgagtttttcaagtgcccagaacaaagtctgtctgacaacgagagcccagtaagtgtttgttaagtgcagcgacatcagccaagaaccccatgtatccttcccaccctgccatcttctgtgcatctccttccttcccctacggagggaccctggtggacgggaagcagatgttgatgaagtggcctcccttttggagatgaggaagagggacggggaaaagctggaaggggatgcacttgccctgaagcccaaagtagtggcttttctgagcatttcttccttagggtgacagtgaagcacggctgtgaccactggagttctgattgctgggtagttcgggggatgctgtgtcccagggcccgcccactccagtgtccctgggctggaggggtgtaggaggaggaggagtcttgtcaggaaagcaaccctgactgcctcctgtcctctggacctctgtgaggtctgcttacctgccctgcactactcattccgtgctgtctgacccacgatgcctttggaattttgtccgtgatcgggagcacttcctgtctgtgacggtaaagacctgcattgggcagtggcaggagggatgaaaggcgacacgggggtccttggctggttctccacgtctcattttcttctcctggacaatggacttgcctcacaggattgctgggaggatttaatgaggtcacaggtgtgaacatgcaaggcagacgtatatcagggatgcaataggtgattaaatttaactcatttactagggaaaattttaaacgtatagaaagtaaacagaagaatgtgaggaaccatccacacatccattaacagcttcagtaatcatcaacgttgagccattcccatctttatcatccctacccaggtcaccatcccatactgagtgacggtgttgagaatgatgatgataatgagcttcagttactttatttcaaggtaaagctacacacatttaaacacacacatcttaactctacagtttggatggatggatacattctattaacccttctccctcgtagaacatttctatctccccagaaagttctcttgtatcccatctaggttaatccccatacgctaactagaggtgtcctcagttctgatgtttttgcctttgcctagtttagagtgtcacataataggcacctcagcataagtgctcttctgtcctgcttctttgctcagtataatgttcgtgagattatcccagttgttgtatcagtagttcatttctttttattgctcaattagtaatccattgcatggacacactgtaatttgtttattctcctattgatagacatttgttttcagtttttgactattatgaataaagctgttatgaacatttttcaagtaattttgttgacatgatttttctttcttggaaatattgataaattggaaatactaggagttattaaggggtagaattgttaggtcatatactaagcgtgggtttaactataagaaactatcaaaacagttttataaaatcgttgctccattttacattcccccggcagtgtaagagctccggtgctgtgcgccttcaccatggtacagtgggatcacattctaaaactgtagtcattctggtgattatcttttcattgattataatttatggttccctaattctaaggacattgaacacttcttcatgtgattattggccattcatatattttcctttctgaagtgtctgttcaagccttttgttcattttatgggttgtttgtatttttatagactcgtaggagttcttgaatattctggatctaaataatttgtcagatatacagtgaagtgaagatgtatctagtgaagatatatatatacatatgcacatatatttatgtacatatagtgacactatgttatgtatacacacatatagtgaagatatatatatatatgcattgaatatatagatataatacgttctcctagtgtatatctgtggcttgcctcttcaccaccaccgctcctcctcctcctcctcctcctcctccttcccttctcctcctcctccttcctttctcctcctcctcctcctcttcctcctcctcctcctcctccttttttttttgagacggagtctcgctctgtcgcccagactggggtgcagtggcgcagtctcggctcactgcaagctctgcctcccgcgttcaagcgattctcctgcctcagcctcctacaggcacatgccaccacacctggctaattttttgtatttttagtagagacagggtttcaccgtgttagccaggatggtcttgaactcctgacttgtgagctgcccgccttagcctcccaaagtgctaggattacggcatgagccactgtgcccggctgcctcttcatttgttaaaaattcagatctattgaaatataatttacatgcactgaagttcactctcgttggtgtacaattctgtgaggtttgacaaggttatctgtgaaaccacaccaacaaaataaagatacagaacaatttcttcaccttaaaaaaatgtcccctcatactgccttgtaggcaaccctggcccctactccaaactcttgacagctgctgctctgttttatgccttatagttttgttaggtgctttttctgcgtcagttgagatgattgtgtgattttaatcattgattttgtgaatgtggcagagcgcactgattgactccagtgctaactggtccttgttttcccgggatcaaccccgctgggctatggtgttgtcttttccctactgcttgtcatacgcagtgtgtgtgtttcaaaatctcttagctacttttgtcttaacaatttgctcagagcttttgtgcgttttatgagccagagcgtggtatctgcttgtccagagaggcccattgagagaaaggagccactgcttatagaacccctgcattattgcatgtgtcatcaacttaacccccagagaccctgtggggcaggcattaccgtccccatctacacgggcagactgagggttccagaggcaggcaccgggcctctggcaggactgtgcaactccagggaaggcccctttgtccagcacgtcagggcctcccaagacattgtgccttcctccagtatcacagggctgctttctaagggggagactgcacgcttgagcccgtgtttcctcactcttccagggaaagtgcctgttcttttctgccagtctccttgcccacagaagaagcctggttggggcttaaaggacaaagtagatctggtgccttttagggccagggactgagcagcatgaccgctggagtgagagcgagactgtgagtgtcgagggctggtccacagaggttcctggcctccagcagtcccttcttgcagctcagtccatcaggcacaaccacaagctgtaggtaaggcagtgggtttcaatataagccagacatgagtttgaatcagctgttatcacttagccttggcttcagctcaggcaggtttcatgatctgatcctccatttcttcatctggaaattggagaaaaaataatatttacctgtgaggattaggtgagataatatggggcaccaaagctcaatatgctagaacgatcgcacgcactaacgcttggtggtcctgctcccgttgcttctggccgagtgctgccaaggcctgggccccccgtccctctgcttcacaacagagcctgagctgtaggtaagagacgtggagggcctggcacccagggctgtaggtaagagacgtggaggggctggcacccacaactgcctggcaatgcttgtttgcctgtctccagccctcctggaagtgtttcctgggcctgctgatggctttgatcatgtgtggctctatggagagtctgtgtgtgtggctttaggggacagccctgctggtgtgaaatgctggtgagcagcctgatctttctgagccagtttttggcgtgttttgagaacctgccacactcttctgtcactatggtcaatttcgaaacgaggccctactgttcctcccctcaaggagctccttgtctaattatggagcaagaacagtctggtttttctcatcatttttcctcatggaattactaattaagtgtcgattattgaaagaaaaatcacatagctttgagccatcattatgtaggtaggtatgtatatattatatatatgcgtatgtattatggatatatgcatggatttttttacattaattccagtgctgacaaagtttatggagactgacatatgaatatgtttctgttgccaatgtaagttggtacaatgtcttaagaaggctgcatgttaacacatatcatctgtgctgtgacatttctatatgttgcctctaccttaaaataattcaaaagtagaaaaaaaggtatgcgtgaagatgcccttccaagtgtatttgtattagcaaatacgagaacaacttcagtgcccctcgtgctggtgaattttggttgtcaccttgactggattgaggaatacctggagaactggtaacgcgttgccgctgggtgtgtccctgaggggactggcgtgtgagttgggggactgtgtggtgaagatccaccgtcagtgtgggtggcaccatccattagccgggggcctgggtggaacagaaaggcagaggagaggagaattgtcttcccctcctggagctggaacacttttctcttcctgcacttggacatcagaactttgggctcccgggcctttggactctaggactgacagcagcagcctcgagggttctcggcctgtggctttggaccaagggctacagcactggcctcactggctttgaggctttcggacctgcagctcctctggttctccagcttgcaggcggcttggtgtggtgaacctagggattgagttctcctaatacatcccctctcatgtctcatgtgcacacacactgtgtctgattggtcctctagagaaccctgcctgatacacccatcagcaggaaacatttctggtggcttatggtttatttaagtgatgctgtattgtggggtcatatggggtatattaatgtgatttgcaggccacaaagttgtctaagtttatgcagattatactcatttataagttgcgtgcaagtaaacagggcccagagggaccgccctcagtgaagcaacactgaggccttttcagacctctgtgctgagcacttacgtcttggtgccttacccatgcccaccaaattccacccccgccgtttaaggtggatcacattcttactgtttagaggaatagactgaggccttaagttgctgatttgcccaggtggggtgggcagggaaggttgacagtgggctttgagccaaccttcagatcgtgggccctgaggtttctgcgccactgctacactcagtggtgagagaatagcaacattcaattgaatatgttttcttcttcagcagatactgaattctgctgttatgcttgcattctttaatggttccttgagcacagcggcttcaggaggggatcgggacagctccctttgataagcgtaactgtgctctgagccctgggcatggcctgctcattttgcttgtgctgggaactggactcaggcacagccagttggcttgtgcatttcagaaagtgagtttgtcggcatcatttaaaaatcttttccttcttgtgtttttttatcccctatatattgtggatgcaagggaaattcaaaggtgaattactcaatatagttacacagattaaataatcaaacttgcattgacacagaaaggttcatgcataattcaggtagttaatactcactgatttaatttattaggcaaagctatatcgttgtgccaaatgaagagctgttctgaatgcagattgaacaagcgtccagagtagtgctgtttgtggtaaactaattaggctttgattgtggcctgcaaaatacaaatggatgaattaagctatttcgattgaagaatttcataaggcaggtgatcatccattcttgtttaactagcggcctgatttcatgacaagcgtggctgagtttgaatcattcatttggaagagcaatattaatgatgggaatgtttttgaaagtgaaacttatttaattcataattgtttaaaattcctgagtgaaggtcccctccaaatgtaagagttcatgtcacttgtgcagcctgcccaagcgtctttgccctgatgcgaggtgactgtgacttctctcagttccctgcaagtctaattggtcttctggttgcatttggcatctgtgtcttcaaggctgctcatggccagcagaaaacagagctgcttcccttgcctggaaagccttctgtattctcttcatcccttcagaagctaccatttctttcttaaatgcctcaatgtcacacctccatgaagccttccacttccccaggcagctctgctctattactgggtggcacgcatagcactggggccgtgagggtgaatccgtcataatccttgcttgtaaggagctcagacacaggagactgacaattcccacacgaggtctccacccacccgcatacacatactataggtaagtgcaaagttcagaagcaatacgggcaacaaaaaatggacacataaatccgcttgttttacttgcctaatgagaaaacatgcctgctcagacactgcaggtgtggggctgggtatgggccaggtgcttccactggtgacatgatgcgtgcctcagttcttctttccacagtcctgtagagcactgaagttggcagccaagcttctctggacttctttccttcctttgcaacatctttttctcacaagtcttgccttttctctgcatgagctctgattggtctaggttaataacacatatagagaaagaaaataagactcttgtatttgatactcaccccctttactgtgtttatattgtccctttatttgccctgtgaccttgatcaagtcactctcttctctggattttcatctgcaaaatgaagaaattgaggaagatgcccccaagttcgctttcagttcttttctttgcttagatgcaaccagggaccaagctctgtcctcacgtaagtggacatggacagtagttctcatgggattgagggaaatcagaacaggtggtctattgccaagagcccaatttgatcatttaaaaacttagaaggttggtggggcgtggtggctcaggcctgtaatcccagcactttgggaggccgaggcagacagatcacaaggtcaggagatcgagaccatcctggctaacatggtgaaaccctgtctctagtaaaaatacaaaaaattagctgggtttggtggcacacgcctgtagtcccagctacttgggaagctgaggcgggagaatcacttgaacccgggaggcggaggttgcagtgagccaagactgcgccattgcactccagcctgggagacagagcgagaatctgtctcaaaacaaaacaaaacaaaccttagaagattgaattagaaagaaatgggtctttcataagccatggctttttctctgaatgactgcttacattctgttgaacagatatgtgacaaaaatgtttcaagcagaggaaatacgtttaccctattcaagactcctgtcacttgtccttacagatgttttccctaagcttacagctggaacctggagagggtgcctgtcagtagatggcttggcttcacatgcaggagcctttcttcctctgacagctcccctgcaagtgctgcagggaaaagactgcagcttcccttcatcaggcatgctttgtgccccttggcactgctccctgagatgagggtgcccatcctttggtgccaggtatctttgatctctgtctccttttcagatttctttttaaacacaatagttttccattatatattggacttatataggctttgcaccgagtaggtgttaagtacctccctgctggttgagaattgcatgctgcatgtaattactcactgattaatgtctttacattgacgtatttacaaattgtagtctagagtaaacctaataaaaacttctggtattcattttctcagacagacatttcattttgcctgtattctcaatctcacaggtcttgccccagctcatatcaacttagttcagttcaattcactgcacttcaagagatattcattgtgtggcccgtgggggagcgacattaaacacagcacaatcgccattcttaaggagctcacagccatctgatgaccatcggcatcttcagtgtctcccttcacataggctcaggtctcccggggcttacaaagtgcttctgtgaactctccaccccacttactgctcccatgtctccctcctgttcatcagtggtggatttcatccacaagagtcacatgtcagtcggttgtcacatcttcagactccacttctaattctaattctactgctatttctaccatatctgcagttacttcctctgccaaagtcttgagcccctgaaagtcatccatgaggtctggattcaacttcttccacacaccttttcatgctgctattttgacctcctttcaggaatcatgaatgttcttactggcatctagcatggtgaatcttttacagaaggttttcaatgtactttgcccagatccatcggaggaatcactatctatggcagctgtagccttatggaatgcattttttaaagaatacatgtacatgtaaagatacattggcaaatgtcaatgtttgcaaaattcccaggactctttgatccatgggctgcagattggatactgtgatagcaggcttgaaaacaacattcaccttcttgtacatctccatcagctgtcttacgtgacgtggtgcattgtcaataagcaataatatttgaaaggaatctttttttctaagcagtaggtttcaacagatggcttaaaatattcaggaaaccatgctataaacagatgcgctgtcatccaggctttgttattccacttaaaagcacaggctgagtagatttagcatcattcttaggggtcctcgaattttcagaatgggaaatgagtgttggctttaaattcaagtcaccagctgcattagcccctaacaagacagtcagcctgttctttcaagctttgaagccaggcattgacttctgccctccagctatgaaagtcctagatggcatcttcttctagtagaaggctgttttacctacactgcaaatctgttgtttagtgtagccatcttcctcaatgatctttgctaggtctaatggatgtcttgctccagcctcttcatcagcacttgccacttcacattgcgcttttatgttatggagatgacttctttccttcaacctcatgaaccaacctctgctagcttcagacttttcttttgcagcttcttcatctctctcatgtttcatagaattaaagagagttagggcattgctctggattagattttggcttaagggattattgtggcaaggtaaataaccgtggtaaggagcatcaatacaagttgtattaagcatatggatataatgtcttccttggttataggggatgatatcttactgccaagatcaccaaccttatcctttgggcgaagtctgtgctcattaggaaggggagatgacagttgtgtgaatgtaacaggatcatttcttctcactgtagagaagaggtactgcacttgtagttcccatggacaaacattgtttcaggagacttggatgggtagaggcctttacaatcctgcagtgaatggggggagtcttttgtatactagcagcacatccaggccataatactgtatcctttttctttaatctggtgtccaaaccagtcacagagaaatacctcctagagatcctattgccaggaattagtaatgttgctgagataacactggctaatgtttgtgcaattcccaggacaagaatctgaagttttcttttcttcacagcttcctgccgctgcacttagccctccagcatttaagcctctggaatatgcatgtcaatttctctttgctttgttacctctctaattctgtgaggaccctgtgcgcctgcaggggaaattcacaagtataatatctttcctgccttccaggagctctgggtctggcatgcaacgtgtgctatcaggtagagataaagactgccatcctagcttttggtttcctaagagcctttatatttcatccgttttaaaatgcctccttgtcgctcctgtgcttttctgtttccgcttcctttttacccttagagtggcaacctccagctcatgttgcacaggactctaggtatacatcgatgaatgtcacgttgtaaaaccagaaaaggtaaaagaaagctgaccatttcacataacccattattgtatgaacacaatgctatttttcatattttccaggaaagggtcatgtgggttagtgtataattggcatagaaatttgttattcctgccaagtgtaacagtcgagttgggaaaattaattatgtgactatgtcattgtagacaggtatgctgttctgatgcactgagtcacaaaaccacactagataaatggctacacagagaaaaaggaattcatccttcacttcatggaggaactgccattttaggagggcctgcagcagagagtcgaatttttgctggcaggaaagaggagacacagtgtcaacagagaggcagagcaggggccagcatgtttcgggaggcagggccacccgtgtgccttgcatttaggggtgtgataggaagcgggcaaattgtgaacccgaaagggtgacaagagagcaggcaacatgggccactgaggagacactcggagaaatttgatgcataccccgcccgcaagtcccgctcttaaggaaacacagagcaattcctcaaaagcagaaatatttctggttagtattagttcagcatcctgccgaaataattcttttatggaaaaaagtatgcactaaatcttatagtgtgactagtactcaggcactgtttttactgattatcaaaatctaagttttctttattgccgttcactgttctgttccccgatccattcaacaaacatttctcctgggcctcttatggtataggcttggataaggcacagtctgatgtgtttagagccctggaatgccacatgctaacagggacatacactaaatcaactaggagctctaagaacaagatggccgtaggattatttctcaaagtgagtaccgtgttacctggctcgtgaaaggtacgtgagaattgactgcgtggtgacgtgaggtgagagcacaggaagcggaaggccacgtgggccaaagaggagtaactgaaaaccaaaatgtgttggtgatatgcttaggctttgtgctcccacccgaatctcactgtaaattataatctccataagccccatgtatcaagggagagaccaggtggaggtcattgaatcacagtggccgcttcccccacaccgttctcatgatagtgggtgggttctcataggatctgatgggtttgtaagtgttcaggtgttcagtagttcctcctgcattcacttctccttcctgccgccttctgaagaaggtcccttgcttcccctttaccttctgccacgattgtaagtttcctgaggcttccccaggcatgctaaactctcaattaaacctctttcctttataaattacccagtcttggaaagttctttctagcagtgtgagaacagactcatacagttggctactgagaagtagtgtgtgatagtcggggtgctgggtggctctggggccaaattggggatggaatgaagaccctccattccttcctcagaagctttctgagtgccaccatgtgccaggtgccactgtgcgtgccggtaatgacgcagtgaataaggttaggtttgtgctccccataggagctcatcttctagtaggagagcagacaagcaagtggacaggaaagcaggaatgtggctggtggcaggtgctgtgaaggctggaaacaggaaagtgatagtgctgagcagggcttacaggaagtgaggagggtctctgagggcgctgtcaaaggtgagccttgaggagtaagagggacccagaggccagtggaagaggcagggagaagcagcagctggagtaaaggccctggggctgcggaggacacagccaggacataaggaatgggcgagagaaatagaaggtgaagctggaaaagcaggcaggagccaggttacacacgtcctaccgaaatgtcatgctcagtagcgtgggtttattccgtgtctgagatcatgctgaggtctgatcatgcccagtaggatggaataccgagcatcagagatctcggaggaggggaatgacaggcacagccccttgcagagagcccgctgtgtacagggaaggtggaggcccatcctggtttcaggcaggtccatcccaggccccatcctgtcctgccctgcagacctgtgctccactcaggctcccaggtggtcaggcgggtcctggaaggtgttgcctttttcctcaggtcagaagggtgaactgcagggaggcccctggctgtgcgtgtattgtgtttgagtgtgcgcacacctgcgagggaatggggtgtgactgggctgttagctttgcttgatttgcagttgtaaatgtggagatgcgtgggaggtggccctgtttgtattctcaccctgctccctgtaatgttggagtgggcctggtctccaagcccatggtgggaggactggcctggagaaggtgttccgccagcacatattgacttcaatgctctgttaatgacaggatcagaggtctccaaagcccttcccaacgtgggccctgactgctgctccattctcagcctctcccccttccgtccaggcttctggcctgttcagttttatatttttgttgctttgtgattagagcaagtgcccagtgcttccacttcattcgcctgtctacacctccttttccttcagagcccagctcagacagcctgtcttttggggtagcctcctagactgctggggctggacagggcgcctctcctttgttcaaggctctgtggcacgctgccaagcctgtcagagcggacatggctctgtactcactgtgccgtggcctgtgcttgcttctctgcttcctgcttgactgcgggctccttgaggacagagaaccggacttgtgtatccatccccagctccgagacagcatctggcacatattaggtattcacgaaatgctcttgattagaagaatcaaaattaaaatatggcctcaagagctgcaagagaggacacaacaggctgccgggcagccttgggaatggcagtcttcccgtgaacaccttgcctctttcatggtgctaagagaatatttataaattaagggcttccaccaactccagtgtgaaaccaaatgttggccttaactgtttctgaaatcttccaatggctccccagtgcctacagatctgtttctcaattctggcttctcattagatttgaatgatctgacgatattaaaaagaatgtgcaggccccatgtcagactgcctgaatcatcatcggaggtggggatagtttacagtctctccagactgtgacagtgtgactgggaaatgctgacctgtaatgttagatccctcattcttaaagccttgttttcacaaattggctgaatattggaatcatttggagagcctaagaattcagcccatctggacatggccttcgccctaagatctctaagagcacactgggtctgccatgatggggcaactggtgccaggcctgccctcctgctgcaaaccactaaaaattatggggggatgaattaaataagggtcgtcagataatagacaaaaatccttccccctaatccttcctccccccagaaataaaccaaaacccacccagcacagcactgtggtctctgagggcagagaagccaattcggtagtgcccgtgggcagggatgggtagggatgggtaggaacaggtagggatgggtagggttgggtagggatgggtagggctgggttgggacggataaggatgggtagggatggggaatggcaaagaatggcagctttgctcagtggcgggggtggagggcagagtgcaggaggccaaggggctgaaatttggggcagaacattagagaaaaaggaactcagcaaagagagagctccagagtcttctgggggtcaccacaaggccattgctgaatcctaagctgaacacatggagagtgaaactcctgcaggcaggcagagaactccaggcaggtgtgcactgaagaatcccagagcctcacagccaggggagggacctcgtgggacacccgaggccttctggatgagagaccacagaaaagccccctacttagcagtggggccggcctggccccagggtgaaggctactctggatgtgccttaagaggactggaaaacaggcatcagaaagaacgagctgctccacaggtaacgcaactgccaatcaaaaggagacctgacactctttaaaggatgacagcgacattcagacatttgtcaactgaaaactcacagtgccctacaaaactagcaggaagataggaaccataactgggaggaaagcctgtcactggaagcagactcagaaatgataaggatgatggtgttagcgtacacagactttgagttgattgttagaattatgcttaagaatttaaaggaaatcataaatataatgaggaaaggagtggaaggaaaaggacaacatcaaacatttagagctgaaaatgcagctcttttatcaagaatacgtgaataaattttgttactcaataacatgaaaacaacacaattagaagtgtgcaaaaatgtgaacaaacacttcataaaggaaagtaaatagatggccaatgagcatgggagaagatgctcaatgtcacagattttcagggaaattcaagtcaaaaccacgattagacactcctacacacacattgcccagaagaccagtggcgtatgataggtggaacgcacctgtactgctggtgacagtgtacaatggtgtggctactttgttgaactattcatcagtttcttttaaagttaaacatatagctcctgtacaatgaagcaaactcacttctaggtacttacccaagggaaatgaaaatgcatgcctgtacaagacttgtactttgatgttcattgcaacgttattcagaatagctccaaactggaaataacccctgcagccaactatatataaatcaatagttgtagtattgtggaatgctactgacaacaaggaacaagctgctgctccacttaagaacgtggatgaatttcaacaaagcatgctgggtgaaagatgccagacacagaaagtacacactgttatgattccatttatatgaattctagatagatagatctagagagaaagcagatctctgttgtcctggaggggtgagagggctttggattggttgtaaaggggcaggaggaaggtttagggggtgatggagtggctttatcttttctctgtgtggattatacaagtatacatttgtcataatatgttgaacttgacagttaaatatgtatgttttattgtatggaaatcatacttcattacgatggatttaaaaacagcagcagcaacaacgcagaaccagcctcccaggagtttctagtatgcagcggagtctgagaacccactgccgcaaaggccctcctgactctcccgactctcctgactcggctcccagctctttctccatcatggctgtttacactctggccagagcccatgtggagttgcatgcggctccctgcacaaggcatcctttgtttgttttcttttcagatctgtccatttgcctaaatgtctgtcttccacattctctttcgtccccacaggccttcttggcaaccctggttctcccggctgttcttagttcctccttccactgtctgtcttgcaggtttccgtcaggatgctccctgcccagcttgtctttgtctgtgaggttccttgtcctgtattgcgagaactttgtaggcccaggccctgcatttccatctctgttttccgggtgcacagctagcccaggcccagaggtctctagcgagcaaaagaggctgaagggatgaatagtgaatgaatgaatgaatagttgaggacagttcatagagtcatggggctggaagaggtgagggctgtgttctcatgcagagaaagaccaatcaatggaggaaatttcgccagtgggtttaaatgatcactgaaccccgtggacatttacagggagggcattttggaactagttgtcaaagtgacaccgtagtgtctataacctcctcccccacccacccctaagcacatcatatattaaagattctgagaagtgactggagaaaaggaaattaatgttccaccattgctgactgatttcaatctcagctcatttcaagggctgacccaggaattttctaaaaccaaacaggacagtgtcccagaagtccagagtagacgtgccccatgagctgtcacattcgcgagcacttctgtatgcaatgcgcttagaaaaacaaaagctcagctggaatgccagccgttgctgggtggatgctgcccccagcgtggtgcaggtggtcggagactggcaggaccacctccactagagctctggtgtgctgagctcatcctggatcagacgctgggccacctactgcatgtatgagtttgctctcattttttttccattgtgggaagaacatgtaaccttgagatggtttttaacaaatttttttgagtgcaatacaatattgctaaccacaggcacaatgtcttatggcagatctctaaacttactcaccttgtataactgaaaacttgatacctatggaacacaactgtccgtttcccctctcccagtccccagaaaccaccatgtgacttcctgcatctatgagtttgaccacatcccttaactaagcagaatcgtgcagtgtttgtccttctgtgactgctttatttcctttagcataatgtcctcaagcctcatccatgttgtagcatgtggcagggtttcttcttttgaaagattgaataacatttcattgtatttatcgaccacattttgcttatccattcatctgtccgtgaacactgaggttgtttctacctcttggatattgtgaataatactgcagtaaatgtggaagtgtacatatctctctgagatcctgatttcaattcttttggataaatacccataaacagaattgctggatcatttagtagttctatttctgattttttgaggaaacttcatactgttttccatagcagctgtacctttttccattcccaccatcagtgtccaaggactccaatttctccacatcctcactaatacttgtcattttgattttgataatagtcatcctaacaggtgtgaggtaatgtatcgtcatgtttttgatttgcatttccctaattacttacgaggctgagcatcttttcatatgtttgttgacatttctatgtcttctttggagaaatgtttctatttaaatcttttgcccatttttaattgtgttatttattaatcatttattatttattatttagttaactacagtagttagttgtaggagttctttatacgttttggatattaatcccttatcagataaatggtttgcaaatattttctcccattttgtaggttgccttttcactctgttggttgtttcattttctgtatagaagcgttttagtttggtatagttcattttgtctggttttgcttttgttgcctgtgtttttggtgtcatatccaagaaatcattgcagagaccaagtcatgaagcatttcccttatgttttcttcttggagttttaacattttagatattaaatttaaatctttaattcattttgagtttctttttgtgtatggtataagataaagattcaattttattcttctgcttgtgggtgttcagctttccctgcaccatttgttaaagtgattatctgtcccccattgtgtattcttggcgcctttactgaagatcagttgactttatatgcataagtttatttctgagccctttattccattgatctcatatgtctgtcagtcagtaccatgctaggtttttgttgttacttgttttttgttttttttttagagacaggatcttactctgttgcctaggctagactgcagtggtggaatcatagctcactgcatcctcaaactcctgaacttaagccattcttcctcctcagcctcctgagtagctaggactacaggtgcacaccactacacctggcaattttttttttctttctgtagagatggggcctctctgtgttgcccatgctggtctcaaactcctgggctcaagtgatccttctgcctcagactcccaaagtgctgggattccaggcatgagtcactgtgcctggctaccatgctgttttaattactatagctttgcaatacattttttaatcagaaagtggatgcctccagctttattttggtttttcaagatggttttggctgttctgggttcataatggttccatatgaattttaaggtttttctgtaattttgttaaaaaaaagcctttgtttagatggagattacatctgtggattgctttgagtagtatagctattttaacaatattaattttttcaatctatgaatacgagatgtccttgtattcatttgtatctttaattttgttcatcgatattttgtagttttcaatgtacaagtctttcacctccttggttaagtttattccttagtatttttgatgttattatgttattataagtgaatttgtttccttaatttctttttctgatagttcattgttagtgtttagaagtgtaactaatgtttgtatgttgcatcctgtaactttgctgatatttgtttagcagttctaatagcttgtagagtaatgttttctggatataagatcatgtcatctgcagaaataattttacatctcttctgatttggatgccttttatttgtttgcttttcctcctaattgttctggttgggacttccactactgtgttgaatagaagtggcaagagtggtcatccttgcttcattcctgatattagaggaaaagccttcagttttttttaccatggagtgtgatattagctgtgggcttttcagatatggtttgtattttatcgaggtaatttcttcccattcctggctcgttgagagtttttgttatgaaagggtgttgaattttctcataggcttttgctgcatcagtgcaggtgatcctgtgattttgccctttattttgttaatgtggtagagccacattgattgatttcctgtgctgacccttccttgcatccagagataaatctcacttagttaatgtgttgttgaatttgattttctatattttattggtgatttttgcgtccatgttaatcagggttattagcctgtagtttttaataaggttcttgtctagctttgggattaggataatgctggcctcctaaaatttgtttggaagtgttccctcctcttcagctttttggaagagttgagaaggattggaattaattctttaaatgtttgacagaattcaccagtgaagccatctggtcctggaatttcctttgctgggaaatttttgattactaattccgtcatcttactagttgtgattctgttgaggttttctatttctttgtgattcagtcttggtaggttttgtgttttttttttacgatgtagccatttctcataggttattcaatttgttgttgtgtaatggttcatagtcatcttctaatgatttttcagatttctgtggcattgattgtaatgtctcctctttcatttctgatattatttatttgagtcatcttttcttcttcgttttttagtcccactaaaggcttgtcaattttagcttttctaaaaatttagttgttttttaaaatcatttttgtattctctatttcatttatttttgctctaatctattattgtcttccttgtgctgatgttgggcatagtttgtttttttctcattcctcaaggtgtagagataggttgtggatttgaagttttcttttttattacaggtgtttattgccacagacttctctcttagtactgctttcctgcatcccataggttttggtatgttgtttttttgtttttgtttgtctgaagatatttttgaaatttcctttttgatttcgtttgaaacaaaattttagattcaggagatacatgtgcaggtttgtcacatggatgtattgcatgatgttggggtttgggcttctgtggaacccataacccaaatggtcaacatagtacccaacaggtagattttcagaccttcccttgacctccccacttttggagtcctcagtgtctcttgtttccatctttatgtctgtgtgtagccattatttagcttccacttttaagtgaaaacatagagtatttgattttctgtttctgtgttaattcacttagcatagtggcctccagctacatccatgttgtagcaaagggcatgattttgttctttgctatggctgcatagtattccatggtgtatatggaccacactttctttatgcagtccactgttgatgggcatctaggttgatttcgtaactttgctaatgtgaatagtgctgcaataagcatatgagtacaagtgtctttgatagacaaaataaacatgaaggcaaacactgccataagacaaagaaggccattgtataatgataaaatggttgattcaacaggaagatgtaacggttatcagtatgtacgcacccaacatcacagcacctaaatgtaaagcaaacactgactaaagggagaaaaagacagcaacacagtaacaggagaagacttcaataccccactttcaagaatggataacatccagacagaaaatgaggaaggaaatcagttgacttgaacaacactatagaccaaatgttcctaacagatctacacagaacatcccacccaacagtggcagattatacatttttctcaagtgcagacagaacattttccaggagagatcacacattgggtcacaaagtaagtcttaccaaatttaaaaagactgaaattgtaccaagtatcttctccaacccagtagaataaagctaaaaatcagttgtacaaggaaaactggaaaattcacaaatgtgtgccaattaggcagcacactcctggacaacaattgggtcagcctcatcctggtgctggtagctttggtcacagtggtcaggtggtgtctgccaggctgctccactaaaaagttttcctctgtgtttaatgaatgtctgtgggaggagctttgagactaagtaaatgttctgtctcatcgtcctttctctcacgaatcctgtgatgattcttaccttcaatgattatgtgtttgccaaatggtgacttttctatttccataattcctcctacattcatttgtgggaattctgtaggaaagagatgtctctttttcctcccctttacttagtagtgtcagttgggggtcatgggtatttgttttatttaatggatttgaatccactcctatcattttttatttattttgagacagggtctcactttgtcactcaggctggagtgcagtggttcaaccacggctcactgcagtcttgacctccagagctcaagagattctcctatcccagcctctccggtagctgggaccacaggtgtatgccaccatgcctgactaaatttttttttttttttgagacggagtcttgctgtgtcactcaggctggagtgcagtggtgcgatctttgctcactgcaacctctgcttcccgggttcaagcaattctcctgcctcagcctcctgagtagctgggattacagatgtgtgccaccacacccggctaatttttatatttctactagagacagggtttcaccatgttggccaggctggtctcaaactcctgacctcaagtgatctgcccaccttggcctcccaaagtgctgggattacaggcatgagccaccacacccagccctgactaagtttttaaataattttttgtagagatgggttcttgccatattgcccaggctggtctcaaattcttggactcatgtgatcctcccacctcagcctctcaaagtgctgggattataggcatgagccctcatgcccggccattactatcattatttattttgtggctgaaattattccagacttacttttaaagagaaggtttccttgcatttacatccaattaagagaaaggactgcagtttctgtgttgttgttgttgttgttgttgttgttgttgttgttttggagaataccgtgtgatgagatacctctggatgttctttatttgctgtggtaattttgaattagcattataaaccctggaatgcagaaggccgcacccctctttgccatgccttgtgctttgcctgctctgccttcctcctctggtggtcacctggccggcccctgatgctccatctttcttaactactggtgctggagagaagctgcaagtgggggagaacgttttcttctctgcagtcttcctcttccctttcatgggtctattaccctgcatacaatggaaagaaatacagtggatgcatttggattggaaacacagttaaactcctgctgtgatcttacaggagagtgaaaactactgaatcactactaatgagtctagatgtctgctcttctcattagtcctctccacatattcttacccacagggatccaggactacaaatactccctttgtcctacgtgggggagcagccgtccttacgatgcatccttaaataattatcaatgtcctttatagaccatttactataaatctctagagaacaaatttttccatttcctaagaatgtgctttgtatttgctatttgctttatgttctcaaaggcaaaaaaaaaaaaaaaaaaaaaaagaatgaacaatgttttcctgtgtgggtgccatggggtgggaggaggaagcctgtttcttgcaggtgtatgcagcacccttgcctcctcatcttctgtgtcaggaaagggagagggacccctcagatgcttgctgcaagcaattgagaaacctgtggcgattaaggcttctgaatccagggttgagggttcagatacacccatgtgaaaaatgaccgaccaacggtgcagggcttacaggaacccccggggttcagatcccagtgtggagctgctctgtccatcctggcaggtcccacagtgctcactgaggtcatggtgctcatggaggaggtctcattggccctgtggccctgattttaaaggctccaccgccccttcaggtcttctaatgggcatgagggagggaggagtgtgcaggaatgaaggcacttctctcttgctaacatctggtggtctctgatgactcattcctttaaggatgctatctgtagtgggagctcatcatacttgttaattccttgtacggaatggccacaaaccctctctgtacgagattgtgtcttaatggcagttgaaggtctaaaatagccatcaaggactgtttcggtgacttccgttccttcagcgtggaagacaatgtccagaagaacctgagagtgccaagatgcccagctgagaaagaaggccacgtgcaggtgcccttccccctgtgcagggctgtgtggccccccagtgtgtgtgccctggaagctggatgccattgtttccctcctggggttgtcggtgggttgttcccatctggtgtttccaggtgggaccccaggctggtgactcattacttccccccttcttccctccccagcccccatctctccatctcccatctctcttcctccatagacatttcatgagcatttcctgtgccccgggtggaggtgctggggatgaggaagggtgtcctgagtcccgtgtgcctccgtcaggggaccatgagacccagagagtcatggaggctggtgcatgcagtgtcagagggaattctgtttatggggtgggggcactgagggaggacctggggtgggagttggggttgggcatctcacctggtagaggcacaacatgatacttctctgagcttcagtcccctgatttgcaaagtgggaaattgttgtgagaaccgcatgagatggtgtgtgcacatcgctcagcatgtaggttttccacagacgttaattctgcattctccagttggagagtagctaatgcgcatatttcatgccagactccccacagctgaagtgttaaagggaagttcaaatgaatcctctgccaaggacttcttcattggctttgatgactcatgaagcactggaggctttacgcctgagctgcccagtgtgaaaaccaaaggcctccattgccgaatcctctcgctagctcatggctgacctcagatctggtggccccactatcaacatgggtccccaggtgtcccttgtacactcagtggcttagccctgttgcccccacgctgtactcatgcccctggtgttacacaccccagtggcctgcctgacagtcaccgctcacacctgcatgtgtcatttggcgtgtaggcaacagttacacactatctgctcaatggccatccagtttggggactgagttgtggtggaattgaaggagcctttcccacttgatcttggacaagttttctgatccctacaatgaggaataaagctcgcacctcacagaatgatcttgaggactcggcgggagaccttccacaaaacctcacacagtgcctgccctgtgggatacagacgctcaggaaggctgctcagagatccgctttcatttccagcctcaaggaaatcccagggtttggtgtttggacagggggtccctgtgaccttcccctttcagctgtatatgagtttcaaagaccgacgagcaaatgggagggatacataaccttctattcacttccctggttgccagggaaataatttggtggtctcgggggggggagccctgtaggatttatcttcatgcttgatgagaggtgggcagaacacatcaccgagggccggctcttcccgcagtgtccacagtgtgccttccgcaggtccctagtgaaggaacaggagcccgggtacaatagcaggaaccttggagctctccccttcctctggcaaagagtaagcctgggttgcagcttattgattttccacttcggcccggaagggagcatttatatttttaagtcagatggcatgactctccttgccaaaagttttaggagcctcatgccataggaccaactctgggcccgcaggccccagcatgggcttttgttctggccctgccctcagtaggtcctgcgaacgtgggggtttactttacctgtatgagtttctgtttccatatctatatagcaagagagtcccctagctatgagatgaaagggatggggccagttccgtcatcgcggggaatcagatgttgctgtgggcctctggtgtgctgtgtgccttgggtttggtctgtaaccacccctgcaggcccgccttccttccgcctcagcttctcgtgtttccttttggtaaacatttctggaatttctgctgtgttccgggcaccgagggtataaagattaatgacacctgattcctgccttcgactagaggggtggtactgacgaactggttggagctgggagtaggggagcaggggatgggtgacaggaagcaagtaagagcagccctgggcctgctattcatgcgggagagggggtcctgggctcacgggtgccctcccttcacgctggaccccgcacctccactagctttgtgactttgggtgagtcacttcagctccctaaacctcagtctcccactctgggaagagcattgagacttgagagttagaatttgtgtttggggcttcagttagatgaaaaccctgtccctccgcacccaagctatagctcctggcctttctgagccttgctctgcttgtctgttccatggagctcttggtctccacttcatggatggctgcaaggattacatgagcctaaactcgctctcatgatcctggcctggcacctggcatagggctattgtccagaaatgttgccctcaccccgactttcctactcttcctcccaagaggtgggcccttaaagagttagtatttgtttcttccagagcttccagtaagattgtctttatgccatctgagtgttaccctgtacaaggtggagtcattgtcatcattgtcattatcctgtttatgacaattgattggacacgttgcatatgccaggcactgtccttacaacagccttgtgaagccacagtggttggctgcctcatcttctagacaaggagataggcatgctcagggacccacagctgttagtgcagagctggcatggacaagccaattgtgtccatctccaaagatggcatttccaggaggggactttagagagtctgcctatcagaggggcttctggccagcccagcttctgctgggccatttgtgaagatgcagctggcccagccagtgctgcacatgcgtccttgtttgagctctggctggggcctgtggctatggctggaccctgccttgctggcagcttgtggcctggcccctggtggccctttgtctcctgacctcgccctccacttctgccccgacctctgctgggtcatggaaagtggtgtgtgcactggagtctggttggagtctgatctggctttctgctaagggtggtggtagagccagccagcccgggctcatgtcccatgtctgctgtaaagaatgctccagcacaccggaactcggggctggcacccagcccctcagcaccaactgggtgttgttgttgctgttgttctccatgttgtccttcagcagaggctgtggctgtgtctgctctcacacagcctgcagagaagcaggcagagctgagcagcggccgctgggcccagccagcccactcttgtccccttcttcatgcgtgatgtgttttcttccctatatcccgaggcagtcactcgttttcttctccattctctcagcctctcctctggcccctggggacccgcctttcaccctgtgggctgccatgcctggctctccggtgccagcggggcctccgcagagaacgacttccatacccttcgcattcgggctcttagcgcaacccggactattcttagcataccgaaatgcgagctgtcccccgtgcactgcaggtggattgactgagcttctgcatgcgtgtttctgaaaggggcctccgccgaggagcatgtgttttgtgcgtgcgcgtgtgtgatgtggaaggaggcacagcccgggcgggtgaccatccgccctggagtctgaggagctatatttagctcctccaacatgcctgctgtgaggctgtgccgggagaggctggcggggcccaggcagggttgggctagaatctctggggagctgcaggcctcccttccaggacacctcacagacagctggtcacagaagagcttccacagaaaggaacaagagcagtttattgtaggtgccacgggaacctttctaggctttttctgtacacgtttctatttctcagaacaggcctacagaataaggaatatctgtcccattttacagatgaagaaaagttgagttccagagagtgaaataatgtgcccaggttggttgcttgtggagctaagatatgaacccagatcttagtttacatcttaggatgaagggccaattactaacatttataatttagggcaattataaaatatggggcaattctaatttagaaaaggggtatggggcattgaagaataaattctgggtccttttcttcatgctgtattatttagaaagtgcaagatgactgcactttcttggatgtagcagggctcatgtccaccaaagcacaaagcctgtaagataggcatccaagaatgctctgggaaccattttctggaggagaaacattgcagaagtcttcccaggctgtggacagcaggggctccttttggaacctcctaccttctagccagcgtgacagaagctgctggagacagggaggaaggcgcaaggaaagggagggagtcggcggctgtggggagtctggggcgaaggccccttggcctgcccgccctgtccatccagctctctttcctgctataaagcctgagctgtagccacactgggctccttgcctttccttgccaagaaggcattgttgccctgtctcacagaggagagaaaaggtttcatagccgtcggcgaagacctgggacaacacacggagcatccaacttcctgggaagagctctattgcaccgtggaccgtgccaagcaccaccggagagcggcaagaccgctcagcacagtgctagtgcaaggcgggggacgccagtctccttgggcaagacccctcagctcttatccaggtgttcctcagggagaagggtggcttgctgtgtcacaggagtcccatcctcccatctagatccagtcccacattaaaaaaagagtctccagattcctttttcttctggttaaaatcccaccattcttttgagaggacagctgatttatggaaagccagtgctgctagaatattaactaacttcaaactgtagtcttggtgataactgcttttcgtttttcttagttacataaaatggtattgactcagaaccaccatttggtgaaaggatgaataagggaatgtaattgatctgggactctgccacctcgaggctgagctgggcgtgtcctccttggacactgtgggtttcatctccccagaagacctgagcagccaccgtcatcttccttaggatgtatagtgttctccaagcagaagcaaaggacctgacttggtttttttttgtttttttttttttttttttctgctgagatggagtcttgctctgtctcccaggctggagtgcagtggcgcgatctcaggtcgctacaacctccgcctcccagattcaagtgattctcctgcctcaccttcccgagtagctgggactacaggtgcgtgccgccacacccagctaatttttgtgtttttaatagagttggggtttacaccatgttggccaggatggtctctaactcctgacctcaggtgatccacccgcctcggtctcccaaagtgctgggattacaggcatgagccaccgcacctggccggacttgggtttgttaaacccaaggtccttgtgctcatttaatgctcacagcccgcagcaggcagatgtgccaccatcctcgcttcgtgtacgcaaggaagctgaagcgcagagggtcaggttgtttgcccaggtctcagagccggtggaatagcaatactggactggtgtctgaccttgggccttcagactcctcacctccttctccttttcctctccatctctgctggagatggggtaaccagaggcaaggactcaggaagtcaaatgccttggtggtgacttggctctggttttggaggtaaagttctatgccttcattctgcatcttattttgttttcaatcttggcgattccttgtaataacttattgactcttcaccaatcctagtttacctttggcttaatttttccagctgacgtagactatattactgcgtgtaagttatatcagttagctattcttagtctttagagtgaatgcatcttaggtgagggtaattagaaatgcgtatttagcacacaagggaaaattttctcttttgcagctgtgcattaggaaaaataaagagcatctgcgggactataaggtttccatttataatagggacttattctccccgaggcgagaagctgtaatcttctgaaagccctgcgtatcagtgccgaaggtgttgctttcgtcatttatgtattccgtccgtagcatttacccacctcctccactgggcagcttgccaggctctgtgctgtgccctgggggcactgtcatgccctgaagaaatgctcatgggtggggcctgataaacaggttataatgccaatttttacagtggtgtcatggctgtctgttagcatggtcttcaaagttgggcacgtatggaaccaaattctgccactgaagctgtgggatttgttgggcaagttgcacatccaagccacggtttctttaccggcccatgagtggttgtaggggaacagtggccagaggtgattgatatcttgggattgagtgcctaagtaggatgtcatatcctagcccactgtgatttttttttttttttttttttggtcgttgttgttctgttgcttctggaccagcacagtgtctggaacaggggggcacccagtgaatgtttgtccagtagttgaggggtgtggctttttgttggactgctgtgaagcagaagaaagaggggatggcactggggtcagccttggcttgaccgtctaccttggcacgtcttcagggcgactaccaaggtttgaaggcgcctggctgacaccctgctggcacaatgatctgagtttagaacaactgccaggtacggcaggaatggggcggtctgcttacctgcaggctgtggctggagtctgacctggctgtaggcaggcctcatggtagaattccttgtacccaggcagtcatgggcaggccacacccatggggcaggctgggagggccactggaggggagagggaaggactggggcccacgtcaccatgctttccccatctcactaattagggaacttgcctgtatcgccccatttccattgcagtggttctgaaagtgtggtccctggaccagcagcttcaggaagctgggctcttcttagaaatgcacattcttgggcccctctctaacctgtaaatcagaaacactggtgttggcccagcgatctaggtgttcaagcaagctcccctggtgaccctgctgtaggctggagggcagagctgctccttcagatgtgctgtgaatggatctcaagagttatgacactgacccatcaggcctcaggatggtcggctggggttcggggtagccagggtgaagggactatgctggggaaacccttcccatggaagcaggaagaatggagaacaaggtttatcactgaaggtgaggtctgggacatgttacttcatgctctttaagcctcattttcctcacctggagaatgggaataatgggctttttttctgtaggatggctttgaggctttagccacaagatgattaaacaaaactgaatttagtgtacaagagatgtttgttaagaggtagcttcctttctttaccctcttttccaattggcctatgtaagatattctggaaactataaaaagtggaagagcttatagactggaagaagaaattctagatgctggattcagcctttcttactgcacatagaagccaacagagggtttagagcagcgttcctcaccaagtcctagctccttaactttcatcaggcagggagagtgggggacagctgatgtccatggaagagacaggaccggtgggccctgactcttgttctgccagtcgagctgaaaaacagtttggtagggaagttattacattggctcccgtgtgaagacaaagggactgagtccctcagatgggagccgttcacctagggctgcccagagcgaaggagcccggaggcacaactgctggctcagcagacagaatgtttctgttttctgtgtaaataaggaggtttgctggcatgagaaagaagcaaaggccacagactagaagagtcgttgaataactgcgaagatcagcagaaggaaattgactcaggagcagcccggtgctgggaaggcagagatgtgttaggtgggggctctgccacctttgctttgctctggcatctgcagagggcgtgggcccaggcggtcccggacactccacagggccgtggagagcaagcgtaggtgaaggaggtcagctaggctccctaaagaccaggtgtcctggggtaaactctgggaccttggccaagtcccagttatctcagctgaaaaagtggggaactaatatccatgccttggtctttctcaggaagatcaggactcttctataaaaagcagccggaaccatccttggagcatgcgtgtgttccgcaaggtggctgcctcctttacacattttgaatgattgttttaaagtcaaagactctggaagacttgatttgttagtattttccccaacgttttattttgaaatatctcgaacatgaagttgaaaaaattgtatactgatcatctatacccattttcttttttctctactttctctctctgtatatgtttgtacacacacacacacacacacacacacacatacacttttttgggctaagttgcagactttatattatttctctccttaaataatttttgcatgcctcctaagaaggatactttcctaaataaccattgtcacacccatgaccttcgacattagtacaatagtgttatgtcataaacgttccatattcaaactgtcccaattgtcctgaatattgatttgttgtgcttctttcattgataagaagctataatagatttttttttttttgagacaatcttgctctgttgcccaggctggagtacagtggtgcgatctcagctcactgcaacctccacccctgggttcaagcaattctcctgcctcagcctcctgaatagctgggattataggtacacgccaccacacccagctaatttttgtatttttagtagagatgaggttttaccatgttggccaggctggtcttgaactcctgacctcaagtgatctgcccgccttggcctcccaaaatgctgggattacaggcatgagccactgcgcttggcccagaagctggaattagattagacttagatgccatgttgaggcccaggatggtgtgaccgccatgagggcgagcaagtcacgagcgttctccccatcccctgcagaaggggttgggtgatgggcagggctagggtggaacacaggccttggccttgagttcagggccatggtctgttggctgttggaccttgggcttcccagttgaaaaacaaagttactgacttgattcttagcctctgtttaattctcactttctgtggaaaaaatcatttaatctttgatgttgggagggagtacttgcaaagtctcttagtttaccttgctgtgcaggtgtacgctgtttgaacacctgtactgatagctcattgtttcacagggctctaatcatttggacactttactatatatgtgtatattttttccctgccaggtacagtatgttgatggtattgattatacatgattctcctaatctcccttcttcatgggtccagggatggaaactgtcagagagaggagattcagagtgtcttgcgggtagggctgggtcagggagctctagtagctgagggcttgtttttctcttctgctattgcaagagatgttgggcctggtcattcttggaggtcacagggaccatgaggtccaccattcatacctggatattaccttgacaaagtagttgtcgaaggtaaatgccagcgccagcatcaaatgtttccacctttccgtggacacctctgttgaatgtttccacctttctgtggacacctctgttgaacgtttccacctttccatggtcatctcttgactgtttcccccttttcatggacatcttgattgcagttgacttgggcctccccgtggctcaggacaccttccaaggagtcctttagttactgcatcaccaccttcttgaggtcatgataattggcttcctctagacactaggtcatatccctgaatgatgtgtgttgggatggtgacatagaaagcttgccagtgtgcggccgagcgtggtggcttacgcctgtaatcccagcactttgggaggccgagatgggcggatcacgaggtcaggagatcaagaccatcctggctaacacagtgaaaccctgtctgtactgaaaatacaaaaaaattagcgggtgcctgtagtcccagctactcgggaggctgagccaggagaatggcgtgaacctgggaggtggagcttgcagtgagccgagatcgcgccactgcactccagcctgggcgactgagtgagactccgtctaaaataggagcactgagcgtgctcctattaagctcagagatgaccttgccacttgaccactgaccttggcagtgtccatggatgttggattatgttgtgagcaaggccatcacacttcactttgttagaggggcaggctcctgggacgtagtgttggtgtgcgctgtggtcatgagtacctccactaggccatgattgttgtggatagtcttggctggggggcttgggtggtaagtagttggtggtgggctgggcactgctgacagtctcgagggagttttcacgcttctcatgatatacatgtgtctatcagcagtggttcccttcaggagagtctcaaatttcttaagggagttgtagactcctccacatagtcagtattagaattgctccatttgatcttgatggggtcttgctcctgggagagggatatgggttttcccttgatcacaaacctcctgtgtgcagccctggtcatccctttagagttgtggactcatactagaacatgctcaccatgtaattgttcagtgaagagatcaatgaaaagggcaatggagagatcatgactggccactgacaagttgtccagggttgaaagtagccctggtgattaggtgcctcatacagcccaagccacatactctgaccggcaccatcagttcttagggatatcgctagcaccatagcaggaaggcagctacctagtgagcagagtgggctggagagcttccagctgcaccttccacagacattcatacatcaagttttttatcaaaacactgaagtaaaaatcgaagaagaaaaagtcaagtgtactccatggcttaatgactagaacacaggttttgaatttaaatacagctggcatttaaactatttatttgttgtgcacattaaatcattcagtgtttaagttttcttacctataaaaagtgggtaataattatatgttttttaaaatcacacaatccagggaggcgctgagtatactggaaaatcctcccactgtttatctggtatatttacagctcccaaacgtaaacctggctcctaactccaatctcattaacaagaaagtgtcctctgtgaatcaagcctttcttattcttgtagctctcttgggtgaagccataattgcatctctaccatttgagtaaatgaacttcacgtttatagtcctggttaatagggcacgtggccccatgcctatcagacaggccgtggacagtaaaagtggatttgatggtgcttccagactctgaggctagaatgctattagcactgcaatgaaggtacagtagcgtagggctaatgatatcaaagatggactggttaccacagatttaacaccggatgggatcttgtagatcactgcacattgacctgaggctttgaccctgcaggtttgtgccccttctcgctccgctccttccccagctctgtgctgagctccctgtgagttccaggtacgagggtgtgaggatgaaatgctgggtgttctgtctctggggacacagtctagcagagatacagagccatctgaggctgtggcttgcatcctatggaggctccgaggagggcctctgattgcgccctgcagacgggaaccatctaagcacgtggattagacagacttggcagatattggcacatctggtttcctgtcgagacctctgtgctcagctgcctctctcccttcgtggggtttttgctttgaccttaccctggccgccgtcatgcctgacactgggtgttgttgcatcaggagaggccgcctccctctggatcagttactgtgtgctctgcttccgtctcgccacttgatcgccatctagacagcagtgtgcgtggagccagggccactcatccatccacacacaccttgtgtcaatgcgttgttcgctgcaggtattttccagatgtgctgttggtgacctgtgatgcacaggacatagcctatttgttccccacaatactgtcatttccaccctctagagtgaggggcctggtccttctcatcgtcctgacttgaaggccagctttggatgcagcctcaggggtgtcaggccacgttgcaggtgctggaggcccgtgtggccctgcccgtggagcacgggtgagcagaggtgaacaaggggatgcaggaaccagcacctgtggaatccttgccctgggccaggcactgcggcgaatcagcttctcattcaattctcacagcagtcctgtgccatcctttttattctccgttcctcacatgatgaaaatacactttggtgggatggagacatggaggagatgtctgatgacacagaggccagagaggttgtgtctaaactgagggcagggagtaccagagagagtttcttagtcttctggaataaggactaggaatgtcctagttggagagagtgggtaaggacattcatttcaggcacacaggtgtgaaacaatacagctttcagcaactttcctaccatgcagcacgagggaagctctggggtgtgtgtgtgtgtgtgtgtgtgtgtgtgtgttggaaggtgtgtgttgggtatgtgtgtatctgtgtgtgtgttggtgtgtgttgggtatgtgtgtatctgtgtgtgtgttgggtgtgcgtgtggtgtgcatgtctgtgtgtgttttgggtgtgtgtgtggggtgtgtgtgtgtggggtgtgtattgggtgtgtggtgtatgtgtgtctgtgtacgtgtgtgggatgtgtgtgtgtgtattgggtatgtgtgtatatgtgtatggtgtgtgttttgtgtgtgtgtatgtgtctgtatatgtgtgtggcatttgtgtgtgtgtgtgtatgtgtgtgtgtggtatgtgtttgacctgagacaggaggagcagtaggggtccgatgtggaagggctgggagcggctatgctgaggtctgaactgtagctgggcaattggggccagtgatggtttatctgaagaacagatgtggaaatttgtttctttattcttggctctacttatgaattcatttgttccaagtatcttatcttcctttctcactgttgaatactgatttagtaataataatattagctggtacttacagcactctttccaaacgccaggcactgttctcggtgttttgtaagactagctggttttgtcttcctgataacccagatgtgaaagctgctgcctgaagagatcagatcactcgctcaggggcctgggcaggaaatgacgatggggtctgagcccgggcagcctgctttcacagtgggtgctattaactattttattctttgctgcttaagatgcattttgtaaaaatttgaaatacatcacatgacaagtgtttattagcaagagggctgaaagactgtatgataaaataatgtgacggtcacacaccagggcctgtcgggggtggggggctaggggagggatagctttaggagaaatacctaacgtaggtgacaggttaatgggtgcagcaaactaccatggcatgtgtatacctatgtaacaaaactgcacgttctgcacatgtgccccagaacttaaagtacaatttaaaaaaataaaaaaaataacaataatgtgatcgtgatgattttccgtaaacacacacgcggcatcttagcttccaaggaaccccaggcatcaggtgagggtcgctccgctggctcctgctctctctctggacagatgggctccctgctctgagttctgcagcgtctccctgtgagccacgtctcttcagcccgacttctccccactcaggactcgtgtgtcacactgtcatcacttggatgtccttcggaatctcaaacttcctgtgtcctaaatcagagtcatggatcttcgtaccacaccctgtcttcttgctcctctgcctctctccccaacttgagtaaactggtagtgcattcttctcattttttttcggtcaagaatctaatcttgaagagatccgtggcttcccttttcccttcccactcagcgtaccgtcggtcagctctgatgtcttcaatggcagcacgtgtgcggagcctgaccgtcaatgttcactccatgccaccccccgaacacgtccccatcagtcttcacctggcagtgacttcatctgctagcttggcacctcctctttagccttgtccccagtctgtcttccatgttgcagccagagtgttctttttttttttttaaagaagtcgttcaggtcatgcctttagctaaaaagtcttcgaaggcttcccagcccgttgggagcacaggcgtgggtcccctctgagcctggtgtgcctgtgtggtctggctgcggctgcctctgctctctctgtagccccgccacgtggaccctcgtagccagtgtttgtccagtgacgggtgagttgggcattcaattcccctgtgtagcccagtcaggtggaaagggccactggagattaattggtccaaatccatatttcacagatgggaaagctgatgccaagaaaggacaagtgactttcttgagtctacacctaggcttgatgggggagctgtggccagacgccaggtttctcctgcaggggttctcagtttaccgccttgcctggtgttggctgtgggctcacgtggagcaaggcatcgaaagacgcttcttcaggccgattcccggtgaagtcacagtgccctgtcctttatcagtggccttcagtgtggttagggcctggcgattgtggcttttggggtcagatgcacctgagctctgtggtttactagctacgggaactggagcaacgtacctcaccttgccgaacgacagttgctattcaaggccttcctgtcggataggatggggaagtcctgagagagacccagtgtgcgcagctcccagcattgtgtctggcaggggccggccacctaacacacactggttgtgaggattgcttcttgctgacctgctagcagtttctagccctctgcaggtacttagtttggcatctttgctgggggtccccatcaatttcctgcatgcgtaacaccttagtgtctcctcttgagttgatttcagtcatacaactttggaaggatatagcattcctttctataagccggaagtctgatgaagtgctggctgtcaagtacatttctctaatattgaagatcagcagtatttaaaaggccacatcctatggccagagagtgtttctcataactaaatgagtgccaatggaaaatgtcctaattgcttatggcttataacagtgaattaatgtaaggacaattctgctgatcctaacaaatctctgctgcctaatttcaggctgattgtatttcagttttactacatttattaaaatcatcccttccacagtttaccctcctccagctgtgtatacagaaggggaaaaaccgtgagcatcttgaatgcagcatttagcaccaaggccagggcagcctcatggcgcggcagctgtgaaactggccttccttcgggaacccaggcctgcttcttcagggcagcgccagctttctgctcacagtctccttctttgtctccttagcctttctctgggagacagcatagggctgccggaagagcaggaccttcggactcagacctggctttgagctttgtggcaaggctatttatttccctaagctttcgatagtggtgagctgttgaggtagtgatacctgtgctgcattgtggtaggacttaaagtttctgaagtgctgctcacagtgcctggagcacagtatgagcctactgaatgtcagctttctcctttctctgagatttgttgtgaagatgctgtcattcagttaaacggaatgcatgtggggcacctgctcttcaaggcactaggtatggagcatggtccctgcccgcagtgagcttttattctgttgaaggatccaagcacttgtgctgcagcgtggtaagtcagaggcagggaacgtgctccgtgctgtttattgaggaggtgcagccagcctgggctttgcaggatcacagagactccctaggtgatgtgagttgtccacagaaacccaataaccaaggaagaatttgtcagtgggaagagggtagggtggagaggtgagggaaatctttgtaaagccaggttatgaagtatggaaaaagtgtttattaataagattatccatccatccgtttaatggacattgatacatggttaatgtataaatcatcttcaaatgtaattctacttagcaagcatttattgaatagttgctttgtgccaagtcttgtgttgggtacaaacacacacttgagaaaattaacaaagccaaaaattaattcttgcaaaatattagtaaagttgatgattccctagcaggtgtatcaaaaagagaaacactattaccatctggaatgaaagaggaacatactatagatcttacagatgtgaaaaggttaataagagaacataatgggctgggcacagtggctcatgcctgtaatcccagcactttgggaagccgaggcaggtggatcacttgaggtcgggagttcaagaccagcctgaccaacgtggtgaaaccccgtctctactagaaacacaaaaattaacaaggtatggtggcacacctctgtaatcccagctactcaagaggctgaggcaggagaatcacttgaaccagggaggtggaggttgcagtgagctgagatcacgcccctgcactccagcctgggcgacagagcgagactctgtctcaaaaaaaaaaaaaaaaaaaaaaaaaaaaaaaaaaaaaaaaccacattatgaagagttgcatttcaatgcatttgacaacttggatgaaatggacaaattttgtattctaactttttggagatttccctggatgaaattttatcttaaaggaaatgaattttttttttcctttgatgtttagtgctttttgtggcttctccgagatctcttttcctatcccaagactacaaagatattccatgtcttcttccagacgttctaggtgttatatgtttagatgtatgacccacctcaaaataatgtatggtcaatgccgagatttgtttctacacatttgtccagttgttccaccatcgtttgtagaaaaggtaaattttatcattgaattgcattagcttttggtaacaaatcaattacctgtgtcagtgtgggtttatttttggaatctttattctcatccattcatttactagtcctggccagtgcagtagtccaagaaagaaaatgtaaaagacatagattttggaaatgaagaagcaaaactgtctctgtctgcagacatgatttcgtacaaggggtaatctccttagtgtagaaaacctcccaggaatttggacaaaaatacaggtcaattaaaaaaatagggaaatgatatgaatgtgtaattcatgaaaaaggcatgaaaatgtgccaagcatatggaaagatgttccacttttttaataatgagagaaatgtaaaatgaaactacattgagattcttcatctgtcagactgtcaaaaagccaaaagttgaacaatataccctgttttcaaggctttgagaaaagaagtgctctctcaagcatggctgttaacatgtgacatggttcgactttcagttgaacatttgggtagtatccattaaaatgacaagatttgttttttgacccagaaatctcccttgaaaaatatatctttcagaaatatcttcatgtatggaaagcaacttatgtatgtggttatttattataacattgttcataataacaaaatattgaaaacaactatgaatccaatttttagggtactgtttaagtaagctgtagcatatctgtaccatggaatggcacacatgtctacaaataacctgcaaaggatattctataaaggatgctctgtctgtactaagtaaaaattttcaggatctattaagtgaaagttaacaaacaataaggcatacaaaggtggacagcatgtgtaatttatgtatttattgcaaggtggtgctggctggaggagggtggggggggaggaaaagtttacatttgtattttcttgtttctgtgtaaataaatgtatgtaaataaatgtggatacattaaggaaaactaataaggtggttacaggggatgggagaggacagtggtctggacgtggtgacagaggtgggagcaagccatctcagcaccgaccattttatatcacttacattttaaatgactgaatacacttcttatcgacaaagtatgtaactccaggtgtgatgggtgctggagcagagtgtccatgtggtatgtgttagagagtggcagagtttctttggagacgctggaaagacttctcagagaaggtgaaatttggctggagcgtaagtgcaggtaggacgtggcggccctctgcactgctgtggtctatggcactgggctcatcgcccagggagttaggttgggggtcccaggttctgtctggcctcgactctctgacttgatgctctccttagtatcctaaaccagactttcaacttggtcttctaacagtccccagacataccccctcctttggaccttgtgtcctaactcttctcagccaccacgggactcctgggcctcttggctggaagctgttttgatggctgctgttgttcaaacccatccctgcactgctgtggatggatcacttaatttgtagttacttggcatcttgaaggcatcattaacactgaagaaaaactttggttgaaagtgctaattaactggaaagtaatggtatggcttttatttgtgagtttcattgaccttaagtaaaccgttgtgctggtctcttggggaatgagccccagcctttggtcttgaatgtttgacttattaagtggatcacatcacagctattaattttatgtcatattatagaaacagagcagaaggaaatccgtggtgacaggttcaattgaggtctttaaatattagagatctacttcatatacatttaagttggctagcatacatatgagggtgattgtttttctctgacaatagtgttagttatattagaagttgtggaacgttaggaaaataaagaataactgttcatataagagctggtcaaaacctcaggcaacatctggcatgaccctcaggttttaaggtgaggagactgagaactggacaagtgatgtgacttctcccaggtcacatgaagctttaattatggtgaatcataacctcactgctgtttcttctgatgcagaacccgggattcttaagtctccatctgaagcctcttcgagggcctcacattcgctcttagacatggctggtcccacatcaacgtggcccacattgtgacttagattctttaataatgtttacgagtgattgtatgtctattaatggtcaggatcaatttcaaaaatcaactttactgagtgtaatttgcattctataaaatgtagcctcattaaccatacagtttgatgaattgtgacaaatatatactccatgtaaccaccaccaccaccataaagatatagaatatttttatcaccctccatagtttctctgacccctttgcagctaaccctctcctgcctctaactccaggcaactgccgatctccttgctaccaaaggctgagcttttctagtatctcatatacatacaagcaatggtatgcactcttgtgtgtctggcttctttctttcagaataaggggttttggattcttccatgttgtgtatgtatcagtaatttgctccattctttagctgagtagtatttcgttttgtgaatttactacaatttgtttatttggtcacctacctcttgttggacatggaggttgtttccagtttggtattattatgaataaagtctccgtggacatttacatccatgtttttgtgtagatatgtgtttttatttttcttggtaggagttgctttgctgagtaatatgttaattgtaggtttaagcgtaggaggatttacctagctatttttcaaaaggattttactattttatagtgccaccagcaatttctgagagttccagtagatttcttaggatgtttttggtacatgattatgttgtctgcaaacaaagatagttttacctcttcctttccaacatgtatgccctttgtttctggacttattgaacttgctaggatctcaagtacaatgcttacaaaaattattacagctacatcttaatctggattttagatgcaaaacattccattgcttatcatcaagtatggttttgactataggtttttcatgagtgcatttcatagaatgaggatgttcctttctatgcctagtttgctgagagtttttaaaaaactataaatgggttttgaatttcgtcaactattatttctgaagctattgatcattcagcttttctttttgttgcctgtcaatagcttattaatatggtgaatgactttgatttttgaagattaaaccagccttgcattattgatggccgtgatgtattacccattttatattttactgaacttgattcattagtactttaaaaatattttttacatttaaattcatgagggatataggcctcatgaatagttttcttagaagttttctatctgattttgatatttgagtaatattggtctcataaaaagattgggaaagttttctccttttttctaattgctaaaaatgtttattatataaaattgatattctttctaatttacatgtttgttagaattcagctgagagaccatctaagcttggggtttcttttgggagtatatatatatatatttttaattttattattattatacttaaagttttagggtacatgtgcacaatgtatgtccaacaacgatagactggattaagaaaatgtgggagtacattcttatttgcttgtttgtttgtttgtttgtttgttttcagagacagagtcttgctctgtcgcccaggctggaggaaagtggcatgatcttggctcactgcaacctccacctcccgggttcaaatgattctcatgcctcagcctcctgagtagctgtgattacaggcctgcgccactaagctcagctaatttgtgtacttttagtagagttgggctttcgccatgttggccaggctatctgaaagtctggggctcaagtgatctgcctctgcgcagcctcccaaactgctgggactacaggcatgagccgcaatgcctggccatcttttgggagtatattcttgatttgtcttcaattggcatgaggctcttcagattttctgtttctccttgattccttttggtaatgtgtgaccattttatctaagttgttgaatctattgacacaaaattattgatactcttccctgattgtccttttaatggttgtaggatctgtaccgataatcattctcattcctgatgttggcaatttgtttttctcttctctttttccttgatcaacttagaggattgtcacatttattgatattttcaagaagtaggttttagtatagttgtttttttccattatttatccattttcaattgataattgtctaatcctgtcttccttactggtttgttgttccttcctctgcaactcctacccacctggcatatgtagtcctttctcctcctgtattctcatatattctaatacacttatccatgacacaacgtgtcacaatttactcagaggcatcaaggcttgtttcttttaccagactcgagtgccccaagggtggcactgtgccttcttcctctcaagtgccacagtccctgggacatagtagacagggttagtgagtgaatgattgcatgggtgaatgaatgctattctaaacagtttgcctgaatggcaagagagtgggctgtgcaggcatgttgctctgcattcagttcctgcctgtgctgcttcctgggtgctctgagcctcattgatgaaagcagcacttcccttgtggggctctcatgactgttgcagttgggtgtgtaagtcactcagtgcagcacttggcatggagtaggtactctttaataaaaggtacctactgacaggcctttcatgttagctggaataataagttgtgtgcctagaaaataaacattttggttgtagtccctcgtttatgatttctgtaatagtcttctgtcaaagtaaggattgaaaaatgctctcagatgggaacatcttatgaagtctcttggattgaggaaaagggcttggacatcctgtgtctttccacttcccagctccccttatgttcttattattaataagaccatatatataatatataagaccttatatataatattctaattttaaaagactgaggaggcctttttttgttatttctggtttttgtttttatctcaaagaggtaaggcagtgacactgaacttcagaaaaccttttgatgtggttagactctgtgtccccacccaaatctcatcttgaattgtaatccccataatccccacgtgtcgagggagggacatggtgggaggtgattggatcatgggggtggtgtcccccatgctgttctcatgatagtgagttctcatgagatctgatggttttataagtgtttgactgttcctccttcacacacacactcactcactttctcctgccgccatgtaagatatgcttcttccccttctgccatgattctacatttcctgaggcctacccagctgtgtggaactgtgagtcaattaaacctcttttctttataaattacccagtctcgggcagttctttatagtagtgtgagaatggagtaatacaacttttctgtgcttgattttgttaaattagatatttcccctcataattatatcttttttgtggttttctacagagtaaagtaatagtaaattcccagaaagtagaaacacagactatttcctcttggtgatgtggtactttgacagttgtctgtgtactttttgttcattccccaggtgatttcttttacatcactctctgtaggtgacttttaagtttacctcaaaaaaacaaacaagaagccagtgtgacatttgttgttacttcacagattttggcttttcacagccattactgagagtttgtttatttccatgaccactgtgcctgcattttgagaaagatgctgtgtatatgttaggtggttggttggcttcatttatttattatttaatttagtcatacattgcctcactcagcatttacagagctttctgagatcagggactacatcttcttcatcttgtactgagcacagagccctgcactcagaagatacccaggaagtgtttgaaaagatgaatgaaaaaatagatcaaacagatgaaagtcagttgaactctgaaagttttgacagaaagacttattgagtgtgtgtgtgtcgagtctcaccttctgcttatgacaagggcaatgtaagaggtctgagacgtgttcacaagaaatcagcagccctttggagatgacagggcggtgcttgggagtaaagggaatgaaaaaaggatttgggattttggtgaggccaaaatatgatccttgaatattaaaaaaaaatctgtattttattgagccatttgtaagtaagaggaaggcatggctttatttgggctgtcgagtagtaatatttacataggtggagagaatcagtgaaggtatttctctggcagtacaaatattgaagggaacctgtcaatatgtagtcatgaaatatacctataggagtggtgagaggggatttggaatagtgagcttttaaaatgagactgaaggactcaaatagaaatttctccaaagaagatacataaatggaccataagcacataaaaagatgctcaacatgactagtcaccagggaaatgcaaatcaaaaccacagtgagatattcctttgtgtcccttaggatggccattatcacaaaaacagaacatagcaaatgtgtggtaaggatgtaggaaaacaggaaccctgtgcactgctggtgggaatgtaaaatggcacagccactgtgcgaaacaatatggtggcttctcaaaaaattacatagagaatacccgtatgattcagaaattccacttccgggcatataccccaaagaaccgaaagcagggtctcggcactgtccaaccatagcagcactgttcacacgagccaaggggtaggagcaacccaagtgcccgctgacagacgaatggatgagtaagacacagtacatacatgtaatggaatattggtctttaaaaagaggaaattctgacccacgattcaacacggttgattctcgaggacatgatgctgagtgaaatctgccagtcacaaaaggacaagtactgtaggattccactcatgcaaggtgcctagagtgtcaaattcaggaagacaaaaagtagcatggtgggtgccagggccgagaggaagggagactggggagtccatgtttaatgggttcagagggtcagtttgggaagatggagtagttctggggacggaaatggatgatggagatggttgatagacagaatgagtgtgcttaacaccactgaactgtgtacttagaattgttaaaatggtaacttttatgttatgcatactttgccacattacaagaatataaaacaaaactagaagaaacgggactaaaactcatttcctccgattctaagccatgttgcctcagggtgtcagatgggtaggttgcaggggagaaaggaatttatttaatgagcgacttcttgttctgtcactatatttcctcatcaaatctgcacgaatctagtgagatacatattaattattgtccctatgtaacagttgagaagctttgatttcctttttttcctttttcttttctttttttttttttttgcattttgcttatgcttttggtgtcatatccatgaaacctttgcttaatccaaggtcatgaagatttgttcctatgttttcctctgggttttatctgcaaatctttgatgtaaaggtccacatagtattttaagctttgccagccgcatatggtctctgttgcgtattcttctctggttttgctttgttttgttttgttttacaagctgtaaacaaatgtaaaaactgttcttagctctcaggccacacaaaaacaggcggtggtcagatttggtccatgggctggatctgctgtgtccgctgcttccggagggtcctggggaaggcagggtccttcagtccggaggggaacctggttgaacttcttgttgctgtggttactctgggtgcccccaggctccacattcccctgatgttgccctgtactcagggttgcagagaagctgtaatgttccccttcggtccccagccatcctgagtgcagcgccacccccatgggtggggtctccccatacctctgttcttcgcctctcactgggtaccgctgggccccagcaggagcacatgagtactccccactgtgcagcaccctgcctctcctggaatgccttggttgccctgggaagtcatctcttggatgggttccaggaagcatcctgagtgtggagtttgtcggcttttactcactgtcagcccaagtgaccctaccttctggatagaagcacccccgcccccgcctgtcacctcatctgatgttgaaatgatgctcatagaaatgtgtttttctctctaaaatgccgtgtttaggccggcgcagtggctcacgcctgtcatcccacacgcctgtcatcccacatgcctgtcatcccacacgcctgtcatcccacacgcctgtcatcccagcaccttgggaggccgaggcgggtggatcacccgaggtcaggagttcaagaacagcctggccaacatggtgaaatcccatatctactaaaatacagaaattagccaggcgtggtggtgtgcacctgtaatctcagctacttgggaggctgaggcaggagaattgcttggacctgggaggcagtggttgcagtgagctgagtttgtgccactgcctccagcctgggcgacagagtaagactccatctccaaaaaaaaaaaaaagaaaccatatttaaccacagagtaagttttggaagccctttccgtttgcatgtacaggctgagaattgtgtagactctgggacatcacaggaaagatggtgcccaccgggggtgtaagatggtgcccgctgggggtgtgagtcggtccccgccgggggtgtgagtcggtacccgccggggttgtgagtcggccaatgctgatgacttgactagttgggattatcttcagactcttcctaagcgaagccgcttgcctcctggtggatcaaactagagagttactaatgtgtgtgtgtgtatttttttttttaatatcttttagaccctggaagctgtcctgaatttcaaatactctggaggcccgggccacactgaaggatattacaggaatctctccctggggctgcatgtagaagtcgagccgtctgtatttttcacccgagtcagcaccctcccagcaaccaggtaaatgtcttcctgccgcacagccgtcttgttctagagtctcaacagcactacgttcagaatcctgacctcagtgtgtttttgtcatgcatcccgtcagatccgtgccatggggccaagttgctgagcctctctgggatgtaggtttttctttaggaaaccaggtgttacatgagaactgcctctcaggtggtcgtaagtgaatgggctttacatatcacgccgtgctgtaatcataacgctgatgattgcagcattcctacgtgtggttctcactgtgcacacacatttcccgcccagcctggcctggctgcattctggcttacctctcctgttagcaggggctcagtggatagcacatgtcttagggactcctggacaagtccagcatctcttctgcatcattcctggcatccccataagatgggcactttgtggagctcccagccatcttggcatcaggtcatttctgcccaggaggcccttcgcatacaaaggctttctctcctgcctactttccagacctaatcttccttcagggagaaagaaattggacagtttgtacacttgaaacccagaggtggcaagagatactcagggtattcttttctgaggtgggagaatgatatttctcatccagaactttcccctctggtgatgttggagtagtggaatctagaagctggaggtgaatgaagctcctgccagctggggaccctctgtggctcccattcctccgtagtgccagcagccttcgggaagcaggtgctcttcacctccgagctcgtcctggtgttcgtgtccggctaggtcttgcctatctgagtagggtgggctggatgggtattatttaaatgcttacctgtctatcctcgaagggggcggtggggggatcccgtgcagcccctcctcctccagtgggccctgtgtgctgcagcgtgagacagcatgttgttgtccatgttaatgttggcataaaatcccttgaaaatgatacagctttaaataataagtgtggttttagtttataggaaagacttgtttttcttcccagccattggagaatgccttcagcaagaattaatggtttagctgggccttttagcatcacatttcatcatctgtcaccttttcagtcctcagagtaagagcctttcctgccaagacccgcctctgttttgaatttgtgtaaagcattaaagcacttgcccctggggaagcttggccaggatggctgcggatgttagagtatttcaggccctttctgagcattacatttgctccatcatgaacctgttgtgtgtttctctctcatcccctcatctcctgctgccgttgcccacataaataattcttggaagcggcacaggttgtcatcagctgagttcgtctttttttccccattgatatctggttttcacgtcatgacccctgcagttctaaatgacagttgaagatgagaaaaatgccgctatgtggtttgctgcacacagaggtttggaagcgtaggtggtcagctgaagcgctatgtggatcctgcccccaagcctgtggcccttgctcccttttcttttggtttccgtggttcttttccctgctcttgggattgagatttgatgtcttctaattctccttttctgttattcctaagtctaagtggtccccaagccctgtggattggacttctgagatgtctcccaatgactctgcaatccactgcatgcctttgtcactgtagagagagttgccccattggtctctctgctgacagccttgtttcccgttgtcatcctttaattacacatgtgcctgtgccactgctctggcacatactttcccagtgctgatgagataaagtccagagtccctcctatgacatccatggtgcttaaggatctggcccagatcttccccttcagtccctttgccccagtcccatacttcgtgtaaagggcgctttgctcctcgccattgctgggatatgtgcaggtggcttacaccagtgcgcttctgcacacacctttttctaacactgttctctctcttaaatgaagatgctttattcaaccttttggaaaatacctgtttgaccttgacccatgttaccatttttgtaaaatttttctgagtgtgacttggcagagtggattggcctttctgtgggtcccttaacattacatgtacttctgataatgcacttaccagagtgtattggaaatagtttcatttgttccttaagccgacacttccaaagtttcaggtgctatataaagagatcactggtttaagagacaaatggagcacaattcctgttttttactaccctgatataagctcatccatcagaaataaaagcaaatggaaaccggaagctatataaaggagtgatgaacctaataaatagtaaataagtgaataaatagaaaagatttgtttccttcacttttaaaatttctttgaaagattaattgactacttaaagaaataagaacatttaattctgtagtgtatagcacatatgcaaataaaatatgtaacaaaaaagtggcacaaagaatgggtgggaaaatagaaattcttgtgttatatgcaaattgttataatattttttgaagttaagatgtgatcagctaaagatacatgcaaactctggagcaatccacttaaggaatggatgataagccagaagacataaaatggaatatttaaaaatacttaaccccaaaaaaggggaagaggtatcaagaaagaaggagaaaagaacaaggaacgtacagtcaaataggaaacagatggcaatgtggaggactcaaatctactgtatccagagttacactaaacgtaaatagatttaatactacctttaaaaatggagattgtcaaactatacaagaaagtaagatgccaactaccttttttataagaaattgacattaactatgcataatgtaaaaacaaaaagatgaaggaaaagacataaagacaattatttagttggtttgggtatcttaatatcaaacggttagactttcaagagaaaaagaggacaatttttaatgacagcaaaatcaagtcatcaaaagtacataatgatcaaatgaaactgtttacaaatataacttcatagtaaaactgacatactgaagggagaaattgataaccccaccatggtagttgaaaacgtcaacatttatctctcagtatttggtaaaataagtagacaaaaaaattagtaacaatatagaaaacttggacaattcttttaatcagctccacctactttgtatgtgtacatgtgtatttttttttttgagatagaatctcactccattgtccaggtgggaatgcactggcaccatcatagctcactgtaacctcaaactcctgggctcaagtgattgtcctgccttgcctcccaagtagctaaaactacaggtgcagaggaccgcaactggtttattttttaaacttttggtagagatggggtctcactgtcttgcccaggctggtctcaaacccctggcctcaagcaatcctcctgcttcaacctccgaaagtgcctagttgttatttataatacagtaaatgtttgtattagaaatggtgaatggcttaaaatcagtgatattgcttctttattagataaggatagcaaaatgtacctagagtaagcagaagaaataatagagtggatatcagtgctatagagtatgaacaaataaattcataaagttggtgaaaccaacagttggttctctgaaaatagtaacaataaaattaataaattgtaactagggtggtcagaaaaaaatgtggaaacacaaataactaataatgagaatgaaagaggtggcattactactaattccacagacattaaaaggataataagataatattattaaaaatcataaaacatacaaaacattaaaaaaaattagccgggtgtgatgggacatccctatagtcctagctactcaggaggctgaggcaggaggataccttgagtgacctacgatcgtgccactgcactccagcctgggtggcagagaaggtgcctgtctcttaaaaagaagaaaaatgacggccaggcgtggtggctcacacctataatcccagccctttgggaggccaaggcaggcggatcacctgaggtcaggagtttgaaaccagcttgactaacatggcgaaacctcatctctactaaacatagaaaaattagctgggcacgtggtgcatgcctgtaattccagccactcggaaggctgaggcatgagaatcgcttgaacccatgaggcagagattgcagtgagccaagattgcaccactgcactccagcctaggtgacacagcgagattctgtctcaaaaaaaaaaaaaaaaaaaaaaaaaaaagacacaaattactaaaattgacacaggaaaaagaaatagaaaaaataaatagtcacacatcagttaaagattttgaattcttaattaaaatcttctcacaaagcaaactttaggcccagatggctctactctgaaatatatgaagctttttaaagaaagaaataatatcacctttacaaaaactttttcagaaaataaggaggaaatacttcccaacttccattttatgataccaacatcaccttgatgccaaacccagtcagagacattatgagaaaagaaaactgtagaccaataacctcatgtatatacatgtgaaatatgaaaacaaaaaatcaaatcaacttcagtgatatatgaaagggacaaaacagcatgaacaattcaggttttactcagaagtatgaggttgttttaccattgaaagatcagtcattagaatttgtcatgttagcagaataaaggagaaaaatcatatgattatatcagttgataaagaaacattatttgacaaaagtcaatgcttaattatgccagaaacactcagtacactaggattagaagagaacttcctcagtctgacaaaggccatctacaagaaaccccacagttaatgttatacttagaggtgaaagtctgatgactttttctctaagaataacaaggcacgtttccaccgtattcattatttttctggcagtcctaatcagagcaataagggaagaaaataaataagggtattaaaataggaaatgaaataaaattattattattcacatgtctttctttgtatggtacatatgattatgtacataaatattgtgagaaatctgccacaccaaagaaattagtagaaataataagtcaatttagcaagattgcaggatgccactcaatatttaaaaatcacttatgtggccaggcacggtggctcacgcctgtaatcccagcactttgggaggctgaggtgggtggatcacaaggtcaggagatcgagaccatcctggctaacacggtgaaaccccatctctactaaaaatacaaaaacaaaattagccgggcgtggtggtgggcacctgtagtcccagccacttgggaagctgaggcaggagaatggcgtgaacctgggaggtggagcttgcagtgagccaagatcacaccactgcactccagcctgggtgacagagtgagactccgtctcaaaaaaaaaaaaaaaaatcacttatgtttctatataccagcaactaacaatttgaaaatgaaatgtaaaaaataatatatgcagtagaatcaaaataataaaacacttaggaaaacatttctacaaatcttatccctacctagaaaatgacaaaacatgataaagagaaatgaaagatgacttaaataattagagaggtggctgggcacggtggttcatgcctataatcccagcacttcgagaggccgaggcaggtggatcacaaggtcaggagttcaagaccagcctggccagtatggtgaaacccactctctgctaaaaaatacaaaaattaactgggtgtggtggtggatgcctgtagtcccagctacttgggaggctgaggcaggagaatcacctgaacccaggaggtggaagttgtagtcagccgagattataccactgcactccagcctgggcaacagaacgagactctgtatcaaaaaaaaaagtataccatgcttagtgattggaagaattagtttttcttaagatagtggttttccccgaactgattgtaagttgaatgcaattcggtcaaaatcctagcaggatttttgtttagtggaattataaaattattttgaaattgaacagacctagaatagacaaataacttgacaaaaaagaacaaagttggaggacttacactgtatgattttaagacaatgtaaagctataataatcaagagagtatgttattggtgtaaagacagaaaaagagatcaatggaccataatagatagtccagaaatagttccaattgtatctcatcagttgatttttaacaagatgcaaaactaatttcatggggaaagaaaagtctttttaataaaagatgctggaacaactggacgtctgtgtgggggaataaaaacaacccttcacccatacatcacatctgcccaagaattcactggagatgaattttaggcctaaaagtaaaacctttaactgcaagccttctcaaagaaaatgtagcacagtatcttcttgatttaggggcaaatattttcttagatggggccggaaactgctaaccataaaactaagacttgataggacaaatttcatcaaaattaaaaacttcagcttattaaaaggcaaattacattctaagataaaaaaattgtaacatatttatgtaacaaacgtcttgtatcttattgatgaagttgtacaattctaaaaaggtgataaatagaaaatttgaacagatatttctcaaatgacctgttatctccgaaaagtgttcaacattattaatcattagagaaatgcgaattaaaaccccaattagatactactatatacccactagaatggctaaaattaaaaaacagaacaccaaatgttagggagaatgtgaaacagccagaattcacataaactgcttctgggagtataaactggtgcagccactttagaaaatcagtcaggcagttcctcatgaattaaaacatattcctccccagtgatccagcaatttcattcctagatattttctcaagagaaatataagtccacatccacaaaaagactcctgcaagtattttcgtaacagctttattcctaataactccaaactggaaacaaccccaaatgcccattaacaggtaaatgaataaacaatgtggggtgctgccacacaatggaatactcctcagaaatagaaactgctggtacatgcaacaaaatggggtcagcacaaagttacgatgctggtcaaaggaatcgagtcataaaagaaacatactgtgtgactccatgtgtacacctttctagaacaggaaaacctgttttatgatgaaagaaatctaaccagtggttgactctgggttaaggtaacgtggggcaggaattgactgggaagggatttgggttagcaactgtctggtttgcctgggattttctagattttagctctgaaattccctcaccctagcaaagtcctcagtacaaaccaggacagttggtcgccctaaagggaagagaaaatatctttctgacttgatgaaatgttgcatatattgataggggtatgggttatagggttgtagacaaataatcagactagtatacacttcagatttgtgtatttcgttgtatgtaaattttaaccttgatttaacatttcatgtacgaaaatatatatacgttggagagagcacctaatttttactggggagagctggaaaggcatcacaaaaaaatgaaacgttgtactaattcttgaggaaagaaggatttcaccacccacagtgggaggaacaggagaggtgttaatgttgggtttctggttcttccactggattttgagctctgtggaacatgcagccaggtggtcaacctctgcctcccaggacctagcgccttgccccacggtgggcagccggggaaggtgtaggaatgacaggatgtaaaataccaaggctctattcattcaggtgtttcttttgtataaaagggatgaccccgtttatatatatatttaagttctatttttcttttcttttgctcgggctggagtgcagtggcacgacctcagctcgctgcagcctctgcctcccaggttcaagtgattctcctgcctcagcctcccgagtagctgggactacaggcatgagccaccgtgcctggcttattttttttttatttttattgtttttcatttttagtagagacagggtttcaccaagttgcccaggctggactcttaactcctgacctcaagtgatccacccacctcggcctcccaaagtgctaaattctatctttcttaatagggacctgtgtaaattgcaaggcctggaacacaacagaattagtatgcattttcggctcttggcctttgcagtttattgaagttacgtgatgcatggtgtattgtgaattcattacttttcattttgctcacaggtgaagatttgtactctggcatcacgccatgttagagttatatgcatccccagagatggcccatttcaacacatttgcatcacaaacgaggcccggagagttttctgatttgctcaggttcacacagcttgcaggtgacagggctggcatctagatgtcctggcttccaggccactgcagcatggacaatgaagatggccacatacatgccagtgcgagcctacacagagattcagactaattttggtgcaaatagaagccaaatatatgtcaaaggactactttactgctggcataacatgaatcatatactctattgtgaaaccaaaatacaaatggatgtgagttatttactcctggggtagtctgtttgtctgctcctctcactgatactgataatttctgcagtttttcttattggtattttttaaaatgatggttttctatatgagagcatgggaaggaagagcagtcctatttattcacggcctgctagactccagggcatgccctgggtgttgcgtcgggcatcccatgcacactcccgagaaccctctgacattggcattcctatctgggggtgttacattcctcaccttgtcctgtgcgttcgtgagtggaagggaggcaatctgaactgtggccttggggacacccagaccaaagcttgctgccacacctgctctgacctgggagcctggagtcctggactctggtgtctattctgccgctggacagaccctttgtaggagccgtatctttggaggagtgtgtttctctgccgcagcttggtctctgcactccctagggggagagtgagcctcttagctctgctcacctcaccagggcgataagagaatccatttaaataacagagggggcagttttttctaaatgccaaagcccaatatagataggtagaattctcattattattattattatttttactgttctcccaccagggagtacataggtctcagttgacttttatttaaaagatcaaattacctttgagatttgctttttacacagagctgcctggtaaccttgttagggacgagatggaaatggattaggctggaccatccctgtctgagtgccgagcctccctctctcctgaggagcaatttctttctagcctgttacaataaacgatccactcttagacatttctactctgatctatgtggaaaatacactcctctgagcggggcgtggggtgtaatcgttacgacattattgatagacaccctgccaccgaggccttcgtcactttccctgtgtggtggggacagctcacccatggaaggggcactgtggagttttatcgtggtagatctttttccagttgctatgtttacttagtagattggttttaaatttaacaagaatttagaattgcagtgcacaccaggagtgagagccccatgcgcctgtatctgatttccagtgttgattctcctgctcattggcgctgtggttttgagcgagccattcacatttctctcagcatcatttttccttcatcttgaaaaggagataacactgactgtgcagggttgtaaaactgtgtgttataaagtgtctgaaaaattattaacagtgcctgacacaaggcagataattgaaaattggtggttgtcattttccttgtgtgtatgcacttctgttgtgtgtcaggttctagggacaaagggatgagccagtcttgtaaacacaggcggctttgcagcagctggctccagcactcccgaaggacatcactgacctcagcggatcctgaagcctttgttggcctccctttcacctatggtcagctctctgaaggcagccactctgtgactctttgtttgggcagcagcaggtgaagtaagtagtcagtggtcaaccgaagttttgaagaaacgctgcagtgtgaacgatgtgtggcaggagctttggagacagaacaactagatttgcgttgaccagccggaggacctacagtgggatttgagttgtttgtttagacgactggggagtacagtttcctttccttagggtcaggagtggcttgacaggaagtgcagtgctggagaagggagaagtttggagccccagtacagacaggttcctggaggagtgcacggagaggcggggtcacggtccgagtggaacccagctgctgcgactgtgatgggcttgatgggcttgaactccatctggcccttacctgccgagcaggtacccaagagcagcagcatcttttcacaaaagcattaattatccattacacttagggtcccattgaccaggctgttagcgttcttcctgcctctgtgtggcccgctcagccctgtgcatgtaggtgttgaggcgctgtcgtctcagtgtgtgtaaaggaactggatctggatggttattgagcacacactaagtgccagttgccttgctacacaccctgctctccctgtaacccctttgcttccttaggaagcattttccaggtgttgccacttttcagaacttacggtgaccctctgcaaggtgaggtagtccctcaatccccttcagaggctcatgggagacttcagcgcctgtccttgtacatttgacatgctagggagtgtgggctagagaacgtgttgccccgtgttgcaggtgagggactcaggcagagtgagaagaaagaacgagcttggtgttgttcgtggctgcatcaggaccctagtcactggggggcctcggcctgaccagcaggatgcaggagggccgagaggtggaggacctgggttttggaggctgactgcctcatgttggaatcccagctctgccatgttgggcaagttacagaatctttataaagcgggcctccttatcgggctgtcgggaggattccagtaagaaactgtgtgcctgatgcgtggcaagcctgcagcgcatggggtccacgcccttcttccctctcattctcagtctttacaggtatgttacaggcagtgtcttttctgtgtctccccttttaagtaagtctctcagatgactggcacgtgatagggacatagtaaataactgtggcagggtaccttgattttgtggagggaagaaaggatttgaaattagaggggatggaactctacttcctgccttgaacaggcctcttagatactctgagccccgcattgccttatctataaatagtaggatgattatataaaataatacgttttttccccccacttctttcttctaaaagctagtcattcaaacttgttatacaaaatgtatgcctggccgggcgcggtggctcacgcctgcagtcccagcactttgggaggccaaggcgggcagatcatgaggtcaagagatcaagatcatcctggtcaacatagtgaaaccccatctctactaaaaatgcaaaaattgtctggcgcagtggctcatgcctgtaatcctagcactttgggaggctgaggcaggaggatcacctgaggtcaggagtttgagaccagcctggccaacatggtgaaaccctgtctctacaaaaaatacaaaaattagctgggtgagatggcaggcacctgtaatcccagctactcaggaggctgaggcaggagaatcacttaaacccaggaggcagaggttgcagtgagccgagatcgtgccattgcactccagcctgggctacagagcaagactccgtcaaaaaaaaaaaaaaaaaaaaaaaaaaattagctgggtgtggtggcatgcacctgtagtcccagctacttgggaggctgaggtaggagaatcacttgaacccgggaggcagaggttgcagtgagccgagattgtaccactgcactccagcctggtgacggagtgagactccgtctcaaaaaaaaaaaaaaaaaaaaagtatgccttctggaagcatgttaagtagagacgagtatctgttgcgctttcatgatatcatcgacatggacccccattatcacaagtttgacacgaatttttccaaatttttaattcatctaaatatatataatattgttactattatttttatttttaaatttttcgagactgacccttgctctgttgcccaggctggagtgcagtggtacaatcttggctcactgcaacctctgcctcctgggttcaagtgattctcctgcctcagtctcccatgtagctgggattacaggcgcctgcctcaccacgcccagctaatttttgtatttttagtagagatggggtttcaccttgttggccaggccggtcttgaactcctgacctcaggggaccctcccttctcggcctcccaaagtgccagtattacaggcttgagccaccatgccctgcctgttaccattatttttaaaatagaagtaaaattttaatcttttgcaaattaaaaaaatacgatacatgttgatcatctttccacatcagtaaatctaggtctcctcatttgtttacagatcatgtgcccttctgtccgatagataccccataatgtgttaaatgcttctctgttgagtgaggtttgttttctatgttctactgtttcaagcagttttgcattggacattcttgtatataaactttgtgcatacgtgggtggtttttgtaatataaattctaaaaatttagttttaatatggaatcttcctccataatttaccctcctgagcatgtgagactgttcgtttctccctatcatagacatcattgaatatctcattcttttcatgaaggtttgcagtttgatggatgtgaaatatctcactgtgtataattttaatttccttagttttgagtaaggtaaaccatctttatgtttactgaacatttgcatttcttctgtgtattctcttatatgtaatcttggcctcttcaaaaatttgtattaatctttttccattcatcttcaggaagttttgtgtgccgtatattttaaccttatctgaatttgctatctgcattttactacaaattattttggtcaccttttgcgaacatttttagtaaaattattttgttcttattggcttcattcgggcttcagtaaaaaaaacttaccctacttaagattagacatgtgttctccttgatttcctgctaatatatttgtaattttacattgagattattcatccatctttcatatgttttttgtagatggtgtgatattgggaactaattttttaaattgcaaaaatctaagattttacaaaatctaaaattgaaagtattccacaaatttagttgttaaaactgttaaaaattaaatttcgatttgttattcatggtataaataaataatgaaataagacttacaaaaagtcataagtaatttctagattttggtctgtcattttaaattgttcatcagaaattcttggtatagagtacagtgaagtttgcatcaatggacctggttccccgcagcctcaccagcatagcgttcatcttccctccctctctccctccttggaactaatactccttgcaccctattttctgcgaagcactgtcctaggcactgaagacagcaatgagtaaagttgagttcatgctctcaaagagcttatatttgaatggagaaggataggcgagaagcataaatgtagcaggttgtgtagacagcaaacatcagcatagcaggggggacgtgctatgaaaagctggagagctgctttcagagaatgtgctgttgcgccacgggcgggagtggatgtcagtcctgccgcagtaattctgggacaggagtaggtcaaggtggaaagaatggtcaggttctggatatcctcagaacaaacattaaataggctaagccttgctatttcacaggaggtgtggtggctccaaggcctttgtcctgagaatctgtggaaatggggacgtcgtgtgtgagaaggggaagatggtagggggacaggttgtacaaatctgttgctaaattaataagtacaaagtataaataaatgtaaaatatttttcactattttttatttagatcatttaaatcatatacatgattggttttcctgatccttgctgactgtacttgttaaaatgagcatagtaagctgggccagtgctcatttgtcctgtgatgtcttgacaatatcagtctgctgttataacaagagcaccatatttgaaccacagaagtgatgttaaatgttggttgacctagtgtacaaatgggggagtctatggatgttcttctgaagtatcaaggacttaagactttccttttttttcatgataagtacatttctacagggcaaaaatggtccaattccattatgcttctaaagcctggaaggagctacaggaccgtagacctctttttcccttttcccgtccttagatgactaaaaatagaaacagtttttagattctcttggtttgattcagacccatgtcatttttttcagtttattttgaaacaatgatagattcacaagaaattgcaaaagaaatagatgtatggggaaattctatgcaccctatacccagcctttcctactgggatataaactcttcaggtctgtggctgggatatttagaaaataaatattgaaaggaattatcttaaacgccacattaagactcctttgtgatattttaaaagtctgatcaactttccaattttctaaaaaaaccattctgtatctataatgaggcatcggatgtagacgaggtctgggaggccaggaggtggcaggtggtcacaacagccgcaggtgagggcggagtttactctcgacccttgtgccctgtgcctgctgtttgtccagcgcatgcgcagcatcaagccaggctgggtctgccaagcaagctgtcgccctgcttcctctttgacggtgctgttatcctctggacgctgccatcagtggctgctttacctctcagaaatcctcagaaagaatattccagggcaaggtaaggggctcccctcttcgttgtggaagttgcagagaaaacagcccagtcggcgaatccttcgtggtggttgatgagagggatagggctgtgctttgagaagctccccaaggaagaccgaagaagagatgctgcgagatctgcactgagacctgcttttgtgagaaaaggaggctggagaacaaactggaaccagtgtcacaggctccacgcagcaccctgccctgaaattgccatcacagtcaattcatagaccctcttgttggaagggaacttaacaattcaatgtatctgcttcatcccatcccttacctattgtcttgtgtgccctgagatgatgaacacacattttgttgccattcctattattaatatattatagctctgtggagggcaggagctggcacccagccttcacacggcaggagcaggttgacattctatctggactgacaccgactccataactagtgctcccgagttccatgtgtcatccacttgttatccaagcaactgcactgtctcctagcgaatgatctcacagtattctgtgtctgctcaccggtctgtcttgagaggacccattttatgttttactgatgcatattactattaaaagcaagaattttacgtgatctatattttattttagattggtatattactaaatattatatgttaaaattcattttaaaataataacagatttaaagattttgtattgataagcactgtatacttttaaatacatttcaaagcctgatttataaacatcaattaaaaaaaagtataccatgcttggtttggagattgaatgtattttgaaaggtagattgtgcaacatcatcaattagtcagagtttcttttcaaacttatgtttggaattcttgcattttgcatttttaaagttctcttcgtttctttgtttaatcattgtagagtttaatttccaaatggtgatgcatgaaacatgatttcaggttgttatttgcaagtacttttctacaaataatttcttgtgaatttggattgtcttaattcccagaaaacaaaaagcaaaattagacataatcatcattatatgttatattttaaacgttgtattttgaggccttacaaatgtcttgatgtgctgcaaatggattttgattagatgaatgcaactcagagacctggttaccgtcacccggaggcacaattgcagagttactgttattgcccctgattacgtgcgttcttcatggctctcctctttaaccagtgatccctcgtgggcacaaattagacagtgtaacaaagtttcaactgtttgttcaacaactatggcactgcgtgtgggtcagttgagagatgaagcattgctgtgtgcgccttgagtgtgtttggtggatctcttcctccaattcctgggcgcccctgcttcctgtacactcaggatctcaaatggccttcttctttttaaacagctttattgaaatataatttacatgtcacataagtcgcccacttaaactgtataattcaacgttttagtatattcagagttgtttagccgtcacaacaatctgattttagaacttttcatcctcccagaagaaaccctgtacccatcgctgccattctctattcccctacttccctcccgcaccctaggcaaccactaatctaccactaatctaccttctgtctctctagatttgcttactctagatatttcatataaatggaaacaagtgactaacctctttcacttggtgtgttgttttcaagattcaaccacaattatgtatgttatttctttttattgctgaataattttctgttgaatggatataattttgttcattcattagttgatggacatttgggttgattgcacttttctgctattgtgaataatgctattatgaacattcatgtttaattttctgtgtggatgcatgttttcatttctcttgggtacaaacctaggagtggaattgctggatcatatggtaactctatgtttaaatagtttaaggagctgctggattgttttccaaagtggttgcaccattttacattcccatagtatatgagtatctgatttctgcacattcttgccaatatttgttattgtatctatctttttgattccagccattccaaattgtttctcttaagggaacatttaaaaaattatatttttaaagtttattaattaaaaaattagaaacagttatccttactgtcttcaataatgtaaagcttcagagacccttcacaaagactgggttgcttttcagttgttgatggggaaatgccaccacgttcccatctgccactaaacctgttctttttacttgaatagccatgtgttgactcaggcttgtcacctttgtcccctaggacaagcctcctaatttatttcttgaatagttgtgacaacttttcacagtcattttgccttcaatttcttccttcaattatttctgtcagtagattccaaagtattctaaaagacatacatgacattttccttcctcctcctcctcctcctccttttttttttttttttagacagggtcttaccgtcacccagactggagtacaatggtgtgatcatggctcactgcagcctcaacctcctgggctgaagagattctcctgcctcagcctcccaagtagctggaacaacaggcgtgcaccaccatggctggctaagacctttccccctattttcttaatgtcttttagtgagtcccatcatctgtaggtcaagttccagttctagagcttggtacccaagacttcccataatctgacccagcccttctcccttgtcttcccaaaacccacgtttcctcactcctgtgaggaaggtcctggaagtttcccccaataagccgtgctgattgagcttgagacctttgcaaacactgttcacagtgactagagagccctctccctagtagacctgctcgtttacccccaaaacttcaccaggctgccgcttagaattatactcagtgcctttgtgagtgcaggagtcacttcctttcggaaccttccctgactggtgcccacgctgctgtgcttcatgtgctggtgctgtgtgctgcgttccttccccatagagatttcagcaccttcctactctgcaggttcagcttgcacagtgaagcccaaacccagagaagtcagagtccctggtgtcactgctagaggttttaactcattgagtcttatctagagctgagggtttggtttttggtggttggtgtgctatgtttcagaaaccctgatctggtagataggtagtcattcatagtcctccgtgagatcaggaagctccatagcagtgtggcagaggtaagcgtgaggttacatcagcagaaaaccctctgattctttgttctttgttttctctggacttcagattgaattaggttccctggctttcttaaaatgtgaaaaagctctccagtctcatattgactacccattctggaaagaagactgattaagaagataggcaggcttacagaattttaaaagaccacatgaatttgaccaaaggtgtgggtggccatcactacctgttttagttttatgctaattcactttagtacactcctgggaatgagcaaacattggtgtctagaccctgggaggccttggggatatctgccagacttggggaaaagagagtctcacttgatttctagtcatggcaccatggtttttagacatgctggaccttggcgggtactcatttttagctgagtcgatattgagtcattggctggtaggttttgcagctccactgacagcaaccaagctaataatagccccaccccccatgtttatagtggtattcttcttgtgattttacaaagcactttcacttactttttttcactggagcctcctaataattccatagcataggcgttgttatccccattggaggactggggaaactgacagtcagagaaattaaatgacttgcttatgatgttatagccattaagcaacaagaccagtattggagtaaacttaatgcactgtggtccttcaaactcatcgtgatgtttgtttttttaattgcattgatttaaatgttttttaaattaacatagagtaaaatgaacttttttggtgcacgattttttgagttctaactttaatgagcaacacagatagcttggtgtatccatcacagtcaggataaagaacagttccattacccgcaacacttcacacactgccacttagaatcatgctctgcatctccccggccccaccgttgtggcaacactgatctattctccatctctatagtctggtttttccagaatgtcttataaatggaataatactgtgtgttcctttcttggagtggcttctttgattctgcattctgtgatctgtctgtgtcactgagtctgtcaacagtttgatcctttttatttctgagttgctttctgttgtacaggtatgtcacagcctgtggatccattcactgtttaaaggacatttaggctgttaccagctttttgtgattatgaatagagctgctgtaaatactcatgtagagtgattcttgtgaatttaagttttcaattctctagtttaatacctaagactgggattgctggattatatgatgtatttttcactattcaactttgtaagaaactgccaagctgttttccagagtggtagtaccattttccatctctactagcagtggataagtgctctgtttcctcatcagcatgtggtattgtcagttttcaaaagattttctacccattttaataggcatatagtgatatcttcctgtggttttaatttgcactttttttttttttttttttttgtgacagggtctcactctgtcacccaggctggagtacagtggtgcgatctcatcttactgcaacctgtgcctcccaggttcaagcgattctcctgccttagcctcctgagtagctgggactacaggcgcacggcaccacatgcagttaattttttgtatttttagcagagacgaggttttggtttttgttgttcacaaacatgttcaccatgttggccaggctggtctcaaactcctgacctcaggtgatccacctgcctcagcctcccaaagtgctgggattataagcatgagccaccgcacccggcctaatttgtgctttcttagtgatgaatgacattgatcctttcttcatgtgcttatttgttgtctttctggctttttggtaaagtacctttttaagtctttttgcccaatgttttattaggttattcgttttcttgatgttgagtttcaaaagtttttaaaatatattatagatacaagtcctttatctggtatgtaatttgtaaatgttttcttcaattccgtaactttttcattcatttaacagtgtctttcacagagagatatttttaattttaataaatctaattttccttttttggatcctacttttggttgtgcttttttttcttttatgttttcttgtaaaattgtacagttttgttttgcatttacctgtgtgttttgagtaacttttgtataaattgtgaagtttaaatttcttttcctttttttttttttttttttttgataagtggaatccagttgtcccaacactatttgttgaatggattatctcttctccgttgaattctcttcttagtcaaaaataaaatgactgtatctgtgtgtaattctatttctggacactttattctgctccagagaactatgtggatattctttcaccagtacaacgctgtcctgattagtgtaccttgtagtaagtccttactgctatattagtgtaccctagaataagtctttactactatgttagtgtaccctacagtaaatcttttactactaaaattgggtcgaatcctctaaaactctgagtcctcagagtttttcttttatttttaattgttctgtctattgtttctttgtatttccatataaatcttcagataagattgtctacatctacagtgtcattctaggattttgattggaattttgttaaatctatgaattaacttgggaaaaatggataagtatattgcaccttccaatctgagcactgcatatacttctgtttatgtaggtctttgattttattcatcagcattctgtacttcttagcgtccatattttttaaagattaaggggtttttttctattgatgggtgagtgcttttttttttaaatcatgaatgaaatttgagttttgtcagatgctttttttggtatcaaaaaatttgttgagtattattggtatgaagggtatttgtggtcgttttttcttccgtctttgtctggttttggtattagataatgctgacctcataaaatgttctgagaagtgtttcttctgctattttgtatagaattatttctttttgaaatgcttggtagaatgcataagcaaaccatctgggcatagagatttctttttcagaatgatttttaaaacaatatgtttaatttatttaattgatttaggacttttcaggctacctatttaagttttcatttctctaggataaatacctaggactgggattactggattatatgatgtgtttttcactattcaactttgtaagaaactgccaagctgttttccagagtggtagtaccattttccatcactactagcagtggataagtgctttcttggatggatttttgtagtttgtgactttcaagaaactggtccatttcatctgagttgtcacatttatgtgaggagagttgtttgtagtatttccttattgtccttctaatgtctgtggctgaagtggtattccctcatttatttatgatactggtcatttgtgttctctctcctttttcctttgtaattgtggctagaggtttatcaattacatcgatctttttaaaaatcagttttttagtttactgatatttttctatttgtctgctttcattttaattcatttctgccctttattatctccttcttatgcttcctttaagcatttgttctttgtccggtttctttttattattattattattattatactttaagttctagagtacatgtgcacaatgtgcaggtttgttacataggtatatatgtgccatgttggtttgctgcacccatcaactcgtcatttacattaggtatttctcctaatgctatccccgcagcccctcacccccctggtgtgcgtgacaggccctggtgtgtgatgttctccaccctgtgtccatgtgttctcattgttcaactcccacctatgagtgagaacatgtggtatttggttttctgtccttgcaatagtttgcttagaatgatggtttccagcttcatccatgtccccgaaaaggacataaactcatccttttttatggctgcatagtattccatggtatatatgtgccacattttcttaatccagtctatcattgatggacatttgggttgatttcaagtctttgctattgtgaatagtgctgcagtaaacatacgtgtgcatgtgtctttagagtagcatgatttataatcttttgggtatatacccagtaatgggatcgctggttcaaatggtatttccagttctagatccttgagggatcgccacactgtctttcacaatggttgaactaatttacgctcccaccaacagtgtaaaagcattcctatttctccacatcctctccagcatctattgtttcctgactttttaatgattgccattctaactggcatgagatggtatctcattgtggttttgatttgcatttctctgatgaccagtgatggtgagcatttttcatgtgtctgttggctgcataaatgtcttcttttgagaagtgtctgttcatatccttcacccactttttgatggggttgtttgtttttttcttgtaaatttgtttaagttctttgtagattctggatattagccctttgtcagataggtagattgcaaaaattttctcccattctgtaggttgcctgttcactctgatggtagtttcttttgctgtgcagaagctctttagtttaattagatcccatttgtctattttggcttttgttgccattgcttttggtgttttagtcatgaagtctttgcccatgcctatgtcctgaatggtaatgcctaggttttcttctagggtttttatggtgttaggtcttacattgaagtctttaatccatcttgaattaatttttgtatacagtgtaaggaagggatccagtttcagctttctatatatggctagccagttttcccagcaccacttattaaatagggaatccttttcccattgcttgtttttgtcaggtttgtcaaagatcaggtggttgtagatgtctggtgttatttctgaggcctctgttctgttccattggtctatatatctgttttggtaccagtaccatgtttttctcgtttcttaagatagaagataggcttattgatttgaagccgttctttcttatataatcacttaatgatatggatttttctctaagtactgctttagctccagtcacagaattttgatatatcatattttatttttgttcactccaaaatattttatttctcttggggcttcctctttgaacagtgggttgttttgaagtgcattgattaaatttccagatagttggagttattctagctttccttctaccattgatttctaggttaattctgttttggtcagagaagatactttgtatgctttatattttaaattagttcaggattttttctgtggcctagaatgtggtctaccttgttgaatgttgctgtgcacttgggaagtatgtatattctgctcttggtgggtggagtgttcactaattatcaatcagtatgaagtggttggtggtgtttattacttttatgtctttattgatttcatgtctgtgttctatcaattactgagagaagagtgttgaagtctctaattgtgatttggttcattcatcctttcagttttttatttcatgtattttgaaactctatagttaggttcatacacattaataattattgtgtatttttggtgaattaatgcttttatcattatataatgtccctctttaggtgtctgatgttaatataacagcccagtattcttttgaatcgtgttttcttggcatgattcttttacttttaacatatctataccattatatttagagtggatttattatagatagcatatagttgagtgtttttttttgtttaaacgtattctgacaatctctgtctattaatgagactatttaagtcatttatatttaatgtaattcttggtatgtttgaactgaggtctaccattgtatttttggtttgttttttgtttattcactctgttgtttattgttccatttctccttttttatgttcttttaaactatttgatttttaaagcattgagcttttaactttatctctttgtagagctgtttcagtgttttctctagggagtataataagtgctcttagattttcacagttgacttagaaataatattttatcacttggtggaatctcaaatataggcgcttttatctttcccctcctcatgtcttagttgtataatgtattaaatctgtatacattgtaaacccaatgttataattttagcttgtattcatcatatatcgttcattgttttttcttgttttgttttatttatttatttatttttttgagacggagtctcgctgtgttgcccagactggagtgcagtggtgtgatctaggctcactgcaagctctgcctcctggtttcacgccattctcctgcctcagcctcccaagtagctgggactacaggtgcccaccagcacgcccagctaattttgtttttgtatttttagtagagacggggtttcaccgtgttagccaggatggtctcgatctcctgaccttgtgatccacccgccttggcctcccaaagtgctgggattacaggcatgagccactgcgcccagtccattgtgtatcttttaagtaacttaataggaaattacatttaaccagatacttaccatttttgttactctttttgcttcgtgttcaagtttccctgtattattattcaccctttgtttaaaggactttctttcccagttcttttagaaaagttctactgatgactgagattcttaattttcctttatctgagaatgtctttacttttattcctgaaagatactttaatagatatggacttctgagttgacattcttttctttcagcattttaaaaatgattcactttctctgccctccgtggttttttatgaggattcttcagactttagaaaaatttgttgttttgtttcccctgtgtaggatgcattgtctccctgtgtaggatgcattgtctacctgtgtaggatgcattgtctccctgtgtaggatgcattgtctcccctgtgtgggatgcattgtctcccctgtgtaggatgcattgtctccctgtgtgggatgcattgtatcccctgtgtgggatgcattgtctcccctgtgtgggatgcattgtctcccctgtgtgggatgcattgtctctcctgtgtgggatgcattgtctccctgtgtgggatgcattgtctccctgtgtaggatgcattgtctccctgtgtaggatgcactgtctcccctgtgtaggatgcactgtctccctgtgtaggatgcattgtttcccctgtgtgggatgcattgtctccctgtgtaggatgcattgtctcccctgtgtaggatgcactgtctccctgtgtaggatgcattgtttcccctgtgtgggatgcattgtctccctgtgtaggatgcattgtctcccctgggtaggatgcattgttcccctgggtaggatgcgttgtctcttctgtgtaggatgcattgtctcccctgtgtagaatgcattgtctcccctgtgtggaatgcattgtctcccctgtgtgggatatattgtctcctctgtgtgggatgcattgttctcctgggtaggatgcattgtctcttctgtgtgggatgcattgtctccctgtgtaggatgcgttgtctgccctgtgtaggatgcgttgtctgccctgtgtaggatgtattttctcccctgggtaggatgcattgtcttctctgtgtagggtgcattgtctcccctgtgagggttgcattgtctcccctatgaaggatgcactgtctccctagtgtagaatgcattatctcttctgtgcaggatgcattgtctcctctgtgtagaattcattgtttccctgtgcaggatgtattgtttgctctggcagctttccagatggcttctgttctttagctttctgcagtttgattatgtttccaggcagggattaaaaaaaatagtttttgggtcaggcgtgatggctcacgcctgtaatcccagcactttgggaggcagaggtgggtggatcacctgaggtcaggcattcgagaccagcctggccaacgtggcaaaatcccgtgtctactaaaaataccataaaaaatgtttagcctggtgtggtggtgtgtgcctgtaatgccagctacttgggaggctgaggcaggagaatcgcttgaacctgggaggcagaggttgcaatgagccgagatcacgccattgcactccaacctgggtgacagagcgagactctgtctcaaaagcaaacaaacaaacaaaaaaatagcaacaacagcaaaaacaaaaaactttttgggtttctgaatctgtttatgtcatttgccaattctttttgggggtgtggccattatttatttaaaaatggcatgttattttcttctttgtttcttagtctcctgtgacgtgatttttagaggtttcgttgtcccataagagtgttttttttttctgttttattttcccctgttgtttccattggataatctgttaatctatcttcacatttacttgtttaattccttactgatcccaaaaacacattgtatgatttttattttacagttgttagagttcccccaccacccccaacccatggtcttggaatgtgattggtggtaaatattgcatgtacacttgggtagtatgattattctgctgcttttgggtggaatgttctctgagtattagtgagatctgggtggtcaatggtaattttgtttatcttatattctttctgattttatgtctacttgtcctctcagttactaagataattcaccatgtggtgaatttttctttttttctttcctttctttttttttttttttttttttttttgcttaagtttttctggttcttttttatatcttctttttcgctgagattttccgtcttttcacttgtttcaagtatggtcagttcttggaatgcatttaaagtctctttctaataagacagtcatcttgaagttattgtctgttacttactttttcctcatgacttgatattttcctggttctgtgttgagttattttagatcgtattctggacatcttgactataatattgggaggcattgggatcttgtttgaatactgaggaaaatgttggtacttttttttttttttttttttttaatgcagagtaccttttgcaggctgtgctgcagttccagtttcaaagcatttgtggtgcttcttggatcagccgcatgtgggtgcccgtcggcattcttgcctggagatcagttatcaaagcccgtggtttgctcttgagggtctgattctgtcaagctcagctccctggtgagcttaggagttcatgcttgactttgtctgctctctgaatcaatctcctttctgaaatcttcccaaattactgggggctcttatccctatgtgcctgctacaaaggcaggatatgagcttccccctctgtgtgtctacatggaggactgactgtccagaggcacagagaaggaaatcagagtgatgcaaactggccccctggttttgggacctcagctctttgggtcagtgaggtggtttgtatcagggaggtgtgtgagcctgtcccgccaatactgctctgatgtcattatctcctgtggtttgctttgaggctgggctgggagaaaagggaagaaaaaagggaaaagactcagggattctcctactttctgtggcccttcatagtaccttttcccacttgttggaccaggaagagaggctgccctgggagctctgtctggctatacgcagggcacgcctctggagtccacgctgcctttcagttgaggccaggtggtactggagagagatgcagctcactgccagttcagaataacttcagtttctggctcctactgtgatccaccttctaacatttattttttgagtcttcatcttcagctcagtgcattctatgatttatagttgcattcagtgggagagacagggtagattgtgcttactccatcttttccagaattggaactcaccattttttttttttaacacaaaccaattcatgtcactcatctgcttaaaactctcaaaataccttcccattttgcttggaatgaaatatgagtatttccccatgacctttcctctgtttttactcctacaccactctctgcttgttctgttccttgatcacactgtgccttacgatttttgctttaactgctcattctctctggaaagctgtcctccaagaccatcacatgattgctttcttgttgttggattcctaactgaaacatcatttcttcagggaggcccttgtttaccatcagatctgaagtcattttaaaacatccgtgttaatgtcaagagactcacttaatttttaagaaatagttgtgtcatacatgtcttatgctctgcctcatatagtagcccacttttagactagctattgccgtggcaaccaaatttatgcaggtgtcacctgacagcaccttaccatagccgtcgtgagcatctcttgctttctggaatattctaactgccttctctgaggctgtaggtttgggtggctatgggtagtctctctgcacagtgcatggatgaagtgtgagagaactgacccctctgggggaaagcttgactagtgagggaaagagttgggagagcaattatttcctcttctgtgcctcaggcgcacagtgtgaagcacagtcctctcggctccacagaaggacgatgattgagccccagctgcccacagggccgccagctcagcgacacacagcaacatgccctctggcatcaccttctcctctgctgccccactttgcctactctacatgcttcctggcatcccttccctaagcactagctctgtgcaaacccttttctcaggctctgctttctggggggatcccaggctaacacattagtctaaatgactttaaaagtaactttttataagacatttcaagtataagaaacataaataaatgtctaggaggtatcaatttgtctaccatacagacttgtccatttttaatatttcagtatattatatttgcttttatgtttttaatttaaagaaataaaaatatgctgttaaagctctgtatattcttccacactgtgtctcttgctctcttagcatgaatgactactcttaaatttgatatttatagataatatcgagtattttaaaacatattttaaaatttgatatacatatatattgtatatcttctgcaacttatttacccagcagttttaatatgagatttgtctgtggtggggcatatagttcttttaaattcattgtcacctctgcataggtttccatcatataactctaccattgtatgtctgtatctactctccagttgatgtgcacttagttaaaagcagttctttacttttataaacgatgttgcattgaacacttttgaatgtgcccttttaccaaactctgagttgatccaagataggcagctacaaatggaattgttcggtcaaactctttttctgtctgaaggagttgtaccaatttgtatccctaccagcagtgacaggaattcccgtatttcctgttgatctatagcttgaccaactcttggtactgggacgctttaaaaatatttccaataggttgggtgagaaataatactcttggggtttatttccatttctctaactactagttggattgagcttctgttcctgtttattggtcattgggtttcccctactttaaattattgattcttgtcctttgcttaattttctattgggtcatttttttcttactgatttataggagttctctataaattcagaattcaaatccttagtcaatttaatatgttgcaaatgcctgtgaaaagatatttgcaacgcattaaaaatgaagcttgtctttgctttggtttttgatgtttttcattgtaccaaaattcttaattttaatgcagccaaacgttttattcttttcccttatattttatatgtattgtaactcatttgagaagtctttcttttttccaaggtcatgaactgttcatctatattttgtctaaagatttttaaatattgtttttctatatttagctattcattctgtttggaatttatttttatatatgatgtgaggtagggatctaattttctgtgtacctgcatagtcatttttcccagcactattcagtgactcttgtcctaattaatcaatgccaccaatacaatcatctctccagtttccttatattcatgggtctgctttgtagctatcttttctttcactaatgtatttctctgtcactgccccaagtgcctctgtcttcatgattacagccttataacaattcctgacatctagtaggccagattccttccaaaaaacctcccacatcattgttttaacaaaacccttttgggatttttcttattgagttgcattgagtttatagaaatttggaaagagataatttctttaaaaatattaagtctttccatctttgaacataacgtgggttgagcatcccaaaacttgaaatgctccaaaattcaaaactttttgagcactgacgtgatgctcaaaggaaatgtttattggagtgttttgcatctccgagttttggatttgggatgctcacttggtgagtataatgcaggtattccaaaatctaaaaacaaaatttgaaacacatctggtccaagcatactcaacctgtacatctctacacttatttttcttctttaatattgttccatgaatttataattttttacataaatatcgtgcatatattttgttagatttatttctacctgtgttgtggactgtgttgctattataaatgtattttctcaaaaagtttgtcttgtaattgtttttagttgatgtgtatgactgggattgattgtatgtcttaatcttttattcaacaatctttttcagcttttttttataagtttataaaaaatgacagcaaattttattttttaaaacaaccccatcggtcctgcccttttccctcacaggagtataatagccatgaatgtagggatcttgtgtttctcattcagttcctcaggaggtattttttggatgaaatacttaataaaatctccaatttggggctgaagaaacagtgcccactcactgtatcagagtggttttattaatacgtaactgctctctttgctgaaaaagggcttatttttttcacctggcagcctggtctcccacactcaacctgactacagattcccaaaatagctgggctcctccatgctgccaggactttgttcccttgtgtcttctaagccaggcaaacgtgtctgtccccttcagaggctcgccttggtctcagctcttccaggaagctttcttggatttccccatacttcagacagatgtgtccagaaaaaaaaaaaaaacaaacccaaaaagcaaacaagaattaaggtaaaccatatgctcagagcatcagccttaaaaccaagcatccaaagccatatggaaaggtacacagaataaatgacattatgatggcacaaaccactgctgcagtctgggaaaggaaacttattcacagataggaagccaagctccaccaatacatcatcatgtcaacaattagaaagaatagaaacactagatcagacgcccccacactcagacagtgagtcagaaaaaagaagagcaagaggacagaaatgcattgtgtattgatgctgctcattcctgtgccatttcgtaagcaccgtattctgtgagtgaaaacaaaatatatttgaaccttttattccaggcttttaaaaaatcacttcaattttcctcctctgataaatgttttacgagttcccttttctgatgaaagattttgctgtgattaaagatttcatgaagttatgacaacagaggaatagatcttcattctcggaagctcatttttctgtgagctgagtgaagaggcctcttgtaggcagctgtcagagctaatgaatgttttccaagcgccaaacctctggggaaggcagccccacccagaaaacccagactcaactgatgggagctgtcatctcaaggtgtgcggcaccctgttgacgctgtgctacatgatataaatggtgacatgtggccgggtgccgtggctcacccctgtaatcccaacactttgggaggcctaggcgggcagatcacctgaggtcaggagtttgagaccagcctggccatcatggtgaaaccctgtctctactaaaaatacaaaaattacctgggcatggtggcgggcacctgtaatcccagctactcaggaggctgaggcaggagaatctcttgaacccaggaggtggaggttgcagtgagccgagattgtgccactgcactccagcctggacgacaagagtgagactctgtcaaaaaaaaaaagaaaaagaaatggtgacatgttcctgctttctgcctgagagcaggtcacacgcccacgttctgaaaaattgatatttcacagatgccccgtggccttttgacaaagtcctacttgtgtgtgcatgtgtatgagagtgtatatgtgtgtgtgtgaacttctgggcctgtcactctaccccctgtacctcagttctgctctctggaaattgccgaggacatgtgtggctttggaatgaatagaggtccacatctattgggaaaagccgagggtttcgagctctgcatccagggcctcgggcatcacagcagcatggctgtcctctcctgagcctctgtctccagtgcagggggctccacggactacccccgaggctgttgtcatgaagtcacaggcgattgtccctttcctttgaccagactttcctttaacagccagcaaagccttgcctcccacttggagaaatacatttgagaattcaaatgccctttggaaggccatgttttgaagtcacactaggctgataataatgacccagtgcacagatctttttctctgtgttttctccccccatgaaaactgtttaccctgctcttccaagaagaatggcctctgctcagttgctgtcatctgtgtctgtcctgtcgtgggtgcagccatccactgagctcagcagacatttatcgatgacctgttacgtgctgactgtgatacttggtgtctgagataccgtatgagttttcggcaagcattcaactgtgacgttaacctatcagatggtgacggacacggacggcgcgtttggggctggacttttccactttgtacatggagctcacacggctagagagaggccggcagtgcagggctgccacggccacccaaagaagtgacggctctcaagcgcctccgaccctgctctgtcatccacagcctgtggtttttgtccctgatggttactgagcttctgagcatcctgtttgcttccagggagaaaggaaggggaatgaggaaggcggaaggctaaaagccttctcccaggacatcgcgtttgtatttgggaaggaaagtctctaggggactgtgccttactggctagaacttcaccacatggaccagcccttgcaaggaacaatgggaacttgagcattttacttgtcacctctggaggagaggaaacaaaagagtagaggcttcggagggtgatgagtagaccccgcagtgtctgccccagttcgagaggtgcccgcatgggagaagctcgtgctggatgtgcacacacacacacacaagcaggacatgcgtcaccacgcttcagggcccagcgtggaacctggtagctgaagatgctggcttggacacagcatccttgaatggcactgtatgcctgtgtttctctgcagatgatcagactttagagtcaggtgttccagtcgtcagtgtatattgaggtttggagaattcgggttaccttcccaaggccacttggttggtaaaaggcatggctgagctgtgaacacatgtccccaggaccccgggcccaaggaggacctgatgaggacctgatgcctacacccactccttagagttcacactcgtgttcagaaccagtctccgtaatcctctgagcccaggagcacttggcatttcgatatactttgcccttcttaagtggtgggaagtctttggagaggagaaaaagggaaagtcattcctctttggctgtcagaggattctgaactttcttttttctttaacgcagtacccggcagtgtcacctgctcctggatgtcttcaactccaccgagcatgagctgaccgtcagcaccaggagcagcgaggcactcatcctgcacgccggcgagtgccagcggtaagtgtcccatagaccctcgcgccgccgcaggccaccctctgccttcaccacgctgcttgggagggtgtggagataatccaccccaagtcctcagaggatgggcagtttgtctccctttcagagataccgtagtgactattcaagtttggtgggagaatctggagtcgttttaaattagagctaagtgcaaagtaggtaaagccggatggcgtctgaggaagtagcaacatgtgctttcagagcccacatttgaggacccagcagcatccgggcatctttgctgttaaattcttgagaaagtggtatctgggctgggtgtggtggctcacgcctgtaatcctaacactttggggaggccaaggcaggcagaccacctgagatcaggagttcaagaccagcctggccaacatggtgaaaccccgtctctactaaaaatacaaaaactacccgggcatggtggtgcatgcctgttatcccagctactcgggaggctgaggcaggagaatcgcttgaacccgggaagcagagggtgcagtgagccgagatcgatcgtaccaccgtactccagcctgggcgacagagcgagactccgcctcaaaaaaaaaaaaaaaaaaaaagaggtggtatctggaaatatttggcatcagtctgggaactgcatgtcagcatcaagaggaattaatgctacagaaagacaggcaaggctcaggccttcgggaggggagcacagtcacccaagcccagtctctgtagggcaaagagaggccgcactaccaattgctggccagggtcagcctcaggagacccctggcccggcagaggtgagtgaggagctgatgcggaagtgagagctggtcaggagcgaggccagggcttgcccggaggcaggtggagctcagtgactccggggtgatgctgtccttccatggcggagcccctcagtggcccctgacccactctccactcaccctccctccatactaagaggctgtgcttccaagcccagcccggttctagggacacacacttacacatggaattctagagggaataatatttttatttttaattgctgaagacttcaaacatacagaaaatcacttagaaactggcatacccacatcctagattttgttttatttgccccagatctttctctctctctctctctctctgcctctttcatttgttttaaggaaataaaatgttttttaaaatagcaacattaacattatcaatcagtggtggaatgtaagtccaaaccgcgatgagacagcatgagacactcatcaggatggttaaagacagcaccaaatgttggtgagggtgtggagcaacaggaactctcatgccttgtgggtggggatataaaatagtgcagctgctttggaaaaaggtctggggctatcctgtaaaattaaacatacacttaccctttgcccagctatttcaaccctagttatttatttaaggataatatgaaacatatggtcacaagaagacctatacaacgttctagccagaaaatagaggccaggtgtccattacaggagaacggacaaacaaatggcggtgttttcttacaaacggaatggtgtggtactctgcaacaaaaacgaatgaattactcatacacagaacagcacttgcaactctcaggaacaggatgctgggtgaaaggagccttacccaaagtgcatatgccatgtggttccattgatacgaaatgctgtaggttgctgcaaaagtaattgcggcttttgccattacttttacaccaacctatagaacaagcagaaccaatttacgatggaaaaactcagaacattggttccttctggagagattggaacagggtttgatcaggaaagggcataaggtaattttctaggtgatggtcatgttgtatacatcagtagggttttgggttacacacatgtatctattcatcaaaactcggcaactaatcacttgagatttgtacatttcatgatgtatcagctttatagcagaaggaaaaactaagccagtgttgagctctgttaatgatatgcacactggagggtttggggtcggggcatgatagctacaatagtctttgagttctataaaatatctgacagattaatagatgggcagatgaacacattaggtggtaatgcaaatatagtataatgttaacagtagcgtctcttaatgggcatatggggggtgttcagtgtaaatctttttcaccttatatttgaaattttttagaagaaattgttggcaaaaataaaagtaaaaatagctaagctcttcttttctgcccacctcatcccatcttcttttctctttccttcctctttaaggtaatttctttcttagaggtgatggtatcattccacatccatgttttactactttattgtatagacatatatccccacccaaacattattttgacagtttttttgttttttggttttttgtttttttgatacagaatctcgctctgtcacccaggctggagtgcagtggcacagtcctggctcactgcaacctccacctcctgggttcaagcgtttctcctgcctcagcctcctgagtagccaggattacagacacctgccaccacgcccggctaatttttgtatttttagtagagatgggatttcaccatgttggtcaggctggtcttggactcctgaccttgtgatccgcccgcctcggcctcccaaagtgctggaattacaggcaagagccactaggcctggccgagagtctttttttcaatggcataagtggttccatatcatatatgtccttttaaaactttaaaaatcagcgttattctttggagctaaatataaatctggttctttcatttgaactgctattaatatttcattgtgtaaatatgccactttattcatttccatgctaatgcactcactgtgaggtggcttccagggtattcatatttaatgtgattattgttaatgacacgcatgaatgtcaagccaggccctgcagccttgtagcaggtcctgtttgggctgctggaagctagagattcaatggcttgggggacatttatggcctgcctttgagaggtgccagaaaatcctccttcccaagatcccttggaaaggacttgtcacttgggtgtgggtatgcgcgtggggctggtgtatgcttctgtgtgtatgagccgtgagggctgtggctggatgctgcggcacctcaggttcctcaggatgaggacaggtgccttcagggagcatcgatgcatcctctggggtctacgcctttggcagtgctgggtccagtgctgctgcatagggaactgtcagccctcggactgctctttcttatctaaataacttgatgtagtccaagatcccagagaacataaatctggtcgtcttatgacactagtataaaacactttaaagaaattataaattgctaagcttgtcctgtatagtaagcttgactcattcttggcaatgtgaggctgatgacattaacaatcccagctgcaaataatcacaatttagtcttgtgcttcaggcttttttgttattaagtttttgcttaaattctcatttctgaatgcttctaactcgaatattcttttatttattcataaaatattcattcaataaatattgatacttcagcaatttgctgtgtggtaagccctgtgtcaggcttcaggcgtgctgagaagaataaataagggcccctcctcgctggggattggcaacacattgggacaagtgtctaacccagccagagcggctgcccttttctgcctgacaagggcatcttgctgtcccgggccgggtgggagcgttgggtgaactagaggtcatgaggttacgtccatctgggaagtcatcttaggcgcttcccctgctgtgcccactgctggggatacccatgaatccatgcaactctgccctgagccctagaatgcatgattcccttcccctccctttcccaaacctctctcagtgcctcaccggccttctgtgggtcagatgcacactcggcctccgtggaggggttgtgcagagcagtgcaggtggaggaagtggaaatggctctaccttacttcgcaacgccggacagcaccttacagacctcagacctggtccctgtccttccaggctttgtgtcttgagtatccagttccttcccagagtcctgagccgaacctctctcctggctctcccgttcccctacgaggaggcacccctgccaccaccccccggccccccacccccaggctgtgctaaacctaaagaagcttcttttgcctgcgatctgccctctggagtggggagggcatgggctctgcctggaggtgtgggcagtagtggggctgagactccagcttcatcgctaccagcaggagcggaaggtggtgctctcactgctacctgggagggaggcaggtgcacagaacttttctctgcagatagcacagcctactcttaaaggaagagccagattcctggaattaacatggcttggatgctgccgtttgcagaactggcattcaaaggtggcctgcaatctgagagaccaaccccagttagataattgtggtgcctgccgcctctcctccctcctagtaggaaggggtgatctcatctcacccagtgcaagagctatggatagaaatgtgtccccaacagcacgaggaggagcaacatgcttcctgggggaagagaggatggaaatagtatttactgagcacttcccatatgaagtcacattcagtcctcataatattctcatgtgggaacagtgtcctcattttatagataagcaaaatgagtggctgatcaaagccactttgtggaaccccgtctgtctgacatccaggctctgccctgctgctccacacaccaaggggagacgatgctggagccaagcttgggatggtgtgagagaggccggggcgggggcaaaattctgtttatttcccactttctgctctgtgcagcctttggtaagttgggttcaagatcgtaaagtccagcttcacccagcagaagaaagggtgagatggagaagcaaactgggcctttgatatccagggtgttcatttgttaattcaccaagtatttcctgtgtatctccgaggtgccaggccctgctgggagtgaagctgctgagtacgtgtggtgttgcctgtgttttcactacacttatatttaggtgtggaagaaaagcacacaaacaggcaattgttatacagtgtgaggagaatgcagagcacataggaggggggcctaggactggggggccaaggaaggtggctaggagggcttcctggagaggtgatgagaatatggaaatgctgagttgctgcaacaaaataccatagactgggtggcttataaacaaccgaaaattatttctcatggttctggagactgcaggttcaagatcaagacgctgggcagattctggaggctgcaggttcaagatcaagacgctgggcagattctgtgggtggtgagggcccatttcctgcttcgtagttggaggcttctcactgtgtcctcacatggtgggaggggcaaagggtttttctcaagcttcatttaaaagaacactgatcctagtcatgtggattccatcttcatgagctgatcacctccctgaagccctgccctttaatataatcaccatggagggtaggatttcagcatgtagattttgtggggcataaacattcatttacagcacgacgtgacgagtgagcaggaggtggccagggccagtgtgccagggagagccgtgcaggcagggggagcagcatggtggaggggagtgtggtggggtggtaagtgtgaaagaggtgttcatagactgtgaatattagagtttttagaaattagcaatgccactcttatcatatttcttagcgagatcttgttagtctcatactttacaatggaatactgaagcgattggatgtagaaagtactttttcaccttcctaatctctcctttaaaaggtcctttggaaattagtgactcattcctcagcttgtgagtttctgtggcatgtgtgatacatcagttctgtaattaaggaccattagttaactttgcttttgccagatgtgatttgtgatgcttggtgcctggtgagtctgtttcctgggccccaggccattggtcatgacattcggaaccctgtttccagtcgagcagctggagatctgtattaacttgtatttctaccccggggcagtgttgggaaagacaccactttcataggcagttctacagggagtgggctttgcactcatttttccctatgagtaaaagaggtcgagacccaccaggggcatgcagtcagttggagctggaactgggctgctgagcaccagccacctgttctccaccgcccgcctttctgtgggagttgcccatggttccctaggctgcgttcccagaatcggccttccctcctcgtccattttccatgcacaaccggaaacagtggatgtctctccttagtgaaaccgcatgaactttcttaggaaaatacagtgttggcagcagcagcagcaaatttactggaaaattaagatacgacaattgtgggtttttttgcctaattatcaaaccattgaaattaaatttcatgacaaccctcatgtatgcataaacctctttataatgtatgataatagatgttatctcattacatgctttaagatgcccggctctgtccccctcgctcgctgcagggacaccgcatttagagggtgcagcggacctggcaccgaagcacccaaacgctgcggctgctggggagatggaccgccggcaggatctgagcggccagctctggctgtgtcttgatagagcatccacgtggatcatggcatggctctgctgcgagaggggcagggaagagccccacaggcaatggccaacctgggggctccacaacttctcctcgaggatgctttgagaaagtggtttctgggcaaccccatctcctgggggttatgtgggtgctgcactttcctgtttatcccaggtcagagcagcccccaactcaactatctggctactcctctcgcctgtctctttttgtttctggtttaattccttcaaacattccaaagaaccttgtgaatcatcaaagtgatgcttaaccgtgtggcgcccagtcttcttgcaggttgttattgaggcttatttatactgtgttggcattgctcatccctctgtgttccttctgcagtatgagttacagatgagtttttgcgtggattttctttgtacctcgtttttcaatctgaaaggaaatgaggagagtccctcagaaacataatttctagaaacaaggggaaagcatcctgatgtgccctcatcccttcagctgatgcggggagatggagacccgaggtcagttagtgagcccgtggcagaggcctgatagagcctgggctctggactccctggccagagctgtctctgcaacccccactggccccactaatgagcagtttttacagttttcctgatacaaacccagatggctctgggatcaatagggacctcccagtgattaataggcagagggaaggaacgtttgcgttcagcctggagaagcaattggattcgagaaattcaatgctggggaagatgcagtggtttgctgactcaggtgacaagagaaattcttctctttctgtgagaaaagaaaaataggatgacttgattggctttccacacaccacgcgcctctttgttcctcagaaaccttcgacaggaggttttccttctgggtctttgcctctgttgtccgtgggtggcttctgcggtggggaaatgtctggagcctttcctagcgcgtggaaggtggggggcgtgtggctcctcccacgcccaccctgtctgcagacctgtccccagctgtccacttgctgggctgagatgaacacgcacgggctggagccacgcggagccctctgcagcctcaactccgccccgagctggcttcgcgtgcctgggcagggcctcaccgtgcgccgagtgctcttcataaagtaggaatcgaatccatgcccggcaggttgatctaaagagcagcgttagaggccatgcccgatgcatggccagtggccagccgttggtgatggtgctgttacctcctggtgcccctttgttacagtgataatttcaaagctgtccccctccagatcgcacggctggagcacgtcatggctcgtgtgcagggcaggcattccgggacttttgtttccttcttgtggaggtgaccggacccaatttctgctcaagtagttggttgttatttggggccccatttgcctggattctcagtggcattgagagtggaggcagagaaagttctcctggcattggtcaggagtgaggagccacccgcttagtgaacagagaagattcgctatggagaactgtgtccgaggtgtaacattggtagctgggcccgtttaggcagaggacaacactgaggtgtgccagttatggggcggctgcagggaggggtgtggtccctcggggttggcatcttgttagagaagtctgggggggcatggagctgccacagccatttgagaaggggacacctggggtcttggaagtgaggtgcgatgtcactggggggtacctgcaggaatcgtagacagaaaactctcgaggggcaaggggaggcccagggagagcagatcgcttcttccctctgtggtccgaaggcctcccgccagcacccatgggcagagcgggaatgtggtctgtggagtctcagccccacaccccagctggcagagaggagtcagggcgtcacttgcccatcggccacggctcttctttccctcaagccccgctttaggccagctctgtcctgggtccccctggcagtgctgtgaggggcactgtcctgtcctcgacgctgtgggtctcttggttccccagccttgctgtgaggggcgctgtcctgtcctcctcgacactgtgggtctcttggatggggtttgttgttttccacctcagattctccctcttgctgtactagaggttcgtagactttgctgtgtgttgtcatcacccgggggtctttactaaagaggggtgcctgtcccctcctctcacccgccagcatcctgactggactggctggacgcagcctgggcattggcatatttaatctcctctggtgccgaccgtgcacccgagtgcaggagccatgacgccaggctgcagctgtctgcgagcagcacccgtgtccgttcgtgtccgcccttcccaccaccttggtcctccatctggcctgtgctgggctagagacgtttggcttgcgagtgggcgggtgagtgggaagctccgtggcagcgtctggccagagcccaggacccctccttcctggggcaggtggtcccaccggagccttcactcccaggctctcaccacctacacggttcttaagccaagcctggcccagcaggagatttttcagagggacagggtggtggtcaaccttcaggtcaccaggaagagacaccaagtcctgacaccagtggttaattctcttgtggtgcttgcattcctgtcagacctgaccctcacggctccgcacctggcctgctgtcaaccacggcgccccagttggtctgcgggcaagaactcttcactcccctcctggggatgggagcccggccaccgagtcccacacacacatctctcctgtgaagcccacccagatgtctctgcccgtctatgaagaaagcaactcaggttatctgtggaaaaaaaccagagtgctctggacggagcagagacgcgttgcgatcccagctccactggttctctgggacctcggcctgccttcagcccctcatctgtccagcggggagtgggaatcccagccacacccgcctcaggcctgggcaacttccgtgaaggtgcccgagtgaaagggcattgcagagggtagcctggcacagacacagccatcgctgtgtggtctttcacgtcacagctttattatggagatttcacacacatacacagaaggcaccatcttcggataatgaccccacgtgcttgtcgcccaccttcaacaagcagcaatgctcggtggatttttctcatctgttatccctacctatttccccatttcctctaattttgaagcagatccaatcaatcatattatttcatctgtaaacattttcatatttaatgctgtaactctttttaaatgtcacaatacttcattatgctttaaaattaacaatgaacagttcctcattatcaacaagtacccagccggtgtttaaatttccggttgtctcagtgacctatttcctaacattggtttgcatcagaattcaagaaatggctatgtctcaatccatgtttaatgtgcaggttgactgttcacctcttttcctcttggacattttgcatttcgttaaaaaggtcccagggtggggttctgccggttgtgtgcctgtggtcctcttaaacttgttcctcagccgggcgccgtggctcacacctgtcatcccagcactttgggaggccaaggtgggaggatcccttgaagccaggagttcgagaccagcctggccaacaaggtgaaaccccagctctactaaaaatacaaaacaaaacaaaacttgtttttcggtcttctttctctttttttagtcctcattaaattaggagtaggaggctgggtgcggtggctcacacccataatcccagcactttaggaggccgtggtgggtggatcacctaaggtcaggagtttgagaccagcctgcccaacatggtgaaaccccgtttctactaaagatacaaaaattagccgggcgtggtggcacacacctgtaatctcagctattcgggaggctaaggcaggggaattgcttgaacccaggagacggaggctacagtgagctgagatcgccccactgcactccagcctgggcaacagagtgagactccatctcaaaaatgaatgaatgaatgaatgaatgaatgaggaggagggaggcttgatcgtattcagcattttttttttttttttgagacagagtctcactctgtcgcccaggctggagtgcagtggcgcgatctccgctctctgcaagctctgcctcccaggttcacgccattctcctgcctcagcctccagagtagctgggactacaggcgcccgccaccacgcccggctaattttttgtatttttactagagacggggtttcaccatgttagccagggtggtctcgatctgacctcgtgatccacccgcctcggcctcccaaagtgctgggattacaggtgtgagccaccacgcctggcctcagcattttttttcgaagctacttcatggatactgttgtgaatctccatcggcagatactgagtgtttatcggttctgtgatggggccgtttcatttgatggtgttctcttacccagccctgtcccgcacgggccgttacacctgttctggcacattcaagccctctcgtccccagaaaaacccttactcttctcctgcatggctcgaaacaaaatatgaaagtgctttactgcttgaggtttggaagtgatcaggtgaagatgcgaagacatttgctgtatgttttcaggccagaatcgtcttactcatcagataatccagacccagtagctgcccagggagagaaattggggcagcattgaccctgattccgcggccctgcaggattggaaacttccagacacttctggcagctcaccagtttgtctcggggaccctgtgtctccccctacagctcccccacactgctcctctcagaggagcagaggtgaacaggcagcatcctgccttccaggtgcctgtgagtaagtgactctggtgccagtatccccgcagaaggcgaagggcaccgggatggcagctgagtcctccctgccagactctgcaaggctgcttcatgtacgtcttggcctgtggcttctccctgtggttttcatttacctctccaagggctgatgggagcgttttctcagctcctcacgagccgtgcgcagatcccttgtggtgaggcacctgagcctttggcaccctttttaaaaccaggttcgtagccgccttattattgagtcagagagttccttgtgcattgtggtcataagccctttgtcaaatgcctggtttagagatacttctcccagtctgcgatttgtctttttcttagcggtgagagaaattgtaggtgctgatgaagtacagtttatcaatttttaaacataggctgtacctttggtgtcataagcctctgcataatccatggtcacaaatatgttctcctatgttgtttttagaagttttatagttttaaatcttacatttatgtccataatccttttgagctaattttttgtgtcgggtgtgaggtgaaagcttttcttatgttgcatatggatatccagttattccagcatggggtgttaaaaaaaaccctggccaggcgcggtggctcacgcctgtaatcccagcactttgggaggctgaggcgagcggatcacgaggtcaggagatcgagaccatcctggctaacacagtggaaccccgtctgtactaaaagtacaaaaaattagccgggcgaggtggcgggcgcctgtagtcccagctactggggaggctgaggcaggagaatggcgtgaaccccgggggggtgaagcctgcagtgagactccatctcaaaaaaaaaaaaaaaaaaaaaaagactgtcctttctccattggatggctttagtgcctttgtctaaaatcagttgaccataaacatgagggttattttctgaagacacttattagaagagagagcagctgatggggatgtcagtggatgggctgacaggtgacatgaagagaggaggggcgttggcacagccagggcagcttgagtggggtgaagttgggagggaaatggcgtcccatggcctggatgctgatgctcggtgctaatgtaggagtgtgggggtggtgaggggtcaacttggctgggccaaatcctagaggaccttggctggcaggttgagggaaattgatctttatattttttaatgaggaatttgtaggtttttgaagaggatgcctttgccttgatctttgtcttttggggtttctctgttttcacctgtagcataaatgaccacttcacagctggcttgaaagcctcctgtgggagtcgtggttctcaaagtgcggacccaggccagcagcagcaccatcacctgggaacttgctagaaatgcaaattcttagacccacgccaggcttactgtggggcagggcccagcgatctgtagtttaagaggccctccaggtgctctgacgttcagggaagtcacagaacctgtgtgctagcgaaatgcggaggccagtgatccaggctgaccagcagtcgccactgtctctagtgctgcccagaagccacacctgtgtatggagcctcattcacatgcagtttggtggaaagtctcgtctagggcagtccttgttttcattggcctctagtgaaagttgccagaccttggtcctaggttcactcataatcaccgctgtcccttcttggtggtgctttccagcctggagagtgagctggagaggcagtctggagacaaggatgggctttgactctgatggggtgcagtgctgggggagccctttgaatcgggtgcggctgatctaggtctgctgatgggaggcagagcaggcagccccagggatggcctgtggaggtgccctcggcagagctacagcccctggggaacagggcggagagggagaggcagccggaggctgccgggcggagtggaagaccacggaaacctgggcccagcctccacatgagctggtcttctgtgagcctcgcgtccacgtctgtaaaatggagccctgtaggagctgagaaggagcatgaacagcacacacagcaggagccggcacggtgggcagcctggggtgtgcctcacctcccttgtctacagggatgctttagtgggcccagggccctgggccccagctggctgaatgtcatggagaaaacattgacctcaagccatcctgagttgaataacttcattttcttaacctctgtgagctttagtttccacaagggctgcacaatcaggactatcataactacccctctgggttgccaagaggttgtagtgaggtcatgtgggtgtttctgtggtgggcacttaatgtaatcagtggtggggtcttgtctgctgatgctgcagctgctggaacggggagatgttgggttagctcaggaagaacccgtcacatggcggaggctcatccaggaattcctgcccttcctgggagactgtacatccacgctctgagattctactagctttccattttctgttgtgttgtctgtaacttgttctcctagaagcgcacagttttctcttgcgtaccgatacatgagcctgctgggcgagctgtgaattcagcctcttattatctcagattccccatccatctttcaaccgtggcaggcacaggagagaaacctgagcctgagtaatctcaaactcctttcctcaccgcctctccctgacgagtacccagtgtggcctggaggcttgggcggcagggatggggggaccatggagccgtcaggccgctctcgaagctcctgctgctttctttggtactctgcccttgctcacctgccattcgtccttatagatcatttctccctcccaggtggcccacagggtgtgtggggaggttcgcagggactcgagagggatggcagtagcttgacgggcctggtgcgtgtctcaacatccaggagtgggtctgtggagaaggtccctggggtggtttgggggcctggcactcacctcggcctcctcccccagcctcccagagggtcctgcatgtggggaaggaaaacctttctcagtaccgccttcgacttttccctggtgctgctcagtgtggtttcacccgtgccttccggggtcagcgccagtgactccagaggccggaaactacttttgttcattcgtcgttttccaatttcatagaaatttctcagtgatttttatttccgttactattccctcttctcttagcagtggaacatttcaactttttcagtttgccccctgtccacgtcaggtcttggtaggaaggtggacttggtaagccctgccttgtgtgaccctcacggtcagtgtgagagcaggctgaggcagggtgggtgccacggccctgtggttttcatccaggactggagatttttgagaatgaagggcagacggtgatcacagatcttgcagggacggcaggcctaaacctggactgtccaggggcgctggcccgtggccaccctgctgctggggtgatacggtgcggggcctgacccctccaaggcctcccctatcctagacctttcctcttggacggatgcctcagaggccagtctgtgctgggtccctctctgttcacatgacaaggacttgctaaacgtttgtctatgcagggccacaataactgggacgtactttttcttatggtagaaacatttgccatagaaaaagggtggcttttaaattccacctgcgctctagttgttgaagccatttcttcctcctccccctagtccatggggtagctgggggcaggaatgagaatgtggtcgtcccttctgagtcagtggtgggaggagaggagctgctgggcttcagccgagcccctggacaaggggagcctgaggccgggtctgggacggagtatcagctgtggggaactggaactccgaccttcttccccgtctgcctcatctataagcattttggtaatgggaaaagaaatttttgtttattttgcatcctccatgttttagggaagttctttggggtccaagttttcattctctctgtgaccccagggatccagcctcagatgctgaggcttagttgaggtacagataaaacatactttggccacagcacctgtgatttgtgttgctctgggccaagtcgtggccagggctgtggtgtctggggcccaggtcgtgtcttgtgtgagttgtacgtggtctggggagtctgaaccttgagcttctgaggccctgtgccctttttccaagtagcctgtcagatggaatggggttctgtggcgtagcctccccggagaggcacatttgcaaggatgcagaggaattctgtgttttcctgtactcctgggtagagcctcctaaaatacggttcttttcatcatcttaattttaatctattactgtgagaaaactttggtaaaaacaagtatcaaatgttgttgttctgtacagaagcacctcccaggtaagtttgggactcacccctcctcagagttgggccatgggcattttataagctgagagagtcaaaggtatttgtttccttaaatgcgttttgctcaattctccctgaagctttggtggtggcatgagggcatgggtgtggggtggtatcagggtgtgttctttatactgaaaattaaaaatatgtaactagggccgggcatggtggctcacgcctgtaatcccagcactttaggaagccaaggcaggtggatgacttgaggtcaggagttcgagatcagcctggccaacatggtgaaacccccatctctactaagaatacaaaaaaatttaggcgggcatggtggcgcttgcctgtagtcccagcaacttgagaggctgaagcaggagaatcgcttgaacccaggaggtggacgtcgcagtgagccatcactgcactccagcctgggtgacagagcgagcgagactctgtctcaaaaaaaaaaattgtgtgtgtgtgtgtatatatatatatgtatatatatatgtgtatatatgtgtgtgtatatatatatgtgtgtgtgtgtgtgtatatatatatgtgtgtgtgtgtgtatatatatatatatgaactttagcattcattcttgccattgattcctcatgttaagtgcatgtcatcttgccaggcacgcctggtgctggtgaaacagctgagaacaaggcatggttctttgtgcagagagcactgggctcgaggggatagagcacccacctctgcaaggtatgaaggcaggggcaggcccagagactgctgaggaggggctcatcctccagccagcctgggtgcaggtgttggggacagctttctggtggaagaggccttcaggggagattcaccagccaggaggagctgggcaggcagagggcagctgggtggggattgcttaccagtgaggactgcctgtgccaggccaggaggttgggggcaggggagcacactgggttcccgaggctgaagctgttcagggtgggagtgagggcagagacgatagtccagggtgaggctggaggggcagcagggcccatgagccaaggtcgaagtcaggtctcttgtgagggaagggacggtcatgagaaggcaggagagtgtgccatcagattggccttttgggaagtgcctggaaggggtgagtgacgactggcgggagcctaggtgctgatctcggggtgggttgcagtggctgggcctgggggtgccattggtgcagagaaaagaggtggattccgggatgtgtgggtaggaggagaatttggcagggtttaggggtgtggggtatggagaaggaggggaagggtttgggccacagggcaggtggggttgccgttcactcactcggggagggcaggagtcacagctggggtggagggggttcgacagggggcagaggttgtctagccacgtggcccccatcctttcaggttcagctggcttctggccacaccagaaaggttgtactgtgatcctggacaaagggcactgggctgcgcattgcaggcctggcacgtgactctacccctgccacagccctgctccctgaatttggcccttgacacttaggtccagtccagcaagctgggcctctgctgggtcccatgaggaggtagaagtagagctgattataaccctgtaaggcacctggaaaaggtgaccctttttcttccctcttgtgagtgagaccctgggaaaggcggagggaagccgcgcccctccgtgtgtctgaggtctctgggacaggctgtatgaaggggcctctctctggggtgccagagggatctcaggctactggctcccgcttctcccagcccagatctgccctcctgccttcccttgtaccctccctccccttgatcctctccttcctgcccattcttgtgtcctcaaatgcctctcatgtcctgggctccctaatttctaagactttcacatcttctctcatgtgacatgccactgaggctgtgaacagcactggggaccgagttctgcagttcccagcagagggctgtgacgcccagagatgctgcgggcaccagcgtcaggcggcagagctgggacctggactcctgatgcccggctccttctctttgggcatcgctggcgcctgtttccgaggtgcttcccttcagccttacatgatgcttttctgcctaggaagggcagaaagagcaggaggaggaggtctcgtagaaaacaggctgtggtttatgaccaggctgtttatggccaagaaaaattgctgtctttccttagactgtggctaacacaacattttttgcgtactgaaagaaatacttcaatgtggaaaactggctggaaacttggataacaagacagtgtcatagagcaaagtgcttgcctgttagaactgttggcggcaaaaccaaagtgaaatgaggctgacataatggagtcatttaatttgtgttagttcctaaagtctttgtgaagttacattaactccagatctattagccactggaaactccccaagatagacacaatcaaagcagccatggcaggggagagcatttttggcttcccaagcttgaacctttgtgcctggtggcactggggggcgaggagcattccacggcatcccactgacatttgctgacacctttgtgctctacaggttcacattttccagcccttcagtgttagctgcaggtttgcagatgtgccttgtcacctctgtgatccttgtcatattcctgctagcccattgaggagacccaggcttggtgaggtgaagccccttgccccaggtggcgctgctaggatgtgtctgagccaggatccgaacctaggccatgagaccctcctgcagtgacttctgtcagacctgccttgcttggccattccaaatatgaatcacgttttctccaggagccaagccacgcaccaggcgctgcagatgcggctattaaaaggacagtggctttgagaccccagtctagcgagagggaaaggctgcagtacaaatgagcacaggaggcgggggcatccaaggaggggcacagaagctgccctggggtgggaggtgtgtgacatgatgccctctgtctcatgcccaaagcagcgacactggatcttgaacataagaacgggcatttgcccatccgggccatcttctcaattcccttcgctcatctttccacttggaatggctgcgttagacatgcacgatccacgtgcagtgtgcatacgtgtgttcagagaatgtggctgtgttcacacatcttgcacacacacacaaaaccatgactcctgttcctgctatctctggactcctgttgttctagccatggagtttgtctgaagtgcagctggagctgatggtctctccatgtgacaaattgtggacgggccataagcttctgggctgcagagacgggggttagagtccttccttcaccacatttgcatgtggtgtaatctcgggtcagtgacttaacctctctgagcctcagtgttggcatctgtgaaacggggatgatgtcagtacctcccttgctaggccgggatgaggacaagttgggtgactcgctcttgtgcacctggtgtagtgcctgtcttgtatttaacaactcatccgtaagtggtagtcgctccacttatgagtactcttctgtggcaggctcctgtcattctgaagaggagaacgggaagaggcccctccacatgagccttgtccggagtagacaacgtctcccttaaggagcgggtgactttgtgaatgcacgtatccctgcccactagcgacgtgattctggagcccaggctggtctggcccaaaggccggccgagtcccattgttcctgctggccttgtccccaccatatttcagggtcgtcttggagctctctgagatcccaggaaggcaggagtcagactgggcatcccctcctgggaaagaacataagacttttaagtggggctggtttccagggcttgctggagacatggggacacacagataataggcagctaaacatgggggagataatcaggctgtgggccaggggtgcgggtttctcagctttacgtaatgaaagagcacacagaagcaccattgtgcttttttttattttttgtttttttattttgttttgttttttggttttttttttgagacagagtcttgctctgtcgcccaggctggagtacagtggtgcgatcttggctcactgcagtctcccaacctccacctccctggttcaagcaattcccctgcctcagcctcctgagtagctgggattacaggtgcacgccaccatgcctggctaatttttttgtatttttagtagagacagggtttcaccatgttcgccagactggtctggaactcctgacctcaggcagtccgcccgcctcggcctcccaaagtgctgggattataggtgtgagccaccgcgcccggccaccattgtgttttttttaaaaacaaaaacaaagcgtgctttttaaaacctgttttattatacagtttccagttattattccatagcagagggagaagacaaaggaaaaatgctggggtaatacaacatacagtgctgtgggcgtgaggccatgaacagccagttgtgctctttcttcctggcgggcccaggcatttcctcaccatgtcacctgcctttggcttccccagccactgtgatcagggctcctggagcactctgtgcacatgtcctgcacagcatatgcctagtgtcattgtttagacatcagtctctccactgggagccccctttggcaggaatcctgtcttcatcatctctctgtaccgacacctagctgagtggccaatacagtaggaactggatcgagtcattcgaaccctgatctgtatcattctgtgcaggataagttattctccagtaacaaatggcccagaatcttagtgacttagtgcagcagcacaaatacttgtttctcatttaagttctgtgtctattgcagcctggttttggctctgctgcggtctgctttcattcagtgacccaagtcctctctgagacatactggggagtatggcagagggaaaagtgaaggggaaggacccaagaattgctcatgagcattctgcttgcaggtggcctgtgtgacttccattatgctctcagtcaaacaagtcatgaggcagccagaacccaacaaggtgaggctggatgatcctgtaggaaggggccctgagtgtttcggacagtaacgcaatctaccgcacttccactgcatttaaagacaaactaccatgcttattaaaacttcgtctttatgttgactttttgctctctttaaaaggtgcatgcttttttcttaccctatgttaatatgtcatgttacagttgactctgtattctcttattcttttctattttcattccaaagactttcatggagcacccagtttgtgctaaaccgtatgtcgggaatggtgctgaggttgcaccgaaatgaccatctgaaacctgccatgatatgtattgatgcacgtgtgtactcagcatgtaaatgaggctgttgttcttttcattggggtttattgagcacttattagactcaaccccctatggccggtacagaaaaacagctctctccctgctcttgagaaggttttgttacagtgggattagaaaggagctggcatttattgagacgcagagtgtgccaagcatcgtgccacctgcagccctaaggaacaggcaaatttatacccatttaacacaagaaacagactgagacaaaaacagaagcaatgcgtgcacagtaggctattctggaagaaggaccaagcttgggcctgtgtgcctccctgcaggagccccaccgctgcaggagctagggctgaggaagggtgcagcatgcatcctgtgggagcagagagcagggtctgatgggtgagaagtctcagccctgggtgagagcaccctgccctggcagagagaggagcttgtgggcccagggtgatcctgcgtttcccaccactccgtgtgccgggaacccagcaaagtggggcttggatgcaggttatctggcatctggtctccttctctggggtggaatgggatgactgtgccccatgtccacctcccttcgaggatgagagatggtcaagccagtggccttgtctgttctgcccccacctctcatactgtgactcgcttggaggggcccagaggcactggctgagcagaactcttcacaacttcatagaaacgtcctatgtgaaagtagtagtcgtagttactgtttttcaaaatggataggtaccaaggacattttccccttgcaaagcctcccgcagacaggcctggtgctgtgccggaaggccttgtggcgcaggctgtgcgagatgtcagcccgagatgtcagtctgctgtgcttccctcactgctgtttattggtgattaggttaaaggaaattcttttatttccaattagtcctccccagtgaacctgttccacattcagcacgtagccaactctgctcaacatggagccttctctcccccgtgtgatgcgtctctgctttttaaaagtaattgcattgtttgtatttccccttgcactagggtatgtctctggaacagggaagcagaggtttggttggtgaatgtgaatggatacgggatggaaaatctcagccagtgtcagctgggggctcctggagaccagcaagcaaagcttctttgccttggaaacctttgttctttgttcttgataaattttctactattaaaaattcatgaatgcatcattttcggctcaatgagatcctaggacctatcttgtcagccccagttctgcagctctgatggactcccctgaggaggacgtgtgcagacttcagtctgttcaaaggaagctaatgaggtggctgggagcctcgggagctgctgcagcaccccagggtgtcatcctggggaaaaggtggcttttcaaggattgtcatgcggggagaatctcccaacattgcaagttatagagggcacatttcagaaaacacaggactatcctaaatggtcattttccactgcacaatcatttctcaattcctgaacgtgcaaagcactgtgctaggggctgagggcctgcagatgaatgggccgtcatccttgccttgtggttagaagcctgtggaaggcagctgggccctgtgtcccccagagaccccctgctgagggacgaagacaggccagtccacagagagttacagccagcctgggctgacttggaatagactcagtcctacagctgaggacagttcagcaccttcacctggccccgagtccagtggatcagtaggagagcaacagccccagttaggctcggtacgataggatagatcagctgcatttgggcaatgttatggacagcattcctctcctgctttcacgtaagcttctcaagtgcatgtatgagcagcactggggtctaaggtccttggtgggaatagtactttagggaaattaaaaatctggcctccagcaaatattatttttcctcaaatttgttgaggactcaaaggtatacagtgttgccatgcttcctaccatttcatctctttatgttttcttaaataactaggctttatcatcttggagatgctgttctgcatatttgtaatgatttttctgtatagaaatacctccgaagtcccttaagctttggaatggttaagttggaagggatctttgagataccgaaagccctgatgccctgcctcacagatgaggatcctgaggctcagagtggccttctcagtgcctggtagaagagcctcgagtagaacttggctttcggcttcttagatcatagccactgaatcttctccaaggcggaggattcttagagagtgttgagttagtgctctgtgagagagtgcattccagagttggctatgaactgattctccacacaccctgtggagagaccaccatccatctgtcagtctggagaatcccgcctcattctcccagacatcatctctgccctgaggccttccctggcctcctgaggtgctcccccgctatttttttttttttttttttttgagacagagtcttgctctgtcgcccaggctggagtacaggtggcgcgatctctgctcactgcaagctccacctgccaggttcatgccattctcctgcctcagcctcccaagtagctgggactacaggtgcccgccaccacgcccggctaattttttgtatttttagtacagacaaggtttcaccatgttagccaggctggtcttgatctcctgacctcgtgatccacccgcctcggcctcccaaagtgctgggattacaggcgtgagccaccgtgcctggctaaaaacaaacataatttttttatagttgcataagtcaattctacatatataccataatttactaatcatgccctatcatcagtcattttaattgattccattgtttctgtattttaaataacatagaaataagcatccttgtgtttgagacttggtctgtagttgttttttttttttttttttttttttttttggtagaactggttctcggagggaatccctcactggttccgacgccctttaggtcctgtgttacatctatcaaatggctttgcaggtatgctgtagcatgaaggtgtgcttaattttcatgaaaacctgaacatttcctggtagatcatctaaaagtgaaagggaaaggggcccacgtgacctgaggccatgaaaggagaatgagttgtgttgccttcaactgaaaggacgagtctcccatccctccaaaagctcctacatggccacaggaagccacgctcacccagggaataaggatgaaatgaaatgagtgagcaaaacagtaaataagtgaaaatgggcaaattccttaactcctctacacctcagccatccttgggaagcctagggttaaatctaaccttcctagaagtatctgctgtgctgtttccgtagcccgggcttagaaggaggcagacgcagcattgttagcctgttagccatgatttagtgcaaggctccaagggagagcatgagagccactggggtgggaaaaaatagcagtattatcaccgatttctatgtattgtatccaaaggtctatgaaaaattaaaccttgctacatgatacttaatatgcaggccacattaaatatcatgtagtctttaatgagagacacctccgtctctcgttagtggtattagttctctattgctgctgtaacaaattatcacaagcttattggcttaaaacaacacacatttattattttccactcctgggggtcagaggtctgaacatggaggagtaagctgtatgcctgctggaggcctggggggaatctgttcccttgctcctccggcttcctgaggcccctgcactccttggctcatggcccagcctccctccagcctctgcataagtttgcctccttctgtggctccaacccaactgcctccctctctccattataaggacccttatgctgctcaaggctgtgatgctgggcctccctgagctgaccggggagggagctctggtgggttcttgcagaagctctttgggtcctgctgtgaaagtccatgtgtcctcctggtcaccgtggccacatgcttccagtggggctgggagaatggcagtgggttctccaggattgggactgatgtctggcaccatgtcaaggtccaacttcaggctcaccccaagtttattctggcaacatggataaatgttccaatgactagatggaagaggcaggatatgatggtgtttggatgatagatactactgaaaaaccacaaatactgtgtgtgtgttgaatgaatggatgaatgaaaaaaagagaacatacaacttgtgttcttacaccttggtgcctttgctcagcttcacggcttatggatggctatcaagtttattctgatgtgttataatagctatttagcatgtgatatgttacagacactgaatcttactgttctgggatcttgggatctttggagtgccgattttcttcccggaaatctctgcggccagtggtgcctttgcccgagttcttgtcctgcatccaggaagactgaggtacaaagacatatgaagggtgaacaagatgaagatgagcgtcattgagtgttacaacagctagaggagaccacagtggatagctcctctttgtaggcaagtcatccttcaagtgttcagttctcagcagagaagaggccctggagagggtagctcctctgaaactggttgtcctgatgtctgcagttctcagcagagagaggagctcctctctgcagctggttgtcccatcatctccagctatcagcagaggggttatttgtctctgcagctggtcatcccgtcatctctctgccctgtttgtcctctggctatcctctgtcatcctctcttctaccctggctgagtctggggcttttataaacctcacaggcgaggaagtgcctgccgactggtccataggcagccatgggtgggtccagaagaggcagcacaagtcccccgctttgagatcagagcaggcaccaggagctgagagaggccaggcagtgggagcagacacccctgagcctgcagggatgaggggagggtcctttctggggcccccaagggtgcaggctacaggctgcagaaacgcccaggtcctgcacctgggaggatggctgcaaccacacctgggaaggcagttcctgcctgttcctggctcccctgagagcacagggaggcttggctccatagctgcagtttcagtggctgtagccctgcccagtagggtggggctcttgcctgctccgtagagcaggaggcctgggtctgcagctatggtttgggtggtggtttgggcagctgtggcaccccaggtgctcccactccaattcagaaggggtggggctctcactggctccatggagtatacagccccagccatgcctccctgccatgctccctgccacagccggcatgatggcagcagctactgccatcatatagaaagaaggcccttgaaccagagcctgtgtgctcacagctatccctgctctgtgtagtgggcagacggtagaaatgtgcaggcgcagctgaggacacacgtgggtttgtccgaggacacatgtgggtttcctgctgtcctcctcttcagcatataccaggagaaggacgttctgtgttgggatctcatgtcctgtaatctgccttgtttgtttttttcttcctgtctctagctctgaaggggttacaaaaggagatgttttgttatttgtttgcttgttttatggaacttggtattggggacacgtggaccctgaagggaaatcctaaaacgttaggggttaagccaccgaacaaccattatttgtccctactggctcctcgcgggcaccactgggaacagattgtgacttgctgtggagcccccatgcaagctgagccccaccagctgcagtggcaggagtgcagaagggacagcagctctgtcacttggggctcttcctgagggccaggtggggtgcttgggtgtcccccacatggtcaccgtcctctccacaactctggctaacaggcaggattctggcttctccgttgaggacggagagattggtgagtcctggcctacagctggcgagaggcagagtccggacttgacagctgggtcacctgtcacagtggttggtagccgtggggcggtgtggcctgtggaaggcacagatacgggtagtagtggagctggcctgacaaagggtcaggctgacaaaaaggatgaatgacattgagaggcgggagaacccaaggaggggtggccagttcagaccaggtacagagggagagggctctggaacacggggtgtcggggctcagggccaggctgaatcttccggagggcgatgctgggcagactcaccccaacaggagtctcactgggcctttgttcttttgtaaaggcttttgccacttgggtgtccaagctgtgggaggttcagtggtggtcagaggagtctcatcaagggatggggctcaggccattgtctgtggacagcagctgcatgcactgcagggtccaaagtatgccgaccacaggtgatgaggccagacggggttatatttaaattccaacctggcatttatttgccatccatcttgggcaagatacttaacccctgacaccttgatttccacatctgaaaaatgattcctcgtgactaatacatgagctgttctctataaagtgtctgctcaagcatctgacacaggtgctcagtctgtgagagcctctcgccgccgcctccttcctccatcgcccacagcccttgctctctgtgtcttgggttgtgacctaacttaaggctttgctgagactcctgggtcttgtgtggtctgagccagtggccagggtggcctcattggccctttgaagttctccacctgcctggggtcttgagttagcctctttactgtgtccctgctaggatgatatcacagggccaggtactgggtggctcccttcgcccttctcttctggcttgttggcctagtggctgtcctggcttaagcagtgcctgtaattgtagcttgagacatggtcctggtcgctgggttctctgtcttttgttctgcttccatttgttccctataacaaagctcttagtgcccagggagccactggggaggggtgttggtggtgggaaggtggaccctggcagtgctcttccttaagagggcttgccagcgttggtgcccaacagctcaaggtccacggctcagcttcacctctcaccagctgtggggcgagaagcaactcattccctctctgagcctccattttattggccataaaatggggataatgacctattttacaagctttccttggaggccattgatttatggatgttgtggctcccaaaagagtacctggcacagaggaagccctcagcaagtgctcggtgaagttggcgtttcaagccctctgttggtgttggcatcttaggccaggaacttcacctaaatacttcatcaaactctcctgacagcttttggggcttgacaactgtctataaccttattttacacacgggtaactgtggttaaatgatctgctcccagtcagaaagtggccaagctgggagccagtcccctgtgtgactcggaatgcagggctcccccgtgtgactcggaatgcagggctcccccgtgtgactcggaatgcagggctcccccgtgtgactcggaatgcagggctcccccgtgtgactcggaatgcagggctcccccgtgtgactcggaatgcagggctcccccgtgtgactcggaatgcagtgctcccccgtgtgactcggaatgcagtgctcccccgtgtgactcggaatgcagtgctcccccatgtgactcggaatgcagggctcccctgtgtgactcggaatgcagtgctcccctgtgtgactcggaatgcagtgctctgtgtcaggctgtcatctctggcatgtgttcccgagggcagtggtcacatctcatggtgtctacacaactccccttttccttgtggaaaggaaaaggcactccttacatgtctaaggaagctgactgcacaccctgtcctgcctcggggcgtgtctgtaaataagtgtggtgcctccgccatcccagacaccgtgttcctggggctacagagtggtcggcctcccttcaggaacctggagtccctttcttggtggaagcagcccttttgcagaagagcgtgggtctcttttatccaattagacacattttactgagtgatggctctgtgctgagtgcagtcgggataacagaaactgttgagaagtcagccttcctgtaagcctgcagagcaggcacagacgcaaatgccatcatgcagagccgggggtgggggcagccacctggaaactggggtcggcaaagactgtgagtctcatggagacatctgagctcagagctgtgggaacggtgtggttccagcatgctgagataatggggaaaggaaagaaaaggcattgaggtttaaaaaaccagagcatttagtggcaggaacaaagacacacacctgccagctcaagaggtgtgagtgtgttgtcaggggaagggagccgtggggactggccttgggacctggaagctcaggggccaaggcggccactttccttccctccttctgggatgcctatctcagctgctgtcctcatgcctgcagtggcagtgagtcctttcagcccaagtccccatcaccaactgactcgcgcatgattggcatctgacccacaaggggtctggctggtttgcatcaagagtctgtttgtgggccagtcagccaccatgtcacactcagggtctttttgttcagggagcctctcctcaggggctgtgggtggagctggaaggttggcagaaacctctgatacatttgggaacagaaacgacgtcagtttgattagaacacggggcctttggagaggacgaagaggaggctgggatggttggcaagccctttgtgatgggctccccttatgctgctgatggctcggcccgaggggggcagtgtgacctgcatggcacaggggggtcctgtgtcccctgagcaagcgagtgagccacccctgcggctgtggctgagggtttcctgcatggcatgcacctggtgccgggccttctgggccagggaatgtgacacttgcttctttctccctctgcctctccaagcttggacagctggaggtggagagagcacagccctgtgtactgagcacacgtgccaggcgccagaaggcatggtgcggtgttgccatcccccttttattcccgaggacacccagacacagcgtgccctacctaggtccccagagtcaacttgtgacaggtctcctgctgtccctgcctctctctgactccagagtccttgctgtctgccaaacatcccttcatttattttaaaaagaaaaggctacatgtagagcgatacaggttgcctgctgttcccctccgataggtgccgcccaccctagcgtgccccgtccaggacagccacctcagtcgcccgagtcccccaaggctgcagggcaggtaggcggccctccctgctcatggcaccctcccaggtctgctgtttccatggcaaccctcttggcctgggctggcccaagcttccggactagggtggctgtggctgttggactcattggaactgtgttagctatttttagctcctgtgaggaaaatcttgtggcttataaatgtcacaggatcaaatatgttttcagagcatggggcccgctctgtgtggaatgcgattttgctgtctctgaggaagtggcctttgaagccgtgtccctcccgctcgaaggcagcaagcacctcagggccttatccggtgtcctcactgacatcccatcccctcttcagctcctgaaatcccatcagatttgtgggttaactgagagagagtggctgggtgtttttaccacagaattcacccctcagcacggcctgaaggaggtgcttgtcctccagggtgtgggaggccactctgtagggataggggagtaggaggcataggacctgcccggggtggcacaacgagtctacgcggagccaggatggaagcagtctggccagtgcttcccctctgcatccacaggcgccaggctctgctgagctgagcagtgctgttccaggcacacaggtctttgtttcttgtcaatcagaagggcctgtcctgattggaaacaattcctaggaggcatttgccatgtacgagacaccgtggtggagggtggagaaataggtcaggcgtaggcccaacatcaaggagacgctatgctggcagctgatggagacacatgcctcagaaacaacatcccatgggccgggcgcggtggctcacgcctgtaatcccagcactttgggaggttgaggtgggcggatcacaaggtcaagagtttgagaccagtgtggcaaacatagtgaaaccccgtctctactaaaaatacaaaaaattatctgggcgtggtggtgggtgcctgtaatcccagctactcaggaggctgagtcaggagaattgcttgaatccggggggcagaggttgcagtgagccgagatcacaccactgcactccagcccaggcgacagtgtgagactccatctcaaaataaaagaaaaaaaaaaacgaaacaacatcccatgtagggtgaaatgcacgaaagaacaaggtgctgtgcacacaggggtgggtgtttcgaacgaggagcatcggagctggttctaggcacagccacactctcgtcaggtctccgcgtgctaaccagctgcctcccttccagccacacggcgggagaaacgaggacccagacacagtcttgagggccaagatgcatccatagttgagcatgagggagggcggggcactggggcagtcatgctggatggcagcaaggcagaccacaccaggcatcacagaagcgctgcagagctttcagtttctcttggaaagaagcccctgggacctatttgaggattcctcgacgttagtggacacagaatgttagcacagccctcacgaacaggaaactcagactgggggtgagtctggtcggtagctggctgaaaaaggtggatttcctatttccagtagtcctgacccacattcccacttttgctgttgttgttgttttccagttagatacttttcatctccttccaattgtgcagttctcgaggaatcctgcattgcctgtttctggactggctgcctgggagggagcctaaatcccttcctgtcttagagcatttgcatcagtggggttggagcctttctcagttttgataagtaggagctgtttaatgttgtatttgcttcacgtgttgatgctgaacgtgggcgcttgaaaccaagtttgctcttggatccatctcggaggagcccctgggtccgtccagggtttttttgcagtgtgtgcggctggtgctgtgtgtcacagcatgcaaagaacccacacggagatgatcaggctcctgaactgaacctcaagaacccagtgaacaagacctacatgaggctcctacaggatcccttctggccctgatcattccttcatcactgttaccagaaacggggaggtgagggtaggaggtggtcagatggtgccgatggctggtgcagctggtggcagaggctttgaaatccgacccctttcacaagaaaaaatgtgcttgatccctaccatttatgtaaccagtactataataaaaacattaaatatgcatcaacataaaattaaatacagaatccttatgcttataatacttaaatctgtgaaaccgcttttccaaattatatacatgccaaattgtaagaccaatacaaataaaattaccagattaacttgatgagatgttttggtacaactaaattgccagtagaattgtgaacgtatatggacagctgcagagctggctccttttattttaacatgcctgtgtatacaatggagtggatctgtattctcaacattggcctttattcaaaccagggcaaatcttcactgacacgctgtgatgtcacttgagtgtcaagtggcgtgagcacctctacctttgttccttattgttagctggtggcagtgaaggtaataacacttgcacaagcagccaaagacacaaacgcaaacacaggtcctgagattacctcgcagcttcttcttacaaatggccatttagatgatttagaatatgcttatattgatttttaaaagcttggtctgctggggctgccgtaacaaagtaccacagactgggtgggtggcttaaactgcatacagttatttctcacaggtctagaggcaagctgtctggcatctcttcttataaggacactaatccaatcctgagggcccacccttatgatcacacgtaaccatagttacctcctaaaggctttacctcctaataccgtcactttgaggggaagcgtacaacatatgaattactgggggacgcagtcactcagtccatcacaactgcttttttgaggtaaaattgacatactaaaaactacacatacggaagtgtacactgtgatcatttggggcatctgtttacacccaagaaaccattgctacaatctggacagtgagcatattcatcacccccaaaagcttccctgtgccctcatcatcgctccctacccctggcgcagtccccaggtaaccaccaatccaatctactccctgtcgctgcagataactttgcactttctagagttctattaatatggggatggatcatacagtactattcctctttgatctggcttctttcactcaggataattattttgaggtctgtccacactgttcagtgtatcagtggttctctacatcgtctgcagcattggatgtggtcagtctttttcattttagccattctaacagatgtgtagtggcatatcattatggttttaatttgaatttccctgatcatgagtagatatcattgtatatagtgatatatttttatcatatgaagcatttttatatgtctgcttgccgtctgtagattttgttggtgaagtatgtgttcaggccctttatttaaataaagttgggctgtttgttttgtcactcttgcattttgagatcgtcacatactctagatacaggctgttaatcagatttatgatttgcaagtatttactttcaatctagtttatcttttcaagcgtcactcagagaagtttttaattttgatgaagtccaattatcagtttggagtcatgtcttctatgtcttttctaggaaattttttcctttaatgtttacttctacacattttttttgagacagagtcttgctctgtcacccaggctggagtgcagtggcacgatctcggctcactgcaactctgcctcctgggttcaagcgattctcttgcctcagcctcctgagtagctgagattataggtgtgcgcccccatgcctggctgatttttgcatttttagtagagacagtgtgtcagcatgttgaccaggctggtcttcaactccttgacctcaagtgatccacctgcctcggcctcccaaagtgctgggattacaggcgtgagccgcaactcctggcctacttttacaagttttatagttgtaggttttacgtatcttaaaatgatccattttgttagttgttgtagatagtgcaaggtggatcgaagtgggtgtttttgcatgtagataattgattattccatcgtgtcctctgcctctgaatccagggcactggaaacagccatcctcttacttcctgtggcaggcagtttggcctgcgtctcaggcttggtgtctagagtcagactacttggattcaagtccagctctgcttctgacaagccgtggggtcttggaaagttagctgacctctttaccttcagtttccacatctgtaaagtgtgttaataatagaatgtgctggtttgggttgttatagaatccgattagagaatggatgtgatgtgcttagcacagtgcctggtgcagaggaagtgctcagtagagaacagcatcgacactgtcactgctgccaccaccctggcagtgtgagtcgactgccacagctgctttccaggtgccccaccagcacccctcggccccatcctctggcgacctgccttgtcttgcagtatcttgttctcaaacataggcatcctaggatcttcacctctgagtcttttttctatcctcttgttcccttttcttggcacactctttgcccaggcctttgttcactgctcccggggagagccctctggtgacccgagctgccgggctcctgtgcagtcttgctgtttcaggtcctgtttggtgcattctactttagtcttccttaaaagttccgtgaaatagaaagcaccacgcctggagtcacacagacctaggttcacaccatgctttcctcacttgtttaaccatttgatttaggcaagtcacctgaactcagcctgacccttcttctgtgacaataataataataaaatgatttcctcttttgttattgtgattattgtgaagattaaatgggattctggatacaaaagccccttacgcagtgtctggcatgcaatttgctattaatctaattctgaaagtaatgtggatcagggctttagccacaaaaatgcaaaaggaagaaaaagagccattttgagactgaagttagtaacagcttaagttgtgggtaagaaggtaaagtatttcttcagcttttaagcttgaggagatgattatttccttcaccttactccttagaaagaaggaaattagaagagaaaatttatccttgatgaaaatacatgtttgtgtgatcctgatgcgcaaatgattggaatgtggcaatttaggtggccagaacaccttcctcccagataatgcttaattgccacagtgatgagaaggtatattcacctgctgcttggccttaagcgtttcaagagcatgtttttcttcacttgcattcgatttgaaacaactaagtaatcactattcaatctctggcctttagaagatctctgtgagccccttttctgtcctgtcagtgccctttggtgcagactcagaggtgcgtggagtgagctcggcatctgtaatcacatagtgagaagaacagaggcctacctctgcctcccagcctctaactctgcagcttgaggtacagcttctcctaagtttcagtgccctgtgcagaaaatgggcatttattccttacatgagcaacagacatgtagtgcctctggccctctggacttgacattctaatggtacgaacagaagaggaggtgctggagatccaaggactttgtctgcaagcaagagcagtctgctggggaaagtggcaaaggccgggatggtggcagtgaggacacctgcccccaggcagcagaacgtgactgtcacatttcttctcatcttgaaccctcatggcacagtttttgttcagtggtttgaataggaaggcgacagaaaaaaatgagtagctccaactggcctgactcgtgtgctaaccactgggacacccagctgtgaccacttcgaagagaacggtggggcctgcaggcatcaagcccctataggagtagggctttgtgtgaggagcgttggcagaggctttgttccttcccataccaattctgtgaggtgtcagggtgattctccaacttcttaggaggaagaaatggagctcagagaggtggcgtaaccaggcctgtgtcacaggtggggaggtggcggtggggatgtgcgcgcctgggtctggctgactccaagccgtgagcaggtgaggcactctgtttggcagggcgttgtcctcggttgactcacctcacccttttatagttcatttgtttggctgtaaggcgggtgcggctccctccctgccgcgcctcctcttgccgcatgccatgtgttttggtgcataccaaagaggccttcggagctggtgttcacttactggttggtgtgcaaccactacatcagtccgttttttctgctcttgtagcctaattgaattgtcagttgctgaatgttttcaccagtgtttaagttgttgatttctgggactatatcaagaaacccatggtgatttgggaaaggtctgattcatacctgtagcattctaaggtttgggggttggtttgttgcttttatcaccagttcttggaaggcccttggctggtgcagccttgtcaacatgatgtctgttatgcctcacagcggcaacttaagcattcatcctgttgaaagtcacaactcggccaactggttatcttgcttaatgctgtctgttcaacagcagatttgacttgagccctggtttactcattgtgaaatcagcaataccactctggacaagttccccaaccaccctgaacttcaattccctcagccttgaattcgcgagaaccattgttaattgacaggcatcatctgctgacaggttcaccttccatttcgtaggcaagcgataaaaagcctgagctccgcggtttgccaagtaaaaagtatttgtgcatattgttactttgaatcctcatgagaactcattgaggatgaaagttgccttcattccatagacgaggactaagcagaacctggactgtggaccagcaatctatcctgggctcctgtggccacacgccccgcttcccccacggtcacctgaagctggacttaccactcgcctcgccatcatgggacaaaaactttctagggggtgccgtgctaccttgaatgattttatagacctttgttctgcaggatgtggtgtataagctgagatgtctgtgttgaaggtggggcagagttatttatatcagacatgtataatcaataacagtttcttttctttttaaatgacagttttattgagatgtaattaacatatcctttgatgcacctatttacagctcgttaactcattggtattgaggatactcacagagttgtgcagccgttaccatgattgattttagaacactatcacctaccatgctacaaaaactcctacccattggccaccactccccctttccacttcccccacccccagccctaggcaaccattgatctacttttggtttctatggatttacctattctggacatttcatataagtggaattctgtgtgtgttctgttgtgactggctgctttactcagcatgtaatgtaatcagggtctattcatgttgaagtatgtatcaatacttccttcctttttactgctaaatgatattccatcacatggatattgcacattttatttagtggtttatcgattgatggacccttacgttgctgccccttttgtctgtcacgaatgacgctactgtgtgtgctcttgtgtgcgtttttatatggaaatgttctcattgcccacggatgtctcctagaaatgaaattgttgggtcatacggtaacgccacgtttaatgttttctgttttttctttagtcagctttggtgagttacatgttttctccttgagaattatttctcaattttattatatctaaggttttaaagtttattggcaaaaaattattcataattttcttttacccttttacagtcttagtacctgtaatgaaatcaggttttcttattcctaatattattatttgtgtctttggttttttttctcctgtgatcattctcacagaaatttctgttttaattagtttgttattgtcttttttatttttatttttttgagatggagtctcaccatgtctcccaggccggagtacagtggtgcaatcttggctcacggcaacctctgcctcctgggttcaagcgattctcccgcctcagcctcccaattagctgggattacaggcgcccaccacactagctagttcttgtattttcagtagagacagggtttccccatgttggccaggctggtctcgaactcctgacctcaagtgatccgccacctcatcctctcaaagtgctgaggttacaggtgtgagccactgagcttggcctgttattgtctttttaatatttcggtgagcaggcttggttgacaggctcaccctgataatgggaaaggctgcaaagggggcacctgtgcgtgaggcctggctcctagccccaatcctgtggccagatcagggttgccgtaattggaaaccttgataagaattttacatttgaaggtggaggtggaggtagggtggggggctcctcctaaaggaaggggctgccgtaatgaacaaaacttagggagaagggcatcgggccagcctggtaatttgtggcctctcctgcctgcccctctgtcttagccacattggcttccttgatgtcttctgaccttcccagatgtcctctagccttagagcatcagcatttgctgtctgcgctccctgggattctcttttccttactcaaggcgaagccgttatattggcaaaaacaaaagggagggtgtgaacaccagggcaggggtcatggggaacacgctaggatctgtacgtcacagtgtgtgtgtgtgtgtgtgtgtgtgtgtgtgtgtgtgttttatgaaccatcttcccccactcagtgtaaggagggctcttcgttttgttcgcttctatttcccttccatctaaaacagtgcctggtacaacgtagttcccggatgaaagagtgaacctaatactcaaggaccctgtgatgcaaggcttatgattcgcactccacagataaggaaactgaggctcagggtgggtcagtaatgttcccacggccatgcaagtgccagtggacagaacgtggacaagaatccaggtctgttggactcaaaatcccgtgctgtcaattctcctggctcccttatactctctctctctctctctctcgctctctctctctctcatatatatatatatacacacatatttcttttttttttttttgagacggaattttgctcttgtggcccagactggagttcagtggtgtgatcttggctcactgcaacctctgcctcccaggttcaggtgattctccttcctcagcctcctgagtagctgggattacaggtgcccgccaccatgaccggctaatttttttttatttttatttttagtagagacagggtttccccatgttggccaggctgatcacaaactcctgacttcaggtgatccacctgcctaggcctcccaaagtgctgggattacaggcgtgagccaccttgcctggcccttaatactgtatttttaattatacaagatttcaaggggaataagaactttattctacttttcaacaaggacaaaacaaagccttatttaaattaaagcaagggagatattggcatatataacaaaggtctatttttcttcatactttgtcctggttagtttgtcattcttctgtcctttgctcccggcggctgagtaatacagcattgcttttcctgcagcctgccctggctacagaaccacattatctcttgttaaatgctatttggtggcgttgatggagattagtacctggtggtttatgaaaatggtgggaatccctcactcgcatctgaagtgtgagaatatttatagcagaagaaatgcgcgtgtagttcatttcctctgttccctatcatgctaatatttctttaatgataccaccctgtcttgctacaacacgctacttatttgacttgccaggtgagttgcatggaaaccctgcaatttaattaccaactcatttctctctccatttccttacgcagggtgtgaaaacctttcttttcccagccagggccttttttggttttttgttttgttttgttttttgagatggagtcttactgtgttgtccaggctggagtgcagtggtgcaatctcagctcactgcaacctctgcctcctgggttcaagcgattctcctgcctcagcctcccgagtagctgggattagaggcgcccgccaccatgcctggataattttttttttttttaaatttttagcagagacagggtttcaccgtgttagccaggatggtctcgatctcctgacctcgtgatccacccgcctcggcctcccaaagtgctgggatttcaggcgtgagccactgctcttggccagggccttttttttttttttagaagaaaattctgcggatactctcatatctcttcacctgcctcttctttccccttgtgctgccacctaacatctttattatctggcctttgagacactggcataccttgctaaatgcttgcttttcctgcttcttttcctctataagcattcatggtaaatagcactgctagaggaagagcaaagaagcaaaactccaagcatgtcactcccgactccagaggacaagggagagagggtcagtgtagattctcaagcgcctgctatataccagccattgacgagggcttctaacacacctggccatgcctcgttcttacggaatccattgagtgcatgcaatttttagccccattgaacagatgatgaaagtgagactcagaaagatgaagtaattccacagtgaggaatcagtgaaattagaataaagatcaggtttgcctggcataaagcctgctagggcctatttgaccacaccaggagggtctttgagcctcgatttctttgagatcttccttaaaaggggtgggggttggttcttgagagagatcagttggaaaattccgcatatccacctccccccttggggatttccacacacatttgtatcttaaggattctgagaagtcttccatttcagaaaatgagttgatttttagaaatgtttttaattgtaaagatttttaaacatacagcaaagttaaatctaggtggtgggtacagcagtgattgtaccactactattttgctataattcctttactgagtgtctattactatatccacctttttatccatctgttagtccatcatatttcgttcatgcatttgaaaataaattgcaaacctcagtatatttcccctaacaaccaagggagatacatccttcactagagtcgaatgtgtactctgtatcactcagtcatttgacatctattcagacttgtctcatgacccacatgagcttcatcctggtgagcacaccttatgcactggaagaggacgtgggcctgaagttgtttgctgtagtgctgtctgcacaccagctctggagttgcacgtgttgttcagttcatttatgtctttactgactgttttttgttggttttttttttttttttttttttttgctaattgtgctgtcaattgtggagagcaggatcttaaaacctccaactatgattgtggaattgtctgactccctctaattgtgtcagtttttgctttgtgtattttgaagttctttgattgtatcctcatatgttggtgagtattatgtcctgctaatggattcacttcacttcattatggacaatgatgagtctttgatactctttgtcttgaagtctatttcatatgatgttgatataaccactccagtatggtaatacaagcatactatttgcaaaggatgccttttgcaatccgttcactccaaacctgcataagttttcatatttaaagtactttacttataaacaacgtatagttgaattttgcctttttatttttttgttttactatttatttctttattattattatttttgagatggagtctcactctgttgcataggctggagcacaatggcatgatcttggctcaatgaaacctccgcttcctgagtgcaagtgattctcttgcctcagcctcctgtgtagctggctttacaggtgcatgccaccacacccagctaattttttgtatttttagtagagacagggtttcgccatgttggccacgctgatctcaaactcctgatctcaggtgatctgcccaccttggcctcccaaagtgctgggattacaggcatgagccaccatggctggcgtgcttttttaatctattgtaacaatctctgtcttttaagagtatttaatttattaatatttcaggtatttattggtatttggtttaagtctgctatgttaatacttgtttcctgaatgaccccactgctttttattcatttgtttcccttttcctgccatcttttgtattatttaattctatataacatatatgtatgtatttatatatgaattacatattcacatatgaatttatctgtcagctttttacctatacctctttatgtttttagtggttgctgttgggattacaatacacaaccttaattttcatggtctatttaaagttattattgtgtcatttcacataaaatatagaatatttgcaaccacatcggttcctgtgtctaagccctgtcattgaagctatagtggtcaaatgtgtcagatctatgtacattataaatcacacaaggataatgatatgttttaagaagtcatctgtatttaaaataaataagaaaacaatattttatatttgcccaagtatttactatttctgatggtcttcattattacctaaatagccaagtttcatttccatctggtactcgtttcctgtaactccaagaattttcttctagcatttcttgtaaagggagacttctgttgataatttcttttagttttctttaatctgaaatgtttttattttgctttcatttctgagggatattttcattggatatagaattctggttgaaagttcctttcccttattctgcttgggttttgccaaagttcttaagattatacatttatgtttttcaccaaattaggggaaatactggttatgacttctttgaacacatgtgtttttcggcctcattcttgtgcctccaaggacaggtatgttagaatgtttgatattgttccacaggtccctgaagctctgttttgttttgtttttttcctagctgctcatgtttcatttatctgtcttcttaagattggatgacttactttgacctgtcttctatctactgattctttcctccatcactttcattcttctgtgaagcctatccaatgcattgtttattaaagatactctatttctcagttttagcttttccactttttaaagtaatttttatctgtctgctgagttttcctattctttcctgaattgccacagtattttcaataatgttctggagtatagttttaataacttaaaaaatctttgtctgctaattgcaacgtctgtattctctcaaattgatgtcaatttattgagtgtcttttctcttaaggatgggtcagtttcttggttcttcttaggtcagttaactttcaattatatcctgaacattgtcatcttatgtgtggagtctctggattttgttatagtcctttggagagagttcatttaaaaaattattatttagcagttgtttatctttgttggactgtaattgaaaactccacctcggctgggcacagtggttcatgcctgtaatcccagcactttgggaggccaagacaggtgaatcacctgaggtcaggagttcgagaccagcctggccaacatggcaaagacccagctctactaaaaacacaaaaattagctgggcgtggtggtatgcacctgtagtcccaactacttgggaggctgagacaggagaatcgcttgaacccaggtggcggaagttacagtgagctgacatcgtaccactgcactccagtctggatggcagaatgagactctgtctcaatttaaaaaagaaaaacaaaattctacctcttggacatctcgaatctcagttttgttcttttctccttagctggacttcactgactctgctccatgcacaccaggttcaggagtaagccaaagctctgggcagattctatgtacaacattctggactcctgctctcggccctctcctttcctgaactctccctccctttcccttgctgtggttgccccaaactctgtcttcagactttttggccaaggaagatggcagagtctctccccgagctttcgtttccacgtggtgctgactcggcctgtcctcagacaagaagtcataaaggaagggtacctggcaccgtggttttccttcttccgggtgtctgttctctgttctctcgactatgtctgtttttcttttcctgccagtgccttcaggttgcttattaaaaaaaaatgtgtccagaatttatagtaattatttgcaggaggctttggagcttgctcagatgtactggaacttttctacttttccaactttcacgcttccccagtttatctgactgtggaactcttgttacacctattaagcaccaataagaagttctggggatgacggtttttctcaggtgtcttgagaatggtttttctcaaattctgtctctagcatcttgcctccattagaagctcttaagattctcatgattttttttaaaaataaaatgaccaatgaccaaatttctgatccaaataagaacacttgttgggtcaatgcccagggattcaataaataactattgggtgtctattccttaaccgaccctaggaaggtaaaatgccagaatgagggagaaccctcgtgctcagcaggcggagatgtcatcacccttgctgagaactagagaagggttgctacgtggccgccccctgttattaccatcccgagtcaccgtccacaaagtgttctcatatccgtcagcccagttcagtgttcacaaatcagtaaggcgagtcttttaatttgtaaaacacagaaaaggacactaaggcttgagaaggtaggtgacttagtggagggagctgggttccatcccagatgggtttgcttctggagcctgtgttcttcatacaccctcatgtgtctctgtccttcctgcacaccgatctgcaggaccctccccatggggctccttcagatatgctctggcactgtctcccatttgccttaggaagaagtttgcagaacagtgtggcaaacccatgcccggagcccatgtgggccagagactgagcccaggggtgcagagtggaatatgccctctgcccagcctgcctcctgctcggccagcctgccctgagaccttcactgaaatgcttgcatttgtcgtgtttgggagcactggcttgccacagttacagtcacgctgtctgggcaaaccagtctgttgtagatacctgtgactagccttggaaaattcctttccttgtgctgttgaattggatggtgatgttaccacttggcacagtctctctctgcctttgttaaggctaaacaggatgagggcactgactgccctcctgccagcccctggcctgccctcctgccatactgggccctctgtgtcccattttcactcctactcttctagtcttgcaactgagagcacagcctcttcctacagtaagagggccccaccctgaatcctcacttctgggcattggggcagcatctcagccccacttcctggctaggggctgccggccctccagggaagtggacaaactacttctgctctgacggcctctgttgtttccctgtgaggcttctgcagccccagggtcctggtcatggtgcatgtggactgcacccttctcacctggcagcctcctgtgaaggctgagggccggggaggatgcccacccgctctgaagactagccaatcgtgcctgcccaaggctctgctgccctgttcttcagtgtctgcagctgaggcccagacaggcatttccatttgcccatgccaaggggttctgggcctgccacagaaccaatcatgtgggtccaccccaggtatgtcccagtgaggacagtgatgggagatgctaccccaaccccccttcataggctgctgtgggtgcccggcttatgcactttactatcgcagatgcctggggacacccacagccttgtccccttccccagctccccttcaccctggcccagcgccctgccggaactcagcctccctctgtgtggaagagtgaattcatccctccctagggttccagccacctctgctgtggttggctcctaatttccaaagctctgtacggccatgaggtggggaaggaggaagagggacgttggccaaggtgcctgtggctcctctctggctgatttggtcatagcttcttggaggaagttctgtgggtgacagtggagctgccattggcctagctggagcgtggcccctgccctgtgtccctgccggcccctctgcacctttgagcccaggcctgtgactctgctgagtctggggctgccgctctccacgtcctgcctctgcaaggagggagcagatatactctagctatgtgtctgattcatttgcttttcaatttttaaaatcccccccatttcattatgtttcatttcattccttctggcactatgaggtttttcacagtatgaaattgaaaatgaagatgatgacgatgataatatttgttggaatagagcatagcaaaaactccccaattaacacaaacttcagtatctgatgtcttccctgtttctctgtctagtaatttgtgtcagtgtctagagagatggtggagaagatgtattaagaaaaacttgactgccagaactgttcagaagtaagagagacttgggggcagtaacccacctgcgctccttgtgtctgagggtggaggccgtggcggatcctgtaagacaggggtgaggggaactgatgatgatgtgttccaaccaaacgacgggaatcccagacgtgtggccagcaggcccagtccagctcgcaggtatatttgggctgcctagggtgaaaaaagaaacaacaaattgagctgtcattgtaaaaatataggaatttcagattcaatctcgtttctggttctctcgagagatcaggagctggagctgtgcagagccgcatgctgtggcctggctgccagaggggcaggcctttcccgcagatgagacctgcacctgcctctgcaccagcctccctctcttcctgggccctggaggcatttttgttgccattctgaacttagagatttctttccaattctaggacttaggaactgaaactgttttgggcaatactgaataagccatgatcagatgtgaccaggctgttgtggagccacagaaggtgggagcacttgctgaaaaggaccagagggaggcacagagcccccagcgacggggtggcctgggacacggggctgccaggatgcacatcagccccacgacaggggtgcttcccacacctgcaggcctgcagcttcaaacaggagcctttgtggacctggacgggttgggagcagatcctgccctgggaatggggactgggagggtgggctgagggtctcggttggggaggctctgtccttttagccccatgcggcgtgctggaccacctccttctggagtttcctcactcgccaggggctgccctctctggctcgccccgcttcccggccccctctcaggtgctggcacctgcccgccacgcctcttgctgtgtgttgtccactcacctcagggccctggctcctatgctccttgacctctccagaccccggtgtccagcagaggtgttatctcttccaggaccttccttggactctgggctttcacccattctctggctcccatggcaaatgtcccccaaatatagcccttagcgaagtatggtggagttgcctgctcacttgtctggccagttctttgagtacaagtcatgtttgaatggcccttgtgtcctggtgcctgtcgcctggagaacagtgggcattccctcctgtctgtcaagtggcagggaggaatggaggagctgaatctgaggacatggcactttattcatttgtcttatttctctcctttggccttaaaaaattaatcggggccgggcgcggtggctcacgcctgtaatcccagcactttgggaggccgaggcgggtggatcatgaggtcaggagatcgagaccatcctggctagcaaggtgaaaccccgtctctactaaaaatacaaaaaattagccgggcgcagtggcgggcgcctgtagtcccagctactcgggaggctgaggcaggagaatggcgtgaacccgggaagcggagcttgcagtgagccgagattgcgccactgcagtccacagtccggcctgggcgacagagcgagactccgtctcaaaaaaaaaaaaattaatcgggtatagctctgtgtgtctcaaggaattgcacatttaacatagactgtttctagctgggcacagtggctcatgcctgtaatcccagcactttgggaggccgaggcgggaggatcacgaggtcaggagatcgagaccatcctggctaacacggtgaaaactcatctctactaaaaaatacaaaaaattagctgggcatggtggtgggcgcctgtagtcccagctactcgggaggctgaggcaggagaatggcgtgaacccgggaggcggagcttgcagtgagctgagatcgcgccactgcactccagccctggtgacagagtgagactccgtctcaaaaaaaaaataaagatagactgtttcaaaggacccactgactgtgtggttttctatctgatttcggcatagggacggctgagttgacacacaggtggggcagctttgtcaggttcccaaagacctgccaggaagccatgggtggagagaggctgctgctttattgtttcaatgcaggaatgtatttcttatccctaattgtcaatttcatatcattacagacattctcctattcatatttcaatggttgtggcattttcagtattaagccagacacccaaaagatttttctggctgagttgatctcccacaaggagaactctgttttcaaatccccgaagactcagggccactgaggaggtgtctctgtgcatctggtaatgcatttcacctgtcggcgtcctgagccacagcgggcaccagagcgtgtgtggagccctggtggcagctgctcagcgatggctttgtcaagcgctggccagagaaggcttcattacccatgtttaacgcgattagaaaccgtggcggcagcggtaataatacgtgacatttgcgtccgcatttccgcttcacactgcgccttccaagtgttttcattcactgccctgccgtctgccaggagcacttccagaaccgcctcattctaattctcttcccttcctctccttgctgcctccagtgtggacgacgctggtctctctgttggcttacattgatcctccctctctcctggccccactggccccagcaccggccctgccacctcggccctccagcctccgcctgctcctgaagccgctgcccccagcgctgtccccgcagcgccttgggctcctaggaaggggatttcttttcttctttgagatgtcagtccaacccacaaaaataacatgtgttcattttagaaaagaaggaaaagtatggagaaaataatgtttggatgacacggaatcccagcatccagagagaatacctccctctctgggcccgcacccatattgctatctgtgtctactttacttcattcacaccaaattgggatcgttttgtgttcactcttctgtgcctcttcccataatataaaaagagcttttactgttactcttcaagaacacaatgcaatgtcctgtagacacagggggctaaagcagccccctcctgggatgcagcaaggtatggtctgactttgctcccctccagcctgaagtccagccccactctctccatgctttataccacactgcagtgcccactccccactctctccatgctttataccacactgcagtgcccactccccactctctccatgctttataccacactgcagtgcccactccccactctctccatgctttataccacactgcagtgcccactcgcccactctctccatgctttataccacactgcagtgcccactcgcccactctctccatgctttataccacactgcagtgcccactccccactctctccatgctttataccacactgcagtgcccactcgcccactctctccatgctttataccacactgcagtgcccactccccactctctccatgctttataccacactgcagtgcccactcccctattctctccctgctttataccacactgcagtccccactccccactctccccatgctttataccacactgtggtgcccgctcccccattctctccctgctttatcaccacactcagtgcccactcgtcctgtgtgtgccacacacttacctttcggctctcagtcctcgtcctggggtgccctgcccttgctcaggggcctagtggctctgctctacctttagaaggctctaagccgagtgacttccccatgctcccactggatgggctcccagctctggtacagcgtctgccacagctccgcatataggtgtcgacctccccactcaccatttgtgcctgattgcaggggctgcgcttcctttgtccttgtgttcatagcatgtggccttgtgctcctggcagagctggcactcagcatgcatgttatgaatgaagaagcgcactgcctgcctcggaaatcactttaggaggtgtttgggattttccatctctaaatcctccttcagcaggactaagagctgtgatggtgcgtgctagacggtttgttggcctgtggcgctcctgggctctggtaggcgctatctcaaaagggccggagttagggatgccgggaatccaggtgaggagttttagagtcttcagaggccaacaggcgtggagcaggtgaggtggaggtcagcgtgagcatgtgacgccactccaggcctgtgctcgcaccaggttccccaagccctgggcaggagtggccctccccacatggtgcaggcttccccattgtgggactggagcaggaaaggtcacatgccatcctgacactgcatttccagctccatccctttgggtgactagtgtggcatctgtgtgcctcagtttccccatcggtgaatgaggaagggttcttgtatggatgaaatgaggtgattgttctgaagttgtgttaaattgtaaaacactaaataatggtaggctataatagcaaaataattcttttgttactgtcatcaagtgacttgcccgagttcatacggcaaataagttgagcttagaacaaatgtaaaaaaaaaaaaaaaaaagcaaagactgaagaagcatattttaactaagagatgcttttcacaaaaatgccatatcatatcatatccctgtttcccagcttggagctctgggaaggaagctagataccatcctcttctctcttttttataggcaaggagctagaaagggaggggaggactcaaacacactggtcatggacttgcctgggactgtctgcacacgcagtccattctctctcattgaattcctgtaagaacgtcatgggatagacgttttttcttattttatagatgaggaaattgagacccagagaggtgaggaaatagtcaaaggtctcagagctggcaggtcaccctgtaaccctgagaagcagacaggatacgcgagagctcccaaacacaaaagcacgtgtaattttttagaaatctttcccctctccttccctggcagccactacattgaagaacccccgagtctaccattttggggttctaggacagaaggtcctgcacgcagacatcagtaggctttcattcaccatgcaccttctctcgcacggtgatgtcttgtctggtctttcggggctcccatgagatcacgtaccgggaggggctgaaatcctgagcagtgaagtgacaggtctcctagggaatacctgtggtcctctgtcttctccgtgtgatgtaccagagactctgtgaacattgtcttgcctaattctcacaacaagcctgggaagcaggtgtcctggcaagacctcggaaagctaacctggtttgacccagcccacaagtaggacttggcagtgctggggctcctatctcaagtctgagagtctgagtggctgcaggtcagtcacttcgtcctttggccagcgctgtcctgcccagagccatgtcccctatctgagcgaacactgaccgaggaacccttgcgattgggccccatgtgtctacttgcaagatcagaagggcgcgccttccccagtctgcagggatggggcctcctgtggccacatgtgcagcctggagattcctcggcggatggaaggcagtttcctgaaggtggaagaggattgaaagagaattgctgagcggtttagaagtgatgactcagacaggggctgatcattaagtaaaaaactctctctacactatgagtaccactgaaatagcaccaggaaagccagtcagcagtgcatggcctacaagagattggaagaatgaagtttcaagagcccaggttttccattgtctgtgcaaattgtcattgatggtggtagaatatttgtcattattgtcactgctaactgtaatgacaggagacacccctgccaggtagcctgtgcacgctcctgctgtgcgtacagctactctcatcttctctctctctctctctctctctctgactggacttgaagtcagggattcagccacatttgcctaatctctctgtctctctctgattggacttgaagtcagggattcaaccacatttgcctaaaacagtggctgttagtgtcggcacacaaagcattttgttgaatgaatgaaggcaatcacatagcttaacctgttttacaaaaaatttgttttcaaaaatgaattctgctgagtataacttctcacagaggtttctataacgtagtagcagctaaggatggagaaatatggacaggatggtattacgatcatgtaggtttataaataatagatgacacctactagcaaccacatagcatagtagatgcttttgctatactatttctcatctttaccttaatccttcgtgacattattgttgctgctttatagataaagaaatttgatgggttatgtaatttaccggagctcacacggctacgtaaggtggatctggaatccatagcggtccagaactgatcatggactttggttaatctcaaatatgtatgaattgattcccaaaactttgtgtgggaagagcagaaaccaagacagggattggccaagggcagggatgacaaaaatgctgagcaagtgtaagtagaagagtcgagtttgggttgcagccagtgtggtcctcagggaggcaagaccgggccacgcggtgcagagatctgggcaaaagcgtggagaagcggccgcggtgggcgggaggcgtctgatcgagggctcaagacgctggccctgtggtttccgtggcctgtgtctgcccaaatgggtcctattctgcccccacatctgaaggttataactcttgctctgttttgttcaaggctgtgcgctgagtggatcagtgggaggcaggacttccttcctgcaggagagatgatatctcccttggcaacttggttctatcagcactgcgtataatgtagtttccatactcattgattcattcacagttcaacacgtattcatgcgctaattaggctctattccttaaatgttagaagagatcttagttgtggagttttctgctttagatggagcaggtaggcacagaatccaggtacgattcagagcactgttccctagggcatgtcctcaaggcagctggagaaacagcttggtcacaaagaatcatgcaaaaaacaaacactgaggaagtccatgggtagacagcggaggggctggggtctcgagaagagagatgttgctcccggcggggaatgaggagatgcttctggaagtagtggcttttttgcgccatgccttgaagagaaagcatttgtgcaccggagcagaggtgcaggggcgttccgggaagaagagctgtatgatttttttttttttttttaccagcttatgctgtggtaacagactattcctaaatgtcagtgactataagcatgagttgacatcttcttacattacatgtcaacgagaggttggctggggccttgggaccctgccctgcatgacagtgctttttttttttgaagacacagtctcattctgttgcccaggctgcagtgcagaggtaccatctcggctcactgcaacctccacctctggggttcaggcaattctcgtgcctcagcctcccacgtagctgggactacaggcatgtgccaacacacctggctaattttttttgtaaattagtagagacgggtttcaccatgttgtccaggctggtctcgaactcctgagctcaggcaatccacctgcctcggccttccaaagtgctgggattacaggcgtgagccaccgcgcccagtgtctacatgacatttctaccccaggagtcaggtcagccaacatcttgtacttatgacgggagaaagaaagggagccataccacgtggtggtccagcgtgcttctgatccagtgtggcatatgtcactctgctcaggtcccgtggccaaggacctgtggccaagcctgacatccacgaggtggggacattctcccatggtggctaccctgagcgaggccccgtggtgcgggactccctcggctgcacggcgaagtggctctgtgggctgcctgcggggcctgcctggctggtttctccttgttcctccctgtaaggtcaatgcttctgagcaccaaagccctgcctttgggccagcaccccgccctcagccgcacatcaacacctctgcggcctcttctatctccttttgaattgtattattgctcttaggtgctcttgtaatgctggacaaattctctgtgaataagggaaaaaattgaagcataaatcatccggagagtagcattttctaatttggatgtgtggcaaaacaactctgggtgatttttattctttattttcaacacagaatttctctgacaggccatcgtcagctgctatagagcaataaatcagagtcatcttttccgggtgaaatgggcttaatttctcatccttttgttcgtgtttcccttcctcttctaccgcatggcacttgtaatcctaatgatgctgtgatgagatatgatggtcagagcctcagacttatcaggatgggctgacaaatcgtggagatccgcactggtcccacacccgcctctgctcaggcgggcaggatgtagatctgcagactggaccagctcaagttgatagccccgtagcatgcagagaaaggagcactttccagaccgcggggcccagaggctcaggtccaaagctttgtgtgacctctgggcttggctttttgtacaatgagagctttggactaggtggtcttcaaggtcaactgtaaaatccttgacaccacagacagggttccagtgggcacctgccttaaggtgcgtgccagcctctgtggaagagtgttcatccttctttctagggctgtggttgtgggtgattgcactaggaaagacttgcagaaactgtcattgtggatatttgccacgtcattaacctcagtctcctcctctgtgagatggggatgtcaggatccagctcctatggttgcggtgaggattacatgtatgctcggctctactgcagctggtgttcagtgagtggcagttgtctatggttaatattctcatttttcagattagaaaactgagcctcatgaggtcgaagtgtttcccgaggatctcacagcttgcggttatagaggtggggttagaatcatctagaagctcttttcctcacccctttggggcagtttgggaggtgggaggacaagagccagggcctcggggttgcttcctggacagacagggaacaggctccatgacctgagggctgattccagcagggtgggcaccctgcatgtgcctttttccatacctatgaaagggggcaccaccgagtgcagagtcaatgagctaatgcaggtgtccagcgtacactgagcactcaacagtgttgctgtcgtcgtgatttcatcctcataacccttgggtggccccgttttcgcctccttccctgttttgagcgtctcctcagagggtctcatctatgagacagcggtggaatgaggctgggtttctaagggagctccagctctggaaggccggttactaggattggttgaaaacgaaatctcattgcaaaataagttccctcctccatggggctaaacacgggggatgctccttattgtatttgacgggtctagaaggatcaagatggcctttgaatattaatctgtcactggtaccattttgtctgtttgatgtctaggatggaaaaaagaggggtgtgactatctcctgtctgatgcgagcattgctgcttggaaagcagaacagaagtccctttccaaggcttggctctagtcatcgacccccttgttttccctgtgatcctgagccacccacctgccctaccgacaccacgggagaagttgactggcgagaaccatgttgtgtgagcgcgctggccttgccactgctcaccttggctgtatcttgttcacgttacacatcaactcccggctggcgcagccccactgccccacactataagccttcccatctcaggagttgggatggaggggtaaacatgcattaagatagtgcgtagaaggcttaagggtctcagctcttcctgagtgtcacccccttggctgtcacctcttaggcatctgggaggtcccagaaataagagaagtgaagttatgcttgttcagcccctagcatatgccattcacgatgctcaatgttttctttaaattacctgttcataacagagaagtgtagagaatcggcagaatccacgcacagtgccaaacacgtatattgatggccttctgtgtgtcaggtgctgctcctgaggactgcacctacaaggtggtgcttgctccattttacaggacatggaagggtctgaggcagagaggggctgggctggagatgaggatggaaaggtggggagggcagaccccagaggcccatcccagcttagcctgctctgctgggccttccttgaacacctggccagcgctgcccaggcttgctgggtgaccagccaagggacctgagtccactccccacacacctatgtgtcgggtgcatggcaccatggttcctgaagcagcagggcatatgcagaaacatggtttcagaagaggacagtattcttctggaagaccatggaagcctgtagctcaggaagaagcagcaggcagcacggtaactctgtgtggagagaaaaccaaagccaagaactgaggctgcccgaagcacaggacagctcagcttttttttttttctcatgatccgcccacctcggccttccaaagtgctgggattacaggcgtgagccaccacgctcggccccctccctttttttttattgtaagcctgggaccactgctgtgtttgagaacggcattgcactaaagttatttcaaggcaccttgtcttaactcaaatgtatcagacgttatctgttatcctggtgaccccaagctttcagtagattcatgtattgatcatccactctgtgctgtgctttgtaagactttagagacatcgttgtttaaaatgtgacagtcatggttcctacctgtgtgactttgtcagggaaagtgacagaaaagtatataaaacctaaaatgtagaagcttgttaattaattaattaatacatttttaagagagtggcttctttattttaaacaaatagaactaaaaataattcccgatttcgtgaagtatttgctagtcatagattttccacaagatgggattgccattggcgtgcacagcaccagcttgggcaccctcccgcgcccacgcacacgtctcccgtaagcaacatcgaggggcgtgatgcttgcaaggcgttgtcttagggaccgaggagaatcaacagactgtgatgcaagggactgtggagaatcaacgggctgtgatgcattcttcctctccaaacacctgtggtttcctagagataaaaatgcacccacaaaagggtgagacaagaccctgtgagcgccatacacagactgtacggtgccttgggattcccaggaaggaactctcaggagtggagagagggcaagacactgtggccagcacacaagcatggagatggcgtggagaatgcgtcacctccagggctgggacagacctcccagccacgcactcacccagtaccgacagcagctctgaggtcggtcgatgctgtgggcttttccattgtacacacaaaggccttgaggtcaaggaacttcagtctcttgccaggcctaagatttgaacccaggtgtttcttttgttattttctttttttttttgagatggagtctcactttgtcacccaggctggagtgcagtggcgccatcttggctcactgcaacctctgcctcctgggttcaagcgattctcctgcctcagcctcctgagtagctgggattacaggcacccaccaccacacccagctaatttttgtctttttagtagagacggcattttgccatgttggccaggctagtctcgaactcctgacctcaggtgattcacctgcctcagcttcccaaagtgctgggattataggcatgagccactgtacccaacccaaaccgaggtgtttctgactttagaagacacacttctccagtggtttagagccagacagttttggtggggagatatttcacagggcttgtcttttggtacaactttatagaaggattattgtggaagagtaaaccctacatatttaaagtgtataatttgatcagctttgatatgtgtctatacgcaaggaattttcagcacattcagtataacaaatgttgctatcacccccaaaagttctttgtgcccttttgcagtctgtcccacagcaacccctggcgtgcttctgccgtggattagctcttgtgttccaggattttatataaatgggatcacatagtgaggacttgcatttgtctgacatcactcactcagcacaatggtttggagattcatccacgtggttggcctgcaacaatagtttgttcctttttgtagttgagtatttcattcttaaagtattccattatttatgtatgcattcgcctgttgatgggcatttgggttgtttctacttttttggctattgctattaaagctgccataaccattcctcaacagacctctgcatagacgtattttcattgctcttggtgaatatctgggagtaggattttggcccatatgataggtctgtggataactaagaaactaccagaccaggtcaggtgcagtggctcacacctgtaatgccagtactttggaaggctgaggcaggcaggtcacttgagcccaggagtttgagaccaacctggacaacataatgagaactcatctctactaaaaataaaaaacattagctgggtgtggtggtgcacacttgtagtcccagctactcaggaggttaaagtggaaggattgcttgagcctgggaggtctaggctgcagtgagctatggctgtgccaccacattccagcttgagtaacagagtgagactgtctaaaaaaaaaaagaaagaaaagaaaaaatagcagattcccttgcatgctcccatcagcagtgtgtgagagttctcgttcttccaccccagtcactgccaatgcttgatgtggtcagtctgtttcattgtagctgttcaagtatgggtgtttcccattgtgatagtttgacatttacatttcccccatgactgtggatgctgagcatcttcccaagtatttatggattatttgaaactttctttgatgaaatgtctatttaaatattttgcctatttttcattaggttgtttgagttcatattattgggttttgagatttctttatatagtcttggatacaaatcttttgtctaatcaatgtgttgtgatttttttttcccagtcttgatttgcttttgaatatcaaaagttttacatttgatgcagtttagtttctcaatattttcttttgtgacttgtctatcttcaagttaacttaccctctccccagttacctccattctactgttctccattcaggaggtgtttttgtttgtttgtttttttctgaggcagagtctcaccctgtcacccaggctggagtgcagtggcgcaatctcagctcactgcaacctccgcctcccaggttcaagctattcaggagtttttttttttattttattttaattcattgtatttttaagttgtaaaatgtccacttgcctctcttttatattttctatttctttgttgtaaattcctatttttaaaacttcattttgaatgtgttttcttttgtcacgggagtctggttatagcggctgctttaaagactgtcttgtggctccagcatttgggtgatcttggggtacccattcgttcttctgaatcgatctcgttcctgttgtcagtttcccattgtgtcttgggcattgtgggtgttattttttgcagactgtgggttctcttgggagcctctggagaatagtgatgatttgtcttgtcaggtcctcagtccagttaggttcagaccttaagttctgcctggccctattgggatgggaggtcacatctcagctcctcaagctcacctccccaggcctctgctgcattgttctgggtctctccagtgtgacttggttaatttttaacaaccagccttggatcatagcatttgctgatttttgtagtgcaaatacttgccttctgggcaatttcaggctatccacgtgacgtcactggatgaagagtggagaagagatgctaacagttggctcctgggagcgggaaccagctagctgcagcacaccattgggtctgtcccacccgtgtgcctcttggggagtcaggctgagacacgtgtgtggctcaaatctcatttcacggctttcccatgctgctgaggtctatcctgtacataactcagaggtaaatctgaaacgtgtgtgtgtgtgtgcgtgtgcgtgtgcgtgtgctgggtagtcaaaccccagttctgttttctgaggctttctttttttttttttttttaagatggagtctcattctgttgcccaggctcaagtgcagtgacgtgatctcagctcactgcaacctctgcctcccaggttcaagcaatcctcctgcctcagcctcctgagtagctgggattacaggcgtgcactaccacacccagctagtttttgtattgttagtagagatggggtttcactatgttacccaggctggtctcgaactcctggcctcaagcaatctgcccgcctcggcctcccaaagtgctgggattacaggcgtgagccaccgtgcccggcctttacagctttgtactgttcggttgggtctgttttgctcagggatcaatccgagatttctgcaggtttctatgcagaatgaaagggtccacttctctagctctctcgcctctaagattcccccacctccatatgcaactctgcagcctacaaagactccaccccttttcctgggcagaaaggcgatatttctgttagagtttcggcctccagtgctgttgcctgatgctctgtaacggggcatttttttccacactgtggaggaaaggtcgagggaaaagtgggaggcgccgccaccccgtgggcgagctcattccatgtgtcgactcctccacattctgctgcttttgttttactcccggattcctcagggagctgtttttgtgtgcttttcgggagctttcccctgtaggcagtgggaggcgtgagttgtagtggggtggcccctcgtgctggagaacacgaagctggtggccgctgcaggccgtctgctctggctctaccctctggggccacactgaacaccgctgacccccctgctcatgaaagtcattcaggtgatctaaggccgtttccagtaactcattcagcaaacatgtaatgagcccttgagttctaggcctgtaaaagatgagtaagatgtaattccctcactctgtagaattcacggtccaggagcgaaggaggtggacgaaataggtatccaaagaaaccagtgccatcaagcgtggctgatgatgggttaaagtgtgagcacagactgatgggtatagcgagggcttggttcctgggggtgggatggggagaagtccaggtggcttacaaagcagactgtattggagcttatccctgaagaaccagtcgattcctaggctaagagttgaaggcagggcttcctggtggctggaataggattgtgccagggcccggcagcatgatggtgcgttgacggttcccaggcaggatgcagtcccgtggtacacgtatgcaggcaagaaccagaggtccatgggcccagggagttggggggctttgaatgcctttcctaaggaggttctggcattttctgtgacctctgctgtcccttcagctccatgtggccgggtcaggtgcagggctcctgtcgtccatgggaagcagtgttgccaggtaccactgctggccatcaggtgcatgctctgtgcccagcgcttggcctgcggcttttcaaacctcaccgttacactctcaggttggcattattgtccttcaccttcacagcaagaaaacacttcaagaggcttgactgatttatccaggatgacactgatactgaggcagagcttggatgaaagtctgggtttctgtgactccacaccctggagttcttctctgtcaccctgcactgagctctggggcctgggacaagaaggcctgtggggtcctggccatgccccctccccgtgctcggcatggaccttgttgattgtttgcaaggcacatttgagtatgtccttttcctgtttgttttcccccctttaatctagggaaaatgagatttcacttagaattgatgaaatatgtaattagatataatagcatttttaaactaatagctactgattcaatatgattgaggcattttgttaacaaaatgggggcatttcactgccttaaaaccagtcagctctctactgagtcgttctctccaggaggcttttgggtgcctcttagttccaccagcctgttcttcaatacctgctatgtctgaggcattgagtcaggtgctagaaaggtgaacacacagaccttctgtctccgctcttctgaggactctgcacatgtgcagtgctggcctcctcagacgtgcttcgtcagggaagccactagaagcacagggagagaaggaggccagcagatggagaattttgccaggtggaggtggggctgagatgaggttagccaggtggaggtggggctgaaacttgggaatgacaggagcagagtgttgagtgaaacgtgagttcggggtggggacaccaatgcgagcaatgccggccgcagaggcccgtgcagctcccatgtgttcagatggggcgccggaagaaacccacggcatggcattttacatgtcacctgagcccccatggcatgttgtcacagggtcacactgaggcaggcatcctgtagaaagaagggaaatttgcatcttaacatggaaagatttctgtcgaaaaagattgctgcaacgtagtcttcttgtataggttcagctccacttagcggggagatgattatacagggatgtttatttccatggaggctgatgacctaggcacggtgtccctcagtagattttcattcacctccggaacggatggcatcccaggaccctaatactgtgttttagctggcttaccagtccggcccatctgcagctcttctacaaaagctgttgtagggcttgactctgctggttctgtggtttctgatgagcctgatgagggaggctgccacagtgtttctgaaatccaggtgccaaaaacactcctgccaatttctcttgcttgcttgctttaatgacataccaggagcaaaagtggccagagaggttcctcattctttccctctctaccttcagctctctgggcctgagcttcgtgtcccagctctgtctagtgtccacgggatggatttggacccgtcctttacctctcgcctgcctctgtgtgaggaaggcaggaagatgcacttttccttgggaacctcagatctgggtcctgggctttggcctctgggccgcgtctcacctggaactgggggaggaagccctgcctcacctgccctcctatggaggctgccccagctctcactgccagccatgcctgtctggaggcccagggaatgacatgtcctgtgtgtccacgtagacttgactcctggcagtcacttcattgcctgagcttcagtttcctcatctgctttgtgaagacaaaacccatttcaggccaggagcggtggctcacgcctgtaatcccagcacattgggaggccaaggcaggcggatcatgaggtcaggagtttgagaccagcctggccaatatggtgaaaccgcatctctactaaaaatacaaaaagtagccgggtgtggtggcacgtgcctgtagtcccagctactcaggaggctgaaacaggagaaccgcttgaacctgcgaggcagggggcaggggtttcagtgagccgagagtgtgccactgtactagcctagtcaacagagcaagactccatccaaaaaaaaaaaaacaccaaaccatttcaaagatcaaccttggaaggaaatgaaaataaatgagttaacatatgtgattgttgcgaacagtaaatattctcactctctatagttaacgttctttactttcttctgttgtttcttctctgtgctaccttgcttgatttcctatgttctgaacactagcctttgacatttatttccatgtgggcttctctgacagcagggaggggcaggtgtgcacacccctggatgaggctggtgttgggggcgggggttgagctgtgtacgctcccagatgtggcagtggggggcaggtgtgcactcccagacgcggcggggaggagggggcagatgtgtgcgctctcggatgcggcagcaggggggcaggtgtgcacctgaatgcagcccatagccctttcttatctggcccctgcttacctctcagctgtgtccctcccccggcccctctgtccactcagatgatcatccagggtccctggctggcctgcatgcactagtccacctggctctttgcaagtaatgctccctctatctgggatggtccttctctacccacagccctctacctgccagctccccttactgtgtgtcttaacttggtcaacacttctctccagctcttcctgaagcttctcaggcaggatcagtgcctgatactgcatactcctctaacatgctaaaagttctgtatcgtagcacttaccacagcttacacaaatgaagcccggctctctgttgtccatctctctcatgggcttctgaagctcctggaaagataagggcttgtttctgattcattttatgtccccatgcactgagtttagggcctgcaagatgacagctgttctctgaacactgctgaaccaaacccagtgtgatttgtcccaagcttctgccctcagatctggccctgggcggcatccctgtttctgccgtgatgtgatgactgcctgccctcacacattagcgggaggagtcgcgtggtatggtgagactgcagggcctcaggagactacagccgagtggttccatcagcctgtgtttcacaggagtggccagtgtcctctagctgtgctgcaagatccaaattacatgagtgtgatgggggctgccaaggtcccgcttgcttggcagggtggcctcccagttgtggcacccacaccttcagagacctgttacggcaggtgtgggatgcagccacatctgtggcagaggtgatggaagcagaagcagactctgtgaccaccacactgccattccttgacctctctcctcgagttcagccaggcattccagaagaacctaagaggaactgagaggagctgagattttgtcaatgcaccagcttttcatttaaggaagtgtggaactgtaacttagctgcctctgcaggtgctgctggtcctgaacctagttccttcacctaggcagttgctgtggtagcagattttttccagcttactgtgagctgaacatgacgctttggaaaagcaaggaaacactctggttctctgtcatctaaggcagagaaacttcaaaacagttgattttccattacaattcagaaagcaggagggagtgagccctgttggagccccagctgtgtgccctgccctgggcccacgtaggtcactcactggctcctggctgccactgtgtaggcagcggctcctttctttacagaccaggagggaggctcagggacagggtgacttgcccaagggcacggcagattagaagtagacccaggcagaaaccaggtctttcagactttaaatgaatagcagaaaagtggtaaagaatctttgtttgtttgttttgttttgcttgagacagactttcactctatcactcaggctggagtgcagtggcacgatctcggctcactgcaacctccacctcctgagttcaggttattctcctgcctcagcctccagagtagctgggattacaggtgcgcgccaccacgcctggctaatttttgtatttttaatagagatggggttttaccatgttggccaggctggtctcgaactcctgacctcaagtgatccgcccggcttagcctcccaaagtgctgggattacaggcgtgagccaccgcgccccagtggtaaagaatctgatagatattttaatcttaatacaaacatcttcagaattttcagtgaggaacattggagaaaacccaaaaacccaccgttacagacagaacaaatctggaagagtgttgaaatggttccagcactaggcggaagggtccgggcagtgccatgccgcgcctggagtctgagcgggtcatgaagggtaaaactagggagcatggagaccgtgctgccttgggccctcaagccactgccttcctgtgcatggggtcctccgcacctgctctgggccacacactggtagcatggggggcaccaagttgaagaaaacagctctgacacaaccaaggtaaggatggagtggagacgcagacaccctgatattagcttgagtgaagtgttacctatgaacacaggtcaatgggtgaaaataatgcccagaacatctcatatttatcttgcattttataccttcacaaaatgtcttcctaaaagctacctcgtttgatctttatcatgataacttcctttaatagccatattttttaataacagctttattgagatttgatttgcacacaatgcaatttacccatttgaagtgtacggctcagtgatttttgtttattcacagagttgtgcaaccatcaccgtcgtccactttaaaacttttgaattgctcccaaaagcattataatagctataattgttttgagcaccaattatgtgccaagtggttcaaatcaattctcccaaatcccgactagccctgcaatataggagatccacgttgtggatcaaaaaccaaggcctggggacactcaagtgacttgcctccggtcacaaagcaaacaggtgagaagagggttgcgctccagtccgtgttgctgcaagcccatgcccttcctcggcacagcaccccttcccgaatgcagccctgcagccgggacactagcccgggcgccaaagcctcggggagtcgagagcagtggtgggcgcctgagctctgcctactgactccaagacctggccctgcatgctgtgtgtcagaggccgtggggaatgaagctccgggcaccggctcctccctgcttttgctggacctgtggctgtttggacccagcgggccaagcagtcccgttaagatggaaaaactgcttcctcaggaggcctctgcagaaagaaatcaatttaaaatgacccgtggtgcaggaggagcccaggtcttgcactgccttctgccgtttggagagggagggcagctggcagccagtggcattaggtgaattccattttattaagcactattttctgcgctgaagaaaacaatacttaaaggtcctaaaataaacattgatccggagaagtgcaagcgaaggggctgtgcttcccacagcagtgctggctgggatggagggagaagctcccgatgtcgggcacttccacgctgagaacagcactgctcggggaaggcggtgtctggctgagtcctaaagggcaaggggagccggctccgtggtgggagggccggggagggcccctcgctctggccggtttgctcacgctctggtgactggcgggtaatttccactcatatgaactcagtgcacctctctgtgacctgagggtagtgatataggatctccgtaagcataaaatgagaagctgtgtatttggggctttcccagtgcagggtcgggggctcttcgcaggttccctccctgggagaccagccaggctgacagatcgaggaagcagagtgctcagagcacaccatccctcttcggagaagccacctctgcagcaagaggccaccgtttcctgatgctcactctacttccaacccttggccttctctgaactcacagaatccaaactgaagaaataatgggcctcacgcaacctccaatttacagtgaggagctcaagattcagaaaacaagatgcctgcgaatcacagacttccatgattgaaggagtgcgaggctctgtctcatgcttgcacctccccaagtttctcccattgagtgttttctctagccctacatggagcaaagaacaggaccacagactgcctggccccaggccacagcttgtttatttgcagaacggacctctggcagagctctcagtcccctaactgcatgggccacagctggctgtgggagtgctgggctgcttgttaacaacgagcagtattatctccaagcacctgtcagcatgtgtgcccgagttcaggcgatggggacgactctgtggaccctttcagtcaacgcttaccacaggttcctggctcctgccagcctggctttgacttctccgtctcccatttgccatctctgtggccttgggcaagcgaccttattttctgcaacaggagaatctgctccctcccagggctgctgcgaagatggaggcggtggcgaccgagcctgttgcttggcagcggggtgggcccacagcaggcccgggggacgggggcgccattgctttggtgttggtgcattctccgatggtgctttgattggatcacctagagctttgactttcaaaatacagcttatctttcccctttaattgaaaataataatggccgggtgcggtggctcaagcctgtaatcccagcactttgggaggccgaggcaggcagatcacaaggtcaggagatcgagaccatccgggctaacacagtgaaaccccgtctctactaaaaatagaaaaaattagcctggcatggtggcaggcgcgtgtagtcccagctacttgggaggctgaggcaggagaatggagaatggcatgaacctgggaggcggagcttgcagtaagccgagatcgcgccactgcactccgtcctgggcaacagagcgagactccgtctcaacaaaaaaaaaaaaaaaaaaaaaaaaaaagaaaataataatgaagaaggatttctcttttttaccataattgatctaggaggctgaaggataaaatgatcctctctcagggcgtgatccatacgtccgtgttcacgccgtttccttgtctgctcaaagtcccttctcattcaggatggacgagtcaggaagatgactgcttccctctcacttggcatcgtacttctttgcaaaacagcataggctggtgttctgcacaggcaatcgattcacatatgatgtaccacatacatttggaaagctagtcttataactaacaactatctctcaatgaaagttcagttgaattatatgtggctagcctcctgagatccgactccttgatttgtatttaaatgtcattgtgacttccctggtgaggctatccgctgttcaaagactgaatcatatgatctggtattttaaaaaccaccatttttttatagactcttcaaaaatcacagcacctttttttagtgccaactcttgactattattgtcacatttggccataaaattaaacatgaaaattggcattcaataatagtattaattttatttaactctgccgtcagagatgaacagaagcaagtagtggtggagaccgtctacccgggaggccgcggagtgccgcgttccgaggagtggatggagggccggccccgcatctggtatttgaaatgaagcccctccttggccttgcttttcactttgcaaccttaggtcatctccttagcgcctcagctccttggtctctccatctgtaatgcgggtttcagaatcatgacagcagccactatttatagagcgctatttatgtaccggatgcttcgctgaccgtttgtatccaccatctatcttatctaatctacacaaaatcttacaaagtggggtgtatcagcctcaatcagatttaaaaaactaaaccccagtgtgttttgcacattgtgaggaactttaaaattgtgagcgaaggtgactattccaggaggacagtgtcttgaggggtttatgtagtgggacaagcctcccagaagagccatagtttgattgtgtgttttataggcctgtacaaaagtaattgcactgacctaaatataagctcccctgaagtcctgccttggaagatttgtgtgggcctggtcctttcctccatctaggatttaagtctattccctttagcgaatctctagagagcatttcaaagtgccaagtgcattcacacgcacaagccccttcctcacagggtgaccagtgacccaacaagtatgcttcttattttccaaaaggaagtttgggtgtagagaagctaaggcttgtgtggaagagacgcaggtgactcagacagcccttccctcacagagctcccagcccaggaccaaagattgctctctgggttagcagacagctgtggcaaggactggcctcttgtcccctctgcccattcagggaagatgtctctgccctgatgttccccgcagaagccctcctgttctgcagagaatcctggactgtgggcccagacccagattcttgtcttggtcagacacgaacagcgggtaatacgccttgtcctcagcatgaagtccttactttattaaaaattgaaacaaggctggcgtggtggctcatgcctgtaaccccagtattttgggaggccgaggtgggaagatcacttgaagtcaggagttcgagaccagcctgggcaacatggtgaaaccccatctctactaaaaatacaaaaattagccagatgtggtagtatgcacctgtaatcccagctactcgggaggctgaggcacgagaatcgcttgaacccaggaagcggaggttgcagtgagcagagattgcaccactgtactccagcctggccaacagagcaagactgtgtctcaaaaaaaaatcaaaataataacattagaacccactctagcaaaaaggcatcactcaaagagctgttaccttgctgggcagacccctgggcagggcccggcaccgccaccgccaccctccaggagcccgcccaaaaggccattcccgccaacacccgctgcagacgaggcaggtgccttcgccgtcagttctgcgcgggtttcctcactggccttttccacgcagtttccaaagataatgatttcccacccctttgcagtgacttgccagagcatcagccacggttccgagtcactttttggaaaccttctgatggggaattgcatgaatattctctgatatgtgtcactgaccccaacataagacctcacctgtgtgtttaagcttaaacccaggacgaggagggatgtgccgtcctgtgcaaaccacacctgcaggtgggcaggcttccgaggctgcgggggccaagtggtgagggcggtggcatgaatgtggcatcaaggcgtcgttgctttgttgttgttatgaaaagtagcttgctcattgagaaagccgttatggagccatcaaggcactcagctgatcgtggcctgtggcctggtgacaatagaccctgtgtgggtgctaagaacatgcaaaccctcccagctgttaggtgcgggtggcactgactgcattccacagagatgctcagggaagtgtcaggcctcgccccaaagtcacctccaagccgagctgggcatccagcccaggtggtgggctctgaagcctgccgccatctcccgctgcgctgctgccccggtgcctaccacgatggacaggccactgccagctacacctcagcgccttccgcccttcctctctggaagatgactgcaataggtgatctcagcttcgtgcccctcggtggccctgggtttcttccttaccttccagcacctgggtgtccctgcctgcgggtcgtctccctgtgagcctctcagccaagcgccaccaccccgcatgccctctggcactccctgtggggcagacaccccgtccacatctctccagccacccaccgtcatcgggagctctgctctccacaggagtgacaagcctcaaacctgatggcctcggccctcattcaaagttctggcagtgctgccattgaatttagagcaaggtcacctaccagggcagccggccaggggctctcgccttccatcacgcaggccttgcagctgctgcacacaatgcagcagtgtcttccggcaggggtgaacccaggtgtgaggacccctccatgggaaagcctctcgcagttttccgggttaacagtcacagggctgccgtcacttcctggtggggaggagccaggaggagggggctcaggtttaggggctgtgcctgggaccaggtggatagaagtattagaggtggatagaggtattaggtagagcccctctgtggtttggggaattcatccttggctcttggaattctggcaataggacttgaagctgggtgaccttaggtgagtcactcgatttcttggtaccccagttttgtcactgcaggaaaaggaacgcggcctttgggatttttgccagcgtcggccatcccagggctgcagaggagaaggcaattgtaaatgtgggaagcagttggccgttaacacaagcagcaggcctgttggaggcagggtctgcagtttcagggtctctgtcccatgctgctctgcaaacagcatgagcaagaaatggtctctctttaggtgtcctgcctaagcaaagcagagccaagtaaagctcaagacaaaacacagaggatggagtctgtgacacaggctctgagcgaggcttgctagctccatgatgttgggccagatggcttgggcacccagaggtgcagcctgtcatctgtaacatgaagcagagcttggccttccctgggctggctgtaagttaacaaagatgagcgtacacacagaacacccagcgccgggcttggcacacagcaagtgctccttacattttgttttcttcccttttctgttttatgggcagagttagctacagttttgttaaggttggaggaggataatagagtgtgatgattactcaaccagaaattgtttgaaagatacccccagattagatatcacaccgttgtagttccagtggccgcagcatccagcgtgtgctctgacccagggagctgcctgctggctgtttctcttttctgtgttcaacaggaagagaacctggtactgttgtcaaactcaactgagaggtgaaagttattagttccttttggattatcaagcagtgaacttaagctggcctttttcatgaaacttaggaaatattctgaccttttgtttgaagagagcactagtttgcttcagtctgcctttgaggcggggaagtaagaggagctttttgctgggtggaaaattagaagctcttgctgcacgggtaggttactcacaagagaagaaagagacatggttagtaagcttctgaaaaaatgttcaacctcaggggtaattcagacctcaggggtaattcagacctgcacattaaaacatcagtgaagtggcattttgcctattactagcaaagattcaaaactgatcatcgccagtattggcagtggtgtagagagggagacaggcctgtccatgctgctcggagatgggcttctggaagactcggcctctgagcctgaaacacctcacaccctccaatgagtggctccatgtctgggaacagttcctgagagtcagtcgtaagtgcaggcagaaacactcagcacaaagatgtttgtcaggtctttttctacaatagtcattttttttaaacttggaaaagagctgagagtccaaaaaataggagaaccattctgtaggctatgatacaaccctaagatagaatatttcgcagactaatttttagcgatgggaaaatattcatagcatattaagagaataaaacaagacttcaaactatgtatgtgggtgtatttctttgtgtatatgatacatcatgatttatacatatatatgtagtgattttaaactatgttaaatacaaatacttagggaaaagactgtaaagatgttaacattagagtataatatttgaatgcttttattttcttttttatgcttttttctatcttccaactgtttaacaataagctatctacttagagaaccagaaaataatagtaaaagtgatttttttaaaaaccatgttttgccacaaaagcactgtcctctgcttgcggggagcgtctctagctcttgtgtggctcagccccgcatgtcatgcctcaggctgaatactagagatttattggcactgcagtagttctttcccaagctgtcgtggagactgagacttctttgggtcttatcttgtctttatatccccttaacagcaggtccccttatttcttgctcgttcaagggaatagccacagaggccaattagagcatggttttgctgaatgttttggccacagcacaatctatgcaataataaaaaaaaaaggcctactttttttttttcttttaagacagagtctcactctgccatttaggctggagtgcagtggcacaatctcggctcactgcaacttccgcctccttggttcaggcaattctcctgactcagcctcctgagtagctgggactacaggtgtgtatcaccatacctggcttatttttgtatttttggtagagatagggtttcaccatgttggccaggctggtctcaaactcctgacctctagtgattctgccggcctcggcctcccaaagtgctgggattacaggtgtcgcacccggcccaaaacgcctactcttatccattgactgataaaccctctgttgttgtattagtttgtttttatgctgctgatgaagacatacccgagactgggcaatttacaaaagaaagaggtttaattggacttacagttccacgttgctggagaagcctcacaatcatgatgaaggcaaggaggagcaagtcacgtcttacatggatgacagcaggaaactcccccttatgaaaccatcagatcttgtgtgacttattcactaccccgagaacagtatgggggaagccacccccatgattcaattatctcccaccgcgtccctcccacaacacacgggaattacgggagtacaactcaagatgagatttgggtggggatagagccaaactctatcattctgcccctggcccctcccaagtctcatatcttcacatttcaaaaccaatcatgccttcccaacagtctcccaaagtcttaactgatttcaacattaactcaaaagtccacagtccaaagtctcatctgagagaaggcaagtcccttccacctatgaacctgtaaaatcaaaaacaagctagttatttcctagatacaataggggtacagacattgggtaaatgcaaccgttccaaatgagagctgagggggggctgtgggaggggcacgcccacctggcctgagaaggaaatggtagggggaggaggcagacagcactcagaggataaacaggcagttcccagtgggctgatggatccccagggttaaataattgtcagcgttctccatgactgcacaggagtttaagtcgccatccagctcactatctatggcacactggttctttcctgccttgctgtgttatggaattgaaatttttatctggggtaacacaggtcttcccagaggtttgaagcaatgactgtgtcttcagctccaaattgtgtgttgaaccagctctgaagtcagggccaccttaggagtctattatttcattttcttggaatgaatccgttatgaattactaacgataatgattcattatagtgtctcacgctggcatgtgctgattctccaacagccggcagaaattgccctactgatgaattctctgctgtgttttcccctttctcgtagaatggctattcaagtggacaagttcaactttgagagtttcccggagtcccctggggagaaggggcaatttgcaaaccccaagcagctggaggaagagcggcgggaagcccgaggcctggagatccacagcaagctgggcatctgctggagaatcatatccttttccaggggccacctgggcctgggggcacctttgcccagggttccaacctctaagaaagacccgtgagggtcttagctattgaattttcaccacaggtagctcagaaatgctgtggcaaggagatgtggaccaaaggcttggcatttccttaacctcttaacacttcaaaggccccactcggagcagtattgattgggggcgaggaaaggtcttctcggagccggtggtgctctcgtctttggatcacatgcttcttgccagtgttgatattcatgttagtgacaggttctaatggccacctatcagtgccgggctcagggggttcacagactgacagctgaaaacacaagtgcaattgtctgagaaactgaaatcggattgtacagcttaccgaggcatgaagatgccattttgaaaagttggagagagttttcagaaggattgtgctataacacagtgtttcacacagtcactgagcctggtctgaactttggatcaatggctgactccttgcagacactccactgactgaccgagcactttggagaagcccaggttccctcatttgtttgttcagcaatctttggagagcacctacttttgagtcaggcattttgcaaggcatttaagaggctgagatgcaaagacaaggtctccatgcagttgtttgtctagtatgaagtggatgtgtcctctgggaattgagcactgttggggagcgaaggcagagcaccctgccgagtgctgcaggttcagaggccactgggtgggggcattcaaggaaggcttcatagaggaggtgacatttgagtggctgctagaagtagatagaagtttattaaggggacaaaggtaggaaacagccccaaaatactgaggcatgagagcccatctccggggaaggggcagctctgatgggaatgtctgttaatgatctcagtcatgcacacattctgcagatatggggatacacacgttgctccgttgtgtggtctgggatccttccagatggcctcctggattccgaaagtgtcctcgctctgcacagcatagtttccagaacctgaggccaattcctttgttcaagctaaagggactttgagcctggcagactcactgtctccaaggagtttgtgacaaaataagcactttacatgtagatagaaggttttgtgaaccagacatgaaaaatagagtgcttggggactcacgtagtgaacaggaacagtctgttgtggagttaccggtgtttatctctggtacagagagaagtaaaaaggtggggataatgggagttgtctttcccttgtattccccacagagctcggcacaaagtcagggttcagccagttcttaatgagcaaaatgccatagcaaggagcgagtcagactggttcctactgtgtcgggcgtgcacccatcaccccatttatctcctccacatctccctgaccagcactgtggctcccatgaaggaaattgagtctcagccatgaggggtagggccagggaccaacccaggtaagtttgctggcaaagtgctcacccccgagtctcaggcttcaaaggagaaggctccgcaggcaactcccacgctgtcaggctggggaaaggagggacccctggcactcacctcccagcgtctatgctgggtcttgggtctttctgataggcccatgtttctgataatctttctgtctttctgttgggtctttctgataggctgagggttggagaggctctatgtgaggcaggaggcatctcttactcgggtctcagagattcagcctctggccgggcgccccatgcagagcaaggcggtcctggatgggtctgatgcagccccagctcagcgccagcagcaccagtggaggaaggggcaggtgcatggtgggcctggcaggaggttattcattctcctgaacgatctctctttgggctcagataaaagccagagccctaggatggttgggattttgacctctgtgtccccacgcttcacagagattgagccctcccctcccctcccagggcctcattgtgctgggcacacaggggcaccctgctagtgtcagagctgctgcctcccagacaccaccctgggctggtgctgccctgggccacgtcacccttgtcggcaacctgactcctggggcggtttcattatcctgtcttcccgtcttgcagatgaaaactgtgactccacttcacaaagagaaagtggcgtggccagttcctgcaccccgtagcttgtctgccagcctgcagtccccgcccagcacatgctgccttctaatgggatgatagtggcccacagaactcttgcgttctttgaaaaccagtatcaaaaaagtacagaaaatgtctttgcgtttgacttctctattttctgtatatttgcttaataattcatgcaacacatatttattgattgcctaccatgtgccaagcacatctgccccatacatttactgatcggaagtttatgagagcttgattgtccctataggcaaatttagtgaaagagagttaacattaaggacatcatccctccctccctccctccctccctctctgcctccatcccttcctccccgcctttctctctctccctctcctctcccttccccccactctcatctgttgatgacatctggtgtcagaggaatagcagaattttgctattgtaaacctgaattcaagcagatggaaagaccaaagattgaattggctaataatttcattatgcattttaataatattttctaaacatttagactttgtacaaacatttgagcttaatttgatacccgtccatagttgtagcagttgcccacctgtagcgcatgggtctggatagatgcgttttaaaggaaattggggatcttgcactgggtcgatgcacacctgtctatgaagcagctacggtgacacgatgggcagcccagggctgccgggagctctcaccccactcttcacctgttaatgacaaatatggtacagatttgcttgttcttaggaggtgagccctggagatgcccccatcaaaggggaggggacagatacagagatgggcacttgcagtgcagcgttgtggggctgatgggagcttccctcaggtcacgcctggcaggagtaggtggagatctcagcccattcccgttcacgtagagagatgaagagggcccagggttcagcatgtgctgtgctgtcctcagcaggggacccagaaggcagggtatgagcatggccacattgatgtctttgaaagccaccctggccacagtgtgacaagtgggttgcaaagatgcaagcgcccctggggatgctggtgggttgaggagccactgcgtgagcagctctaagtcagggaccgtgagggcctgagcgaagggagtacccaggaaaaaagtgccgagggaccacaagggcctgaacaaagggagcggcacaggaagaaagtgcagaggcggccacccgtcaccaagaacctgcagggttcagacttgcaggtggcctctgagtgcctgtcccttcctctctccttcccaatcctctcttcccccttctctccctcctgcccctcccctatgcccttccctacttaatttctgtcgaaacagagggttaaactcagtagcctccttgttcttgtcccctccctcagaccccacgtgtgattgggcacccccgggcactcctcctagagtgctggagggctgtgggtggcctctgagtagcgcccagccctgctgaccagccccttctcccattctgagatggggcacgtttatcacaaggagcccagggccagagaaattacaatgaagacacctaggatcatgtcccagggcactggccgggcacagggcctgtccctgctgtggacagggtgacctgttgtgggggaggtggcccagggcggtcagccatcctgcttccagagtgggggtcacattctggtgctgggcctgaccggatgagctaatgggttaggtaccccttttttctttttcttttcttttgtttgttgttttttgttttttgaggcagtcttgctttgtcaccaggctggagtacagtggccacaatcttggctcactgcaatctccgcctcccgggttccagagattcccctgcctcagccccccgagtagctgggactacagatgtacaccaccacgcccggctaatttttttgtattttagtagagacagagtttcaccatgttggccataatggtctgaatctcctgacctcgtgatccgcccgcctcggcctcccaaagtgttggtattacaggcatgagccaccgcgcccagctgggtaccccttttttctttaggaaatcttttcttaaaccctatttatcattcttattattatgactatgaaaaccacttcttgtgtggctgctatgtgttagctactgtacagcaagctttcctcactacctgccaccaagcctggggccatgtttcccacgagaggctgggaaacctggtcagacacaggcagtttcctaccattctcccaccagtccctgccccgggtgaccttggtcatggccaccttctctctctgcttctctattctcatcatgaagtggggacagcaagggcttctgcttccccggagctgcacggggcgagtccctgctcctgtggcacactcgggaagcactctccctgtgtcccttcctgtcacgcacacgccaggttggagggcttctgctgtctttgtgcatttatccttattctatcccaggatcaaagttttcacaaaggactcctcatgctcacaaatctcttaagccctttcttccacatttcctaggctttcttgcccacatcagcctgctgattttaaagagaatccttccccccagccccccgacccagacctctcctgcttgataagagcatgcttgtttgtaatgtctgtgcagtttccctggagggcgggggcatctcttcctagtacatgcagcatctggcccagagagctgggcttatttgctatacagtgatgctttctggataaaacctacctacctttggtaccttcttcttttaagcttcttcttaccctccagctaccaatactggacaattttactgaacttgggaaaccttagcatagccaactctctgtgaactctgttaatagcagataatagcctttaccacgtgatctagaaatcttctatatttgcctttgggataggactaatgacgccacattgttgaggactggagcctggggtcagaggctggccctgccactcccagcatccagaaggggagactgtgtgacctgagggccatgtactaatctgtgcagctggtgtgacggaacctgctgcagaccattgctgtcaggatgagttcgaagaatcatcggcctttttggtcacctatgggtgagcagaagcattttccttacctcagacctgcaaagcaggtagtacctacccctttcaaaacataagtaaattttggaagttcaataactcaccagagattgtgcaactagaggcatagtcaggatcccaaaacttgttattttcctgttgactgcttcaactgagatcacatctgcaaggtgcagacatagcttctggccctggaaggtgtcagcaaaggtgaatgccccttgcccgtttcctgctggaagacctcatgccacgctgctacctgacctcaggggaggccctcctgactcatccttcagagtggacctcactgtctgctcctcagagccttctctgccatcagcctccctcccgtctcggcctggctgcaacagccccttcccttgggctcctgtgacacccagtacttcattcttgttagttacagtctttaattagtacagaaaattagtttttttctgcagattttctcccttgccagattgtgccgtcttgaggtcaggtggaatcctgttcatccaacagccgtttattgaggctctaccatgtgccagaggttggactgaacaccagggcacaccagatgctcaaaatcaggtgtggaccctgctctgatagtatgtgttctcttttgcttgcccaagtgctgtgtataatcgctagcacataggtatgaaaactgtttgttttttgagacagagtttcactcttggcacccaggctggagtgcaatggttgcagagaggttcactgcaacctccgcctcctgggtagctgggactacaggcacctgccaccacgcctggctaatttttgtattttttagtagagttggggtttcaccactttggccaggctggtctcgaactcctgaccttgggtaatctgcccacttcggcctcccaaagtgctgggattataggtgtgagccaccatgcccagcctaaaatggtttgttgaatgaatagtttccatttcaatgacacagcaaacagaatggctaccagctcagctgcgcgatgccgagtgccgtgatgagtgtgtgaaaggaactgcaactcacgggatgagtctacatcgcagcctggctccttttccagagcagccctgcacagaccgtctgctgtggaagcaggggagggacacgcttctggcaagcctagggtcaactcaccctttcattttccttgtttttgttgcaaatcaccctttggagagcatttcagggattggtgcaaggcttgctgaggtatcagaatccagctgtgtgagctggagtaggaagaattgggtgcgcagtttggctgatccccatgaaggcgaatgacctgggccgtctgagcaatctcttcccaccaggcgcatccgcctcctccattctgtctggaggagcatttttaaccaatttggctgctttgagagtgagttagaggctggagaagcccaaggcaaatggctttagatacccagagtaggggattggagtggaatatctgtgaaatgcggaggacaaatgagcagacatgacttggagagtggagggatgtggacggtgtaaccatgatctcagtacagggggccttgtgtcctcaaacagctgccttcccgggcacagggagcccaggcacagcttgggtctcaggctgtgcactgctgaggggtgttggatcttgcagacaacagtcaccctctgcaaagtgaagaggctccacagtggcggcggtgtttgtcagttttatttgggcttcaccagcaggacagtgtaaggattttaggcacagtggccctgtttgggtgatctcacctggaatgcagtcacactgggctttgttctccattttcaagactgccttctttccagtaaggaggagttgccttccgctgagctatcctccctttcaggacagaggcgggactcaggcacttgacctgggctgtgtgggcccacccttcggcctctcaaagtggcttctggcctattctcagacatgtttcctaatggagctctgtcttatctcctgaaaaaaattaaatatctttaaacaagattcttttaaaacatagcacactgtgtttttctaatcgttatgtttggagaaatagttttctgtaaatgaattttactataaacggctcctgccatcagtacagctgattccttgatcatcttaagtaaaatgcagggttgcattttgtatctgccttgagggaatttggcttttatagctgtttgtaataacgtggttctgaggcctttaatctcccgtagcagggaagccctgtcagccacagagagacgtcctgccttgccagccagcgaggccgtcacatcaccctggctgtttggccttcggtgggctggagggtaaggtgggagaggcacagatttgattgctgcctcccccaaatccaaatctggtggccatgcccaccttgaaatgactttgaaagtggccggggtttgacacatactcagcacagacttcagatctggaacatgagagcggggaagggcctttccccggcatccacagcatcatttcccatcttcatgtgtgtgcatgcatgtgtgtgtgaacgtgcacacggatcgacgtgtgttgtgtttgtgtgatcaggtacatgttggacatatacacactgtatttttagcgtgatgattattgtgagcatgcgtagcttatgtaatagaatcataaagttacagagcttaagtaacagctaaaacccatatggcacttactagatgccaggcaccgttctgggcaatttatacagatttattcccttcactttcacaacaactctctgaagtagttttatccacgttgcacagatgagaaaacgaggaggcccagcgaggtcacctcgcttgctgtaggtcacccagctggtccgtggcagagccgggggcacgggcagctgctgccctcagtgctgtgtgctcagctccatctaggaagaagcacaagagcctctggcttctgccagggcctcgcattatccccacttaccagaggaagcctatggagatggcagcattcctaggtctcaccactgattggtacccatcgccccatgcagagctctgtccatttcacctgctctccactgtgggactctggaatattctcacccaggcaagatttgcagcagtgagccagttgcagacctctccccttggcagcacgtcccactgtgtgacatcttctgtccagttgggtctctcacaccagggagctcagctgagacgctggggcacttactgaaatgagagcggcaagagcatcagcattctgaaagttcatgatgcaaattagaaaacaaagtcatggcaaagaggctcattaatcatttaaagcagtctttccattagtgtaatttctatttatgacaatttgctaatttatttgatctgaagtggggctaagctgagcccttgcacctgtagtcattcactccagagcttgcgcgtgggatgcaaacagcctattttccagcagggagagatgacccaactgaagtcaccgccaccccagagcacccacttcatgatgctcaacccaaatccagtgtgaaaaccttcatgtcaaattctccatgatggagttcaagcttttgctctgtagactttggatactaaccagatgttctgagcatagcacttacttttattttatttttatttatttatttatttatttatttatttatttatttatttatttttgagagatgaggctcacacacctcaggtctacaggttccaaagagaacctcacagattcccatctggcttcacgtttcccaggggcagagtgaactaagcaatcattgttttcctaaaatgccaaaccgggtcatggtagacttcagtcacataaatatagacaggatctcaaagctgccccatggtttcaaatggtctttgactgcggtacattaccaaatattttactgctaatggccttacagaaaatgacaaggaaggtgttttattaccttgtgcatttgctttgcatctggctgtgtttttcaaagatttggaagtgaacactcatagttcccaagacatggagattaactgagatggcacacatgaaaacatttgtaaacaaaaaggctctgtacaaatattgattaaataattaaatgtgataaataaggaagaatgactactgataataagtaggatataatccttgcccaggaggctgggcttctttaacatagggaggcccccaacttggtctctgaatccccagcacctaacacagcaaggacaggatgcgtgctctgcagggtgcagtggtggcagccagggaggacagaagggttggtttccagggtagagacatcccagataaggcaatgtttgagctctagaagatgggggtgttcaccagaatgacaaggctaagggtgctccaggcacaggggaagcagagcaaagacagcaaacagcgccgtctctggaagtgaggacccaggcacacacgcacacgggctcagggtctaaaaggggaagcggcaacaggaaaagcaagctgtgagggagcttatggattgtgctggggtgttgggactttgtcctaaaagcagtgggtcgccctgaagggttttgacccagcgagtgacgggatcaccttcaccgtgaggaggacagacggctctggtcaaatggtggaatgaagtcttcctttccacctgctcctggcctggccttgtacatctagaacacatttggttctgtggggttgtgctccctgcctttggaaattaggcacaagagtctccaaatgtacatatagggcagtacaggtctgtctctgctttctctcccagcctcctgccctcagcccttggtgaggcctttaaagggtgtcgagttggaatgaaggaggccaactagggacaggattcttgctggtgtgtaggttacctgacttgtgaaactcatttctgctctaaagggttacagtggaaaaccagagcagtgaccctgctctgaaccatgcagcttgcagagaaggaagatgggatggggcctctctcttgggggtaattatggggagtatccggtatagctcagggcacagttgacccttgaacaacacaggtgtgaactacgtgggtccacttacatgcagattttctttcacctctgccacccctgagacagcaagaccagtgcctcctcttcctgctcttctgcctacgcaacgtgaagataaggatgaaggatggtccactttcacttcatgaataggaaatgtgtcctctcttcctcatgattttcttaatattttcttttctctagcttactttattgtaataatatagtatgtaatacatataacatgcaaaatacgtgttaatttactgtttatgttatctgtaagacttcagttcaacagtaggctattagtagttaagttttggtggagtcaaaaattacatgtggattttcgactgtgtaggcggtagacacccctgaccccatgctgttcaagggtcaactaaatatccttttttgtttgtttctgtttttttaaattctttttttttttttttttttttttgagacggagttttgttcttgtttcccaggctggagtgcaatggtgcgatctcggctcactgcagcctctgcctcctgggttcaagcaattcttctgcctcagcctcccaagtggctgtgatgacaggcacccaccaccgtgcctggctaatttttgtatttttagtggagacggggtttcaccatgttggccaggctgatcttgaactcctgacctcaggtgatccgcccacctcagcctcccaaagtgctgggattacaggcatgagccactgcacccggcctgtttctgttttttcaatgtgtatttttttctcttcaagccagatttttaaattcacggaagggattgagatctgatactgttggagagagcggggtatgacatatgcaacttttgtaaacctcagtttccccttcacagaagagccacatcctctgcatctcacatgtggcgggtatgaagctcgaatgtggctctgagttgagtgtgctgtgtaatctttgtgggctgaacacacacataagaccgctgctccgaggaagcgtggcttcctccagtgccaggtagagagtaggtgctcagtaaatcttcccggacacaagcttgtgtgggtggacattcgctgataaactgtggccttgcataggtggtcactgaaagctaccatcaggtttcttctgcatcatccctggaaaaaatcattcattcagttgacttgtacttgtgaccaactctgtggaaatgaattagggactcagagaccgtaaacctgccccttgtcctcaggatgcttaccggggtctagtttgggaaatcggtcatggccacaagtatctgaagcccagggtggctggcgctaccgtggaagtgaggcacggggcccagagccaaggggcagcctgccaagtgctgtgctggggctccctgcctgccatatttggggctgctcttcctgggcaagtagccgccccttgcccctcttctaggaggagccccacttgcgtacgccacttactcctggagttatgcttcaccatctcactggcaggggactagctgacaccgttattggcctaagccaataacacagagcacatctgtgttcccactgccttatgtcgtcccccagaaaacttcatgtgtgacctcacaggagaaaaaggctttctgagtccaaggggctctcgccctcttcaaggggcaacacaagtgcctctaacgttccacagcacccaaaagtctctgtgtctttagtgctgctttgaaggtgagctcctgaccccgtcactctggcacgctgtggacttcaggctggttatgctggaaacacggattcatgggaggagtctggacagggaagggggcactgctcttggagcagcagaccccgaatttgaaaccccactggggtgagtttgaatctacccctttctggctgtgtggctttgggagcgttacctaacatccccaaggaggcttcctaaacctgaagttgttgtgaggactatgtgggatgatctgtaggtaactgacacatcacaggtgctcagggaaaagcagcaggcatttatggagcctctaccatgtggcggtgactggggcactgtcccttcctctcccagggcttggaaccacaagcagtcctctgaattctttctttagtggcttggattgcatgttttctgttctttgaaataatattttcccacgggaaggccaagaagctaagcagttgggaaggtggggctgcctcctcattcatcttgctggtttgagcagggatggcagaggaaggttaaactgagcagggctagccccagcccctggacctcacggctcactgcctccacaggtgtttgaccagcagggcatgtgagaaaactgtaatggactccaagtaactcagccgtgtctctgaggcagaaagtggcaagcttggaggacgctgtgagaggaatttgtgtttccttgcaagggtgttagaaactgcctgtgggcagctccagatatgagaacatgagctgggctgggacgtgggtcttcttagggctcaggcacgcagggatgtcagtcattaaacagtgggcatgggttaggggacttctgtgaagcctgggttggccccagcagtgatttcacagttctgttgccagtgtgttcatctctgtctcctgagaggcaggggcagaatggtgggggtaaaaacctgttgacgatttggaaacttcatccccaagtgcctaggaagagccttgaggggaggcagctgcttcagcaccatggagagctctgtgctgggcttccctctgggctggaaaaacactggccaggcttggtgtggacactgacccaactgctggccaactgcagggccctggcacaacctggccctgtggacagcaggatctttgtccagtgggactcatggctcctggtttccaggtttacggtgaggagtcaatacaacatatcgaataatctctgaaagccagagagcagagtgtgggttcaggggtcagcctggctgggttcaagcctggcccctgccacttgctagcggcactggctttctttttctttccatgagcctcagttttctagaaaaatctttgaaatgaaaataacagtacctatctcatacccaccatattctgaagtcttagcttgaaagtggtgagtattgcagtgagaagatgcgtgttgagcacttacccagggcatccttcacagcaagcaccttggaaatgttctctatagtggcaataatgataggaactactatcgtcatcatcattatggattgacctcttgctccaaatgccagggtccacgtatttaagagatagtagccacccccatcactgccaccattgccactgtatgttgtagtattacaactgtggctgtaatcgctgccttcagccagccttgccattcttgtgcacaggctgagatgcaagactgtttgggtggcttacagggctgaaaggaagtcggatatgcatgcaggtaattagctttattagcttagctgtataattttatggctcatgtccgaaagcaaattaatacagaaatatgctattggaatggcttccaaagctccagcaccatttggcaacttggtaattactcacaggcggacttgctccccagactaatcactgcagagcttctcagcctggccgggcctgttaggcatggtctctgctctgcaggcacggggctgctgcctgcctccaaagcctggtgtgagactttttaatgaaagtaatatgccaaaatgtaggtctttatttcaagaaagtgaaaataaactccaaagagaatcaggagggaaagcagaaagaaagaaaaacaaaaatgtgtgttttgagcccaagtgtatcagtgacttgcctccctagagcctctcagttctgaccggggtgaggcccacactcaagtgcagctgtgtcccagcgtcccaggcccatagtgaactctcaacatttaattttgttcatgatgttaccaagggcacattattgtttacttttgttatgctaatttttgtattactttaagtaggtgcacatggttcaaaatcgttttaaaaaatagacattcccatcttcccttttccttctccacctcccagagcacccacttttatttgtttcttatagaaacttacaaaatttatttctgaaataataagtacatgcaaacaccctttttaccgcaatttttttttacacaaaaggtatgtatacattttgcatcttgcttttttcacttactgcatatcttgggaaacttctcatattatttcataggcaatgttctctctcctctttcctgctgcagaatattaccgcaaagcgggagcatgcctgtgtgccccccgcctcgtcaacagggatgcttttccacttccatattgttaccagtctggcagacgggctcttgagcaggtccttttcctctggagatgtcgttttgcaggaaagagcctggcctctggagttaaagtggctccgggggtggccgttctgtccccgagtagcccgggacgtgtggttgagccctccggtttctggttctttccctgagtaagagtggcaactgtcctggccccacctagttgaagggaacaggcacagcccttgtcgtagtgcccaacatggctcaggcatgtcccaacgtgtcttcccttcccccttccactctgggacccagttggacgactctgagatttagaattggccagtgggagcgttttcttcagtgaggactggtcactgctctgagcgtgacttcgtgtgcccatgagccatgagggccgtgagatgacagctgaacgccgaaaccagaaacagtgaaactgagctcatcttgccagcacggcacacacgtttccactctcctctgcctttgattagagtgagtcacagcatggctcacaggggtctggtcaggagtggaggaagtgagatctgatgtcttttttactgaagaggaagttgctctgttctgtgggggctgcaagggaaagagaagcagcagcccccccctccctccgctgcaggcactccagttcccggggtccagtcccctcacactccgcaggggatggcgtttcctaggaggagtggcgcactcagggcaccgcagcagtggggctgagcccaggccactggtgaggtgggggcttggggcaaactgactcagcagagctgacccctcctggaaaggacagcacccccccaggatcacccagtcgtgcgcggtgaccagtggtctcgttgggggttggcattggctctctcctgggcctccccgcaaggagggaaacagctttgcacactgctcggtgagggtcttgttggtgccgggactcgacaggtagaaagtgcagggggctgccctgagttagcctgagaccttctagaaacttaccctaaatcaaaattagttgcccgaaacctctaagaattctcataaagggcactggctgtgttttcctgccagcagtgtcacagcacgcagggctggtgtggccgatggagtaacaggaattgaggcagctgcagggtggctgtgggcagggatgctggtgccaagcggttgccacagaagaattcacaggactggtcggagttatctgggagcaggcttgcatctgccccgtgcccctgtgggcagggaggagttccgctctgtgagcatcacgtggtgctacgtgacatcccaggttggggctagcatcctgcctgtcactcaaagccagcaagttgtttgaccttcccgaggctcggtcccctcacatgttagacggtactggctgtgtgtgccgactttgtgccaagggccagcatcagttacctcctggtgtgccagagtagatcgtcagggagccactctgttcctcatgctgaagatgagttgtgggtgcactgctggtgaagggcagcttttgatgaataccgtcattttctttatgcctacattcatgcagacttgccatgcatgttttcattacattatttaatccatgtttatggagctacttttggtccgaggagttgcatgagacatgagagcttcaaagaaaggtgttcacggttcctcaagggaaagagacatgcaagtgccaactgcagcattgctggatcacgctcgaaagagcattgtgcagaccgccagggcaggttgggcatgtggctgtgctcagttggctcccctgaggggcatggttgtgttgggtctgaaagagaggagtctgccaggtagaagaaggggagggacattccaggaagagctgggcacagagcctgaaaaggagagagcagggtgcgtccaggtctgcggcacgccgtgaggatgtggatctccaagtccactatgaaaacagacatggaaatggacagttagcatggagcccctgaagctccacaggagaggcatctcgccagggctgtggggcacagaggaaggagcccctcaccagggctacgagaaacacggcacgtcttggtttgtaaatccttagagggcagagtgagtttaactcccacagggcctgtagcatcagtaaggttgaaagccttcccctctatcttttcatcctcctgaccacctgcagaacgggcactggggactccctctgtccagagtaggtgtcgttgtggactgaggctgtgaacactgcacccagggcccctccccctggctgatagacgactgggtgccagtgatggtgcagcttctacagcagaggagtgcctgtggcttgacacgcttctacagtggagggatgcccacaccatggtatagcttccacagtggaggagtgcctgtgcctcgatgcgcttctatagtggaggagtacccaagctgctgtgtgcttctatagcggaggaaagccagagtggttttggagcaggtgtgggtcaggctggggcaaccttaggagccctggaattgagcagttttggaatacactgtacagtttccaagaaaataaaccgtgggtgcctgtcccaaacctgtggtgcgtgttacccgtgactggcagacgtcatcatcgtaatgctcacagggccagccctctggcctattctttgtcttcctctgtctccacattttctcctgtgtctctttatcctagtggggccctaggacctctgcctctgagattcttgagggcagacagtcctgagagctagactgtcatcagttcatctgcaggaggttctccttcacctcctctccagagagaggcagctggagtctcagggccaccttggtgctcccctccctctaccctgaccttctcctaggaggggcctggtatgagccatcgtggtgtcccttgggtactacatggggagagagggctccatgccggggtgggggccagagcagcacagcagtgcaggagatttccctggccaggaaggagcggggccctgaagcttcttagcagccttgcctttgtgcgggactcggggtgctgcggcgcatgtgcttgtggcggcccatgtatgggtatgtgcccattcacactggtgtgcatgcacatattcatgcagaaacatgacattcggggcctggtattgttgcccagtttctgtaacttggaggcctttggcagtggctgagaacgcagcctctgggggcagagtgggctgccatgtggtgtgtggccttggccagtttcttgacctttttgtgcctctttccttctctgtaaattagataatgcctaccttgtaatgccatgatgaacgttaaatcgctgagcacgtgtaagctgcttagagcgggccctgcctgcagcacgcaccctggagatgggagctcttggctgttggtctgcccacccccacaagtgtgcagatccatggggttatggtggactctgcattttttgcttgccctcttgaaagatgtcaagccccgagtttgatgataactcatggattcagggagccccagcggggagcagggtgcagccaatcccacctggcccgtggccaccagaccaggagctccaggagggtgccgcatgtgccgctgagctgggttcgggaccctgcatccagcccagggcccagcctgagtggatgagcacgtgcatgaggaagcataggcgtgggaaccacatagccctgggattgcatcctagctccagccctcacccagcaagactgtagggagggtgaagtgcaggctcctgggctgagcacctgccccttcaccactggacaggtgtccctgggcctctccgacgtgccagatgcatgctttgcttcctccccttccttcagaaaagttctttaatctttgctgatgagattcccttactctcacattcctcaccttgacaagtaatttaatatggtgccttgagcattaaaatgaggatattcaaatctgtgggttcaaaggaagaaaaacaattcactcattatctgtggcaatgaaaccctgcaatgccctgctcataaagacacaaaccttcccagccaatgagttcttaatactaagcaactcctcttaagaaaataaaatttctgggaagctgagcgtgggttgccgtttactcaggcatttggccgtggacagggtaggggaatggagacccattcgcttcagccatagtgaaagcaggtggcctaatcacggagctgaacagcggtcccttcttgagagccagtccccaggcacagacagccacagatattttcttttttttttttaaatttttaaatttttttattttttattatactttaagttttagggtacatgtgcacattgtgcaggttagttacatacgtatacatgtgccatgctggtgtgctgcacccactaactcatcatctagccacagatattttctaacctcacttggggcctgaatcgcctgaactaggtgctgggttatgagaacagatgtttccaggagtgctcagtccctgagggagacaagccttcgccttcccgtatttgaaaactgagaaaacagaccgggaaggggtccctcacaatggcctttgacccctcgtcgcccagccaggccagccctctctccacctgtgagcctgccacatatccagagcctaaggtcctcccaggagatgcctaggaacctggtttcacctcaagtctggggcttggctggccatggactgccctgggcaggcggacatggtgtccttgggcctggctgtttctcctgagaagagtgcagtggtagggagcaagctcaacctctgcaaatgtccctgggcctggagcagggcacctccttagccctgatggggtgctcggaacggagagcacgaatggccagatgcccgtagggcctgacctccctgttacggcttagggcttgggaagggaccacacaggtcatgcctgaggtcccaaacaccccggacatccaaacccactgggttccacgtgtgctggctcgttgagggagagtcggattcgcttttgcaaaaagataaaggagctgcagggcgctgcttccttgaggggtgcctcgctgctgctggcgctcaaaacaggcccggggcggcggcctccgtcctcatcgtgggagatgcaggaaggcaggaccccgatccccagctgttgcttcctgtgcctactcccctagaaggagcacccctcatggagatgcagcctgactgctgagggaggaaatggccactgacgcaaaatgaatgaacacacagggcggctgcatgcttgattggaggaagctgcctgcaaaattgccttaggaaggacgagggggccgcaggggggctgtccttgtccagtgcttcctgagctcctgctgtggccctctgctcagatgccgctaccctgcgagatttctcagttctctgttcctgattatggcttcctccgggcttccttagcgtcgctctgcttcctaattatagcctccttcctgggtcggcattttaagaaaatctaccttcgtaactgtgcttcagtgtccagctcaggagtgtgaaacattttcaaattatcatgcagccattgccaccatctgcttcccgaactttttcaccttcccaaactgaaactgggcacccatgaaacactccctcccattccttgtctccctcagggactgagcactcctggaaacgtttgttctcataacccagcaagcacctagttcaggcgattcaggccccaagtgaggttagaaaatatctgtggctgtctgtgcctggggactggctcccgagaagggacaactgttcagctccgtggttaggccacctgctttcactatggctgaagcgaaggggtctccatttccctgccccgcccacatccattctgtctctgtggatttgaccagtgtaggtgcctcagatcggtggaatcataggtgtttgtcctgttgtacctggcttattccccttggcataatgtcctcaaggttcatccatgttgtagcatgtgtcaaaaatgtccttttctttaagggccgaataacattccattttgcggatagaccacattttgttgattcattcatctgttggcagacttttggttgcttccaccctttggctattgtgaagatcactgcagtgaacgtgggtttgcaaatatctgtctgagtccctgctttcagttcttttgggtataaacctggaagtatgattgctggaggtcagcatgttctgaaaagactgtctgttgggtcacagtcagctccataaccctaaaccctagctcagatagctgcctgttaactattgaatgaatgaggtgaatgctagaatccgaacttccaggattgtcacagggcaaaatgagataattaaaagttcattgcagagtatttgtcagtaacaatatcagttcagcaaacataggctgtgtgtgtaatgagatggagaaaatttcgtttggagaattcttctaagggagggaattatctttgcaggaaacactttgataaattgcttgcgcgagagtaagacccccaagggagttcgaggcaacagaaatggtgggtgaattcctggggcaaggagagaagtttctgcatctcctccgagagggaggaggaacaggagagaggagaagaatggggatgaggctgatgctaacagtaggtgacacttacttaatgctacccacaggccaggggtatgattccgtgcactcctcatgacggccctgtgaagttagcactgctagcatgctcatcttacagatgaagaaagtgaggccagggactttaagtaaattaaccaaagctcattcgtgggggtgccaggattcaaagttgggccgagtctccagaacctgcccttttcggcaccaagctccacgaagagaagagagggagcagagccagtgagggcaggagctgtttactcagggccagggcatctctgccggcctcagagcttcagccacagctcccaagccctcggattctctactgagggaggacgggatgagttagacatttggggtgctgtggaatgaagcaagcagcatgtgcggactggagccaggagcaagaagaccctgagcagtgaaccctgagaatgtgcagaagccatcagcaggcccacgggtgtcaggtgcaggaaggtttgctgagtctcatagccactgcactgtgctgcgtgtggaggggctacgggctgtgctgctgaatgaggcgtggcctctgcactcctacctgggacatttgctcatttagtgttcatttattcatcaggcaatatatattgagcaacttctgtgaaccaaacactgttctaggccctaagaccaggtctctgccttcatggagctcacaggctagggctgaagccaagtaacaggaagatgaccgtgtctagcacaggttgtcatgggatgcatgcacactttctggagggttcctgcaggagaagcaaggtcaggttgagatataaagtcagggaagagaagagggcagggaaagacatttccaggcagaacacgcagagtgtgggaggggaggcttggaattcagagagagcacacagtatttgggaagaattgaaagaagtccaaaatagctaaactagggctgggcactgtggctcacgcctgtaatcccaacactttgggaggccaaaatgggcagatcacttgaggtcaggagttcaagaccagcctgggccaacatggtgaaaccccatctctactaaaaatatacaaaaattagctgggcatggtggcgggtgcctgtaatcccagctactcgagagactgaggcaggagaatcacttgagcctgggaggcggaggttgtagtgagccgagatcatgccacagcactccagcctgggtgacagagtgagattctgtctctaaaaaaaaaaaaaaaaaaaagctaaaataggacacaggagtgggtagaggttcccgagcccccagggcagcatgttgctgaccttagcctgtcctgctgctggtggctgtggtggtgtgaccggcgggctctcttgggcagccttcttgtctggacagccctctgtggctattgcattggaccattgatgagggggatatgcccgctctgctgagcacctctgagcccgactcccccatgagccagcaggagagacccaggggcctccatttcgtcctgctccctctctctcgcaatgctcagcctctgctccattctacctcagactgcaggagctttgttcccataggactgtccctggggttggccaatgcgattctcaggttctacgttgctgccttcaccagaatgggaacctctcagcttcagggtgcgtggcccacccttccttcatcctcaaggccacaccacctgctgtgcatggtgtgcttcagatgaactggatgtgtttgttgaatggaattaatttatgaaaggaagaaggaaggtggggtattttctccacttttgcagtcactagagaatgtcagaaactaaaattttccccttttattgcaacttaaatgtggtggctttaacttatgtaggaaaagggaaagaggtttacagatctgagaatcacattggctgtttaatactagcgcaagggagatttctgttttctacatttttaaacctaatttcttcacccactgatacttgctgagagactttatggcttcctcgattatgagcttgcttaagtgagttcgttcgtaataatatgtgtaattacatcaagaaggataacaggaccgacgtgaaaccagcatgaaactgacgcgtgtcaaagaactcatgggttgtattgaacagtgaaccagtttgcatattttattaaggaaaaataaccttccatttctctttattttccccagcaagaatagttgttggattaaaattatcccagtggatttccctttcttacataacagtagtttaatttaccagatttgaggggtaggaggacaagcacttgctgttttatatgcccctgatgtccacatacccagggtgatgtcatagtggttggttagacagtcccttcagaagaggggagacatctgctgtaggaggtttcccatctgagggtctctgtctagagacttctagacgttcttctgtccctgggctccgcaggagttgcgttttccttgaccaaggctcacccctccctgaagcgcagtggcgaggcgagtgtggaaggactcctgaaccagctcgtcctggagcacctgcagctggcgcctctgcagtggggtgagtacccgccagccacccatcgattctgggtggatgtgctccttttctccaaatgcacgagcaaggtcttggggggtgtggctgggcaccccaaatgttggtgggtactgaaggtcatcacgggaaaccttgggggaaaaagacgggctcaccatactgcgccagcacctctgtgtgaggtcatctttgttcacctaggcgggcagctcagcactccggtgacagtgcagacatgagaagggctcatcgcccgttgaaacaggtgcagcaggcggatcttggcctacatcttgacttgcacttggtgtagagtgggccgtcttccgaaatggcaattgactgtgtctggcggggtgtgtgctctgcaactgtttccagaactgagagtggcttgggatggcaaaagagaacagggtgtggtgaaccccttgcgttcaccccactcaccacgactatgcatggacagcttttcatgctgtctgtgtggaaaattgtttggtttgtaaatgcctcaactcaacgttgtgttcaaccccaagagaacgccattactggacacttagcacagtttatttgactgcttcttcttgttgcacctgggaacttccaccctacactgtgcctttctacattgaactcaaaaatattttgctgagaaacaagcttagcatttcttttgaagtgagaatctttattatctggaaattatttaatcagctcatctattttggatcccctgcagacagtcagttgcaagcatacatatcccctttcttcctcttctttacccaagaggtcattgtgaatgagtagctcctctttgatccaggatccggttcattaataaatttgttctgcccctttcatgggctagagacacatggaaatgattccagtggtgtgaggagaaaacaagcctttctccttgcactccaccagcgcccttcagcctggagaccccctgatcctgcagaggctgcctcctggctcctcacaggtgaaagctgtcgggaccaggtgggcaccgtcatggcggctatgggtttccattttacactcgggctccttctgtggcctcttcctcctctctgagccagcctgagtggcaggaaggaaaggcttggtgtttctgcagagggtttcacagtttggttctctggaggcttccctgtagcccagccacttttctaggtgggaatgtcctatctatctcctgatgacctgagcacagtcagccgtgtccctagactcagatagctgagccgggaaagacatctgggcccccctggccgtgagatggggtcaggcccagggggattagctgtattttatctgttgccagaggagattccaccaggtagctatgcaggactttcatggggcaaatgagcgaagggagggccacaggcagaacaggggcccaagagcaaagaacagagtgacttggggtggggaagtgggcagcaggtgggctcctcccttctgtctgagggtcggcagccctagccccaggtaagggttttgagatggcttgggggcctttgtttgggtaggtgaccaacggggcacccaggagcagagccctgggggagaggttctgatggtacaaggctgagcggggagaagtccctgcagtctggaaacaatgcccttcccagggcacgaactgcccttgacactgttctaggtgggccctaagggtagggagggttctggaattggagaggcacaggacagagaagagggatttatggtgtgccagacacgtttacaaatgtcgattcactttgattctgagcctcagagcaatgtgtgaggtcgccatgggagaggtccatgccgccctaagatggggaaatggaggctcagggtgcctccctggtgcagcatgtcagattggattgttgagcatctcctgtcccaggcattttgcataagagctgccacgcactcctcaccacagtcccgtgagtgaggttttctccatcatttacaaacagggagactaaggctcagaggctggcacttgccccaggggctccagagtgagcagagccgggagcactgcgttacaggccaccaggcctctaccagccagggatgaacctcagcccggtcctgcctgaaaactggtggggcgcctggaagaagcctgggcaatttgggaatttcagatgaagaaaagctttagtccttaatgatcataaaggtcctttctgttcattttgccctctcccctgggtgtactaagaacatcctttaaaaatttacaatagtggggaaattagagagaacagtggacaattagagccaggactaggaagttggtttggccccaggacgcctctcagcacagaacagcctggaagctgcacacgcctgtgtgggcagaggtgcctgccgggaggcgtgaaggctctaggctaggctcagccccctgctgtgttacatgctgcttccatttcttgccctgattttcttcctctttgtactagttcattttctgttgcttatagcagaatacttgaaactgggtaatttataaagaaatgtatttcttaacagttgtagaggctgcaaagtcccaggtcaaggagctatgtctggcgagggccctcttgctgctggggactctgcagagtgctcaggtggtgctgggcatcacatggcgagggagctgagcgtactcatgtgctagctcaggtgtctcttccttttcttataaagtcaccattttcccacccatgagaacccagtcatccatcaacacattaatccttgaatggattaatccattcatgagggcagagccctcacgacccaatcaccaattaaaggctccagctcccaacactgccacactggggattaagtttcaacgtgagttttggaggagacattcaatccgtagcacccttttttcataggggggctcagggatttcttttggaaatgtagtttggttccatggcctctcaggatcaggtagccctggactcagatcccagctctatcatgtgttagctatgtgaccttcagcacatcacttcacctctttgagcctgagtttcttcctttatggaatgggatgatgcctgctggataagttactccagggattacatgagatgatgtctattatgtgctcagtgcagcccctgctaccatgcactattgtttcctctgagacccgcacctgtctcctcgccaccctcctaccccctgtgctgactccctttccccatagatgacgtgggccagtggtgggaccaggcctgcgcagatgcatactggcccccacagctgggctcagtgcagggtgagaggtgacatttcattgacgttgttgaccttgtttcactgcagcctctgggggaacaggtagggggacagggtgagagaaaagagccgtggtattcactgcactcttgtctgaacgcaaaggccttcttcatggtgcttcagtcccctctgtggtgtagtagaggcttttggtggagccaggggtcctggatttatgtttcggtccagccacgtgctgcgtcagggaggcaccctgagcctccatttccccatctcagggcggcatggacctctcccatggcgacctcacacgttgctctggggctcagaatcaaagtgaaatgacatttgtaaatgtgtctggcactccataaatccctaccgcctgcaaagcaatgatttattataatcacttctgttttaaaagctacagagtcttttatgcagatatttctgttattcctggaagatcaacccagttctaggagccatatacccaagccctggtgtgaaaactcacaaggggctctccttgaatctgtggcattcatcctcaccacccccttgcccaccccagggactgggcagtgcatagacccccttcctggcctccatgcatggtggggccaccatcagagggaggcccaggcaggagctcttcagtctgggggacagtaaggagaggggtgaggccctgcggtctggagtgtggcccacggcattaagaggtggttacatgtttttcttgctttcagcgagtcggaattggcccaagagctgccatctttttctgtctctgttcttggagaatttgagaaggtggttttaaggtctcgtttgcatggcatagagagatggttagcagttggtaggccagctgtttttttctggcatagagagatggttagcagttggtaggccagctctttttttcataactaaagaaaggtagccttgcctttgttagggtggtggtttgagacgcagcacttcagccatctgaggacagtcatcagatgtgggtgagtgacttcatcatgagaccagagcaggtctatttgctagtttggaggacataattcccgcttcagcaggttgttaggcagctcaggtggtataaagggtggataggagatggggcgcttaccacatgtgatgctctgtaaatgagtgctgagcaaaccaattggcagtcagatctatttttgttaaattattaaggtttgaacagaaaatacatctggatctaaaggaattcggattccctaaaaagactagtgaaaatgaggttcaacttgtcttaatatattctatcaggcaaaagaaacaaattccccagggaggggtagtccagctgctgccactcctggagtgagcctgtggacagtctctccagccagaggccaccagaggaacctcgggagggcaggaggctccttctgcagcaccacgtcgtttcttccccaggcttgctttttctgtttggtaattgatagtgtttgggttgccggttgtgggcacagaggcatgttggcaaataatgcgaatataatccctttatcctggagaaaatgcatggcttttaagaaacaatgctaagatctgaaaggcatttctgccttcaggaggtgagcctgtccctgtgggagccccggcagtgagcagctcagcggtgcgcttttagtcgctggcggcacctgccaaggccagggcctagcactacagtgtggaaccatttccagaaatggggcatgatattttcctgtttgcagtgtcacagtttatctcactattatcatatcttgctgtttccagtgaacatgttaatacatacattttgattcgattttctgactagacaagttttctagttaagagttactgctaggtcaaaggctatgaacctttttagggatcttgagatgtttagtcatcacatgggcacgtgactctcgattgtgacgtgggcactgttggaacttggatttccaaggtgatcttccaagggggcacaggacactcagccttcccctgtgaggagggtggggagtgcagggagggtctgggttgggtcaagtccttaaaccttaaacgggaccccagcacattcttgagactttgcaagtcatagggcatgggagctgaactgggtagcaggggtcaaggtgactccagccccctccccaatgctacagctggatctgtgagtcccagtggggcaagggtcttgccatggccaccagggtatccatttccactcctactgcattctgccacttaagaggcccttggcatctttgctttgcttgggagccatggctatgccggccgcctgcacacctgggttggtccctgactgcagcaagatcacagtgaaagcctgcagggacctcagctgagttgaatggcatctcttcccgaagaagccatgtgggggttttccatttctgagcagagtcttctctttgagcattgtttgggatcacacatttatatatctgtgtatatacaaagagagggagaacaggcaccttgccctgtgacttatagttcaggcccttgggatgtggaggaacaagcagacgcggaccccatggaacgatcttggcttcaaatcccacagacctgcttctggtctcaagtttgctgtgttttgccaagttggccgagtgccctgagcagttacttatgctctgagctctggttctctgtgaagtgttgtgactcacccaccttgcagggatgttgggagaatgaaacaagctaacacaaataattccttgccatgtaaccagtgctcacaaatcgagcatttaaaatctccctggtttctttctctgtcttctctctcttcattccctcgaggaactccaggctaggagaggaggtgcctggtgtaggacagcagggccaacacaggggaggcctggggagagcctgcgggggccggagcagcctgatcctgcaggcagagggcatttgggaggaggggagatggctctgaagggaaggggctgggatggtgttgtggaggagggagctctcagttaggttagagggatgggttgagtttaccatctgggcagggacaggtggagagttcagaccttagttagccagccacggtgtggtggtgcatgagaagagggtgagttttgtctgcccctcactatgaccacgtcctgcacctgccttcaggcccactgggagcacgtgtggtgcagggtccacatccagggacacagcccaggaagctcccctcccatcccgcgcagtggaatccaggtctcggacccacccactcctcacccccagccagggctttggggctgccgtgttccctgcgccccaccccccatgacctgggctcccctcaccattcttccagagtcccctccaaggatgaactaaggctgcagctccctagaagcccccatggcctgtgggagtttctatcacacccgtaggccgccatgccgggctgggccctcgttccctggcagactcagtatccccagctttggcctggcctgactgattctttctctgacttggagcaggctcactaattcagttcaaaaaggaaaagtttcttcttgaatttttgaatttgtacatagttttgagacaggctcctgcttatcgctcaggctggaatgcagtggtgcaatcatagctcactgcattcttgacctcctgggctcagcgatcctctcgcttcaaccacatgcagctaatttttgtatttgttatttgtatttgttaatttttgtagagatggggtctccctatgttgcccaggctggtcttgaactcccggcctcaagcgttccttctgctttggcctcccaaagtgctgggagttcaggtgcaagctagcaggcccagcctctaatttcaaagcaactgttttgcaggacagctcacctgctgggccaggcgtgaggtctttaggttgttatttccgagccctgccacagccctgaagcctgaggttctcccatgtagaggaagaacttgagctcagcacagctggtctcccccagcactgcacagctgggagggaacagccccaggttcaaatatgagttccttccaccagaatctcaacctccggctagatcacttcatgaaaggaatatattctcatggtagaagatgagagacaatcagaaaacatagataaaaaaacagcctttccctatccccaaaacaacctctaattcatttttgtgcattcccaagtctttttgctactttccaattctaattttgtccatagggatgatcctactgtatttatacttctgtgtccctttttacgcttgacaaaagtataagcatttcccatgttataaacatgtctcgcacatattgttaagggctgaactatactttatcaaatgaatacaagataatttaatacttgttctattgttgaacatttagattgcttcagaatgtttgctattataaaagttacatgtagtggctttttctagagccttttctgtgttttggggcgattccctcagcgtggattctcagaagttattaatattttatgggatcttggcagagagcaaagctgtcaactttattgtgtgatgatgacagcagttgcgtggctcggactggcaaggagtcagcgctgagccaactggggtctcggcacagcctccgctgcaccctcgtggtgagtcttgacttcagctgatggtcaagtcctgtgaacttgggtttccctcttgtaaagtgaagatacttagtggaggtttgaagaaacccccaggagcccagcagagagcatgttcctcatgttcctcaggcttggagcccagcagagagcatgttcctcaggctcacagaggcgggtgtgatctttgggggctgtgctgtgggtgctgatgccagactacgggcagtgggggaccaccagaatctccctgcttctggggcctgaatcccggagtgagtgtgttcctgctgcagagggtctgatggcaaggcaggaggcagagggcagggctgggccaggagcagggccatgctcacaactggaccccgaatctgcacatcgggctggagctcccgagacccctccgtctcagcccatgaacagtcctggaaagggtgtgctgctcccatcctccaggtgggaagagcaggaggtagggctggacctttctgtgcctgctgcagaaacccagcatgctccctgactgtctattttgaggaccatcttccaggcgtttccatagagacccggtcatggtgactaatggggctaggcatttgccatgcggatttgagtgtcccacgactgtgccaccctccgcctgcctcttccactgctaacactttcctctttatagctctttgtattttctcagatgcatcaatgattggtctgtgctgtctttcatagacatccagtgaatacagattaggttttatccacattatggagtggatattttcagtacacattctccaactaatcaccaagcaaatcccaccgtgagctccagttctgagctgtgatgtgaaggctgcacatgtgggaacgagggcaacaccagcctgggaggcagagcagccacctgatagcttgtgtgcgagacagtcctctgccttatcttggaggagatgtggtgctctcacatttggggagcatggctcaaggtccaaactcttcatgactaggagagtatagcggacagcagatacaaaggcctagaagagtgaggtggggctggacatggttcgtggggacaaatgattgctgttgttggagcctggaaccacagggaagatgggtgggctggtaaggagagggaggtgaggctgggggcctaaggttgcatggaggatgttgattgattgattgatccatccattcattcaataaacatctgttgatcactactctgcaccaggcactgtcctcagtgctggggacccaaaaataaactcaatccctgccttagagccactctctgtcagatgagggctggggttccagatcagtcagcaggttgtttacacagatcctggtatttgctggcctcagagcttgtgcagatgtcccggaagcagaggcgagagacagactagagcctgacccccagctgccgccttcctgggaaggagtcccggtacgcatgaggatgtggctcagaacccatgggcctccccgaggacagaccacctggagcaggctgtggatcccatggtgtctgggtgttgctgcttccatccgaacagcaccttctgccctgagccagctccgttcaggagtctggagcccacggtgccagcagccagagctctgcctggtgcctctgaggctgagctgcgtcctggtgctttctggggctttgcagagagacatgtccctacagcgagaacgtgccctttcatcaaattgtgtaacatggacatcatgtggggagctttgtttatttctaacatgaaattcatgtagaatggctgctacgagttgctgaatacattcagagctcagactgcctggaaaagggagtgagaaagccggctcccactagccggacagtaggacagccgcaccgatggtggcagtgggtgccccaggccaccctggcagctgggcttgcccaccggccctctgcctccttcccaggtagcttagcaacagcaccagcagtggatttttccagcacagcccacatctccaaacatctgctccaggccagtgttagtcagtacttctgaggcctgtggaggagcctccgcccactggggcaggtgaactgggtggttttgttgactctgagggcctggtctgcctgagctgagagccacttcctggagaccacgatggtgaattgggtggttttggtgactctgagagcctggtcggcctgagttgagagccacttcctggggaccatgacggcttgtggcaactggcctgaggcccagcttgcccggcagtgggtgtggggggcgaaggctgtcgcatggcccagttggcatccctgggcatgggttgacaaagaggatcgtttgtttttctttacaaaagtagttaccttctttttgaagggggaaaaaaaatgaaaacaacctatattcagaggaaaagccccagctcctaatcccccatttggagaggcctctgttcacaggcccccggtgttccatctgtggacatggctgctgtgtttcaggcgcagtctcctttctgcgtccctgtggcaaccctggaggaggttgctacgacatccctcatgtggacgggagaaaggaaacctggaatgtggcagccccagggccacctcatcccatctgaacccaggcagcctggatgcagggcctgtccccaccctgcctgctgccttgtctctctcctctccctcctctctcttcttcccccgtcctgtctaccttcactcctcaatcttctatttagctgcagacatctctgtttgaaataccatttgggagcctgcttaattgtgatcttgatccccaaaagaaaaagtgtttgtggagcacctactgcgcctttcaggaaggcgtaacttccagcgtcccctcatctgttcctcccaatgccccagtggggtaagcactgtctgcttttggaagaaaccggtgggtggagaggctttgtgactggtcccatagctgctgtccctgcccccggttatgcgcgtgtgggacttgtctttcccacggcgctcagggcgatcttccacctgtggccatgcttgttgttctcctacctggagaattctcatggctacagagccctgaggatggactcccaagcctggcctttggctcagaaggccccccactgcccacagcgccttcttcatccttgcctcccttccctgggcctgtctatcttccctgtgacctgggctccaggcttcctcagctgcagttgcttgtccctgtgagccatgctccccccaggccttcatacctgctgcctcccataggcttatccagccctttccttctaactcaggttcttgtaggcagcctgccttggcctccctggccccacacgtttgtgcctcgcctgggcccagctgcatttccgcctgcgcgtttccccacccccagcatggtgtctttctccttaaggttgtactgtctgcgggctgtgtcttccgctgctggtgggtgcctgagaatgcagcagcatcctcagcacctgcgggtgctcagtaagggtttgctgactccatcaaagagtgaatgaggccatcctcctcctatcggtccaaggccagatttgagcctaggcgtagatgtcattcttccacatgatttaaatagttccatgttgatgtgcccagatgcactgagacagtcccttattatcgcttattaatgtttcatttttccatttataactctaaggcacgtattcctggcatctgccttacgacagccctggtcagttcccaaggatccattcccagagcagccttactggtgcagcgtgcgtgcctgtggccagcctggccttcagggtggttgactgacccatgctcctgccgagaagaacggcctgactgtgggtcagtctggatcctcggcaaggcagcagccagtttgagaggatgtgcgctccagtcctgggagagggaggtactaaccccagagccagcacagaatgtggcaccatggtggctgggctggtgtttgtttccggaggccagaggtggactaggggttctgatcctagagccagggctacatctttctgagccaggtctctggagaaaactccagtacaaaggacaggaatatggccgagaacagaagccaagtggaacgaattgtcctcccagcccctggctgcttccacctgaagtaactctcactgcaggaggccttcatcacccttgtctgctcctgcatgacaccccctcccatttacttggccatttgtctgtcctcttcccaagactgtgagctccttggaaacagtgactgtgtccaggcagatgagaggaggtgctctgcctggcttcctggatcctcctgagcagggcatggcactgagggagagcaagtgcagggagcagttggcttacccccggcactcactcacagcctgatggaggggtgggggaaggtgctggggagaaagggacagttctgcccaaaccaggatgctgggaagggtccagctgatgcacttgtgagtgttcacttattactgttatccttttatgatgaataatatgatcacctatcagtgatcaatgtgttggcannnnnnnnnnnnnnnnnnnnnnnnnnnnnnnnnnnnnnnnnnnnnnnnnnnnnnnnnnnnnnnnnnnnnnnnnnnnnnnnnnnnnnnnnnnnnnnnnnnnnnnnnnnnnnnnnnnnnnnnnnnnnnnnnnnagaataattttttgttgaatggatataattttgttcattcattaggtgatggacatttgggttgagtgcacttttctgatagtgtgaataatgatattatgaacagtcatgtttaagtttctgtgaggatgcatgttttcatttctattgggtactatcctaggagtggaattgatggatcatatggtaactctatgtttatatagtatgaagaagcagctagattgttatccaaacaggttgccacatatccatctaccagagcacacacccacccatccatccatccacttatccaactgtctacccaccaacccatccaccagcccacccatccatccatccacttatccaaccatttacccatcaacccgtccaccagcccacccatccgtccatccacttatgcaaccgtctacccaccaacccatccaccagcccatccatccgtccatccatccatccatccatccacccacttatccaaccatttacccatcaacccatccaccagcccacccatccgtccatccacttatgcaaccgtctacccaccaacccatccaccagcccatccatccatccatccatccatccatccatccatccacccacttatccaaccatttacccatcaacccatccaccagcctacgcatctatccatccactcatccaaccatttacccaccaacccatctaccagcccgcccatccatccatccatccatccatccactcatccaaccatttacacaccaacccatccactggcccactgatccatccaaccatttactcaccaacccgtctaccagcccactcatccatccatccactcatccaaccatttacccaccagcccatccaccagcccacccatccatccatccatccatccactcatccaaccatttacccaccaacccatctaccagcccactcatccatccatccatccacttatccaaccatttacccaccaacccatctaccagcccactcatttatccacaagcccatccaccagcttatccaccagcctatctacccatccatcaactcattcatctgaccaccatctgtctgctcccactcacccatccattcatccagccacccactaactcattcatctacctacccattgatccattcacccacctatccgctcatcagtccatccacccacctacccacccacatattcgtccattcacccacatattcacccatccagcaaattgctattgaacacctttggtgccagtctgtgctagactcaggggggctgcctctggggtacctcagctcttactcctcctcctctagctgcctgctgctttctttaagagacatctttttttggaagggtaatttctgcagtcgtctattcctgtgggggaatgggacatggggccatgcctttcatcatttgattcagattccaggaaatataaggttctaatagtcctcctcagtgtggcattaggccaactggtgtgctcctagtgccttctggctcgcggggctggggcagaccctccagcaggaaatgagagacacagtataaatgcctgcaggtgctgaggaaagggtgatgtgagtgcagctgtcaggttctgaaaacaagctaaggaaagaagtctgaaatctccatagagtggcaagtagcaggttattaatcctaataagccaagagctaataaaaatggactcaacatagcatgccctatgcctacccaaggtgggcccaggtgtccgggttataacaaaactgagccacagagcgaaggcacctctcagctggcggactctcacttgtaatcagcataactacctttattgagaagcctctactgcagggactttgctggcatttaaattcactcatgtcacacagtcctcacacaacctcatcagatacataaaaccacccttgttttacagagagggaacttgaaaatcataaagctgatttcatgaccaccagcgagtaagtgtgggagcgaagagagacggcccgcctcccagcactgccccactccccacttccaagggaaagcctcagaatatcagtggaaagcctttctcccactgcatggtagcccctgcaagccagtgcactaagtgtttatttgctttatttatgttgcaaagaaaaaatatgcacaaacatacttcagaatttaggaggtaagaaaggatgtacaagtctccttctccttaaccctgatcctctccccatgggctgctgttgtcccatttctggttgtgtctgcagacatagtctgtaaatttcttttccttaatggtgtcctgtgacagctgttctaccatgtttgtttatttttattttttcacttaatggtagatctcgggtatgtttccatctccatcctgtggagctggtgcattcttttgaacctatgcatcagatgcatcctcctttatttactctgtaccttttgatggacgtaggttgtttctaatgttttgctgttataagcatgatggcaacaaatatcctcgtgaaatatgtcattcctcaccagagtgagtcgcactgtatgatattcctttcaaatggagcaatctcttaaaaaatatcttctgtgttggaaccatgctttaaaagacctgcttcatttggattacatttttaaaacattctcccatgttttctcctggtacgttcatggtctcatttgctttaatattcaaaccttttatttatctggaatatactaaggtgagtgcggcatgggtcctccctttgtttttctaaaaagccacctaattggccccaagtcatttaatcaataatctatcttttcccaatcacttttctcatatatttagggaaattgttggactctcttctgtccgtgtacccaggagtgagcaccacccttgtagtcgttctagctttacagtacagtatattttaatatctgctatagatagtcctccctcaatgcctttttgcctttctaaatatctacctgtgggttgcatatttaattcatttaaaatttcctattataaatacagttatttaaggatatgaattttccggtggtccctgtttctactcttttccatgttctagaatttaatgttttaatgtttgatatgttttaggcattctgcaattaatttatatttcacttctgtcccgagagttaaaagatagtttttaaaaaaacttcctatggtaattactttgttttgttttcttcttttgttattgctttctaatataatggtattatcagttcaatactatttttaccacttacaatttaccaagttttctttgtgctaagatttttgtaactatgccatggacatttttaaacaagttatgttccttgttttaagtgtattgagttgaaaatgtatcaattagctctactttattaatgatacggggtagttctttaagatcctttcttatttgatctaccatggggtttgagaggtgaatcacaactaatgctcatgtgggtccattgcaccatgagtgatcttgtattgatgtgacatgtgtgtgtcccatgatacctgcagtgtgaatgctgatggcctgtggcacacagatgctcataactgttgtcctttggctgtcccctttattatttaagatgcccttctctgtctcctttcatgttttttgcccttatttcatccctctttgatattataactacccacccctgccttctttttgtttggctggtatacttttgcctatcatttgaatttaaacctttgagaatcacatttttatgtggttctcttggatgaagcattgagttttgctttctgatccaacttcaaagtctttttaattcataagtgagtttaggccatttatatgcattgctgtggtataaatgtttggtcttggttatgtcatacattctgttggctttttgtgtttgtaatttttctatatacttttgtgatctgctttttcttggttttgttctgtgtgataattttcttcctctttctttttaaactttccttctacatcttctgtctgacctaccactccttccttccaaggtctgagttgcttaatttttctgcacaattgttataatactctgatatttagtcatatcacagatttgtttcttgtttgtctctctaccctcattagaatataagctccatgcaggacggatttgttgtcagtgtattctcagagcttagaactgtccttagagcatctattacatgcgcaataaatatttgatgaagaagttaataatacagactttacaacaatctccagagtaggtagtgttattactacgctttaggggagagaacaaagcgtatgtgaggttgtcattcagtctgcaaagcaaggaccagaacacagttactgtggtttcaaaattcacgtttttcccaatatatttatatttcccaaaatcataatgatgagctagtggcctccatctggatttcaagccttggtctgctgacttccaaccacgtattccactgcagcacgctcctttaagaggaaagaaaggaaataatatcatgcacaaacttgcagaaaagctgcaagtatggtagtaagaattttcttttcctgaacattttatttatttatttatttttgagatggagtctcgctctgttgcccaggctggagtgcagtggcgcaatcttggctcactgcagcctccgcctcctgggttcaggcaattctgcctcagctttccaagtagctgggattacaggtgtccaccaccacacctggctaatttttgtatctctagtagaaacagggtttcaccatgtaggccaggctggtcttgaactcctgacctctggcgatccacctgcctcggcctcccaaagtgctgggattacaggcatgaaccactgctcccagcctgaaccattttagaatatgtggttgatctgatgccccaaacacctccaaattattaatgtgtatttcctacgaacaaggacattctcttgtataaccacaatacagtcatcaaaatcaggaaatgaatattgatatatgatgatctcatgccgagatcccattccagtttttccagctatcccagtagtgtcctttatatttaagatttgggtctcatgcagaatcatttgctgcgttgagctgttatatacatttagtctccttcagcctggaacagttcctccatctttctttgacttccatcaccttgacactttaagatattaccaatcagcgattctgtagaatgttctcacttttggtgtatgtgatgtgtcctcatgattagattcagttttgaacatttttggcaggaatgtcacaaaagtgaggctgagtccttctctttgtgtctatcaggtggcccacaatctctagttgtaccattgccggtgatggttatttcaccatttgattaagatggtgtttgcttccctctactgtaaagctactccttgtctctttgttgttactaagtatcttgcgggaaggtgctttgaaactgtgtggatatccgattcctcatcatggatatccgattcttcatcagacctttaaatgtgcttatttatatttgtatggattcatcattttcaattttattcattgggttaaaattcattgctattattagttatttcgatacccagattatcctgatttgacctctgggtgctccttcaggctgtcttctgtgtctcttgacctgtctgcatcattattctttgagcacacacttattttctggcacaagatattccaggttcatctcaaacataagccctgatatcactcatttctcacaggagtcttgattccctctaatgaaaattgatatttagaggccaggtgcagtggctcatgcctgtaatcccagcattttgggaggccaaggcgggcggatcacttgaggttagagttcaagaccagcctggccaatatggtgaaaccccatctctactaaaaatacaaaaactagccagctgtggtggtgggtgcttataatcccagctactcaggaggcagaggcaagagaatcacttgaccctgagaggtggagattgcagtgatcccacaccaaccaagatccatactttggcagggtggggtgtcattcatattgggatgttgctgttcccaagcattctcagaggatggagctgggaaatagacatatacatatgaatagaaatagacacacacacacacacagcctcaacatctctttctgtctgtccaccttaacagtcactggcccacactgacaccactaatcccaatccaccactgcacagttccttatggtttgtcccttttccttactggtacctcatgtcctcagcatggagaggtcggctttcattatctttactgtaatctgtaacttatcggtcttcctgtatgtaaccaatctgccatctccatcccagcccttcccacactcctaggctctcaacgggtcaccaaggggacccagcccagagatcccacaggttcctgccttcccctctcactcctgctctggcacccaggccaggcctccccactgtgtggatgccctcctaccctggatgggctctggtatctcacacggggtgcatcaaccaaaaataaagttctaaggccccctgaccatctgaatggacttcctcctcagccagggctcttaaaattgaacctgagagacaggttcaggccatcatgggacgtgggggtggaatattcctcattatacctccccagcattaacatcaacacatttaggtctgataaggaacattttgcaacctgttgtctctgaagcccgctagctaaaagcttcatcagcatgataagactttggtctccacaacctcttatgctaacctgacattcctttgatcccaggtctttagccaaactcaaccaattgtcaaccagaaaatgtttacatttacctatagcctggaaggccccccatgtccccacccctttggaattgtcatgcctttttggaccgaaccgatgtatttcttaaatgtatttgattgatgtctcaggcttccctaaaatgtataaaaccaagctgcaccccgaccacctcgggcacatgttctcaggacctcctgagggctgtgtcacgagccatggtcactcatacttggctcagaatcaatctctttaaagattttacagagtttgactctttgggtcaacaggtggctcacacacggggcagctctgctgtgcggataccttcctccccctccctggaccaactgggttctcttgggaccccatggcttcaggctgagttgtttggggagggaaggggtggcctctgaccttaggtccctgccttttcctgtgacattcccttccctgccgtgtctccatagctttccttgccattcactcttactcattcttcccggcctaggtcaacggtggcctggtctcaaacataccttttgctttctcctctctctgctcccatcccaggggtggctctttctcactcccctttgatgatctgtgtctgtttcaccccctctatgaactcacaacacagagtgggtacaaagtaaatgcttgttgaatgagtggtctatagtaagccttcaacaaatacttgttttgtgaatgaatgaatcagagagaaacagtccgtctcctcaaggagtcctcaggcgtgttgaggagaaagtctgtcttctgccagaccagaacgcatggacatgggacctgattccttctgctgtgggagagccacctctgtctatagagatgcctgtggctcttgccctgagagcagccttctgaaatgctttcttcagaccccatggggacagccttagttgtgatgatggcttcttttgctgggcctccttgagtttttcctctgccgccacctaatcacagcaaaatcaagagaatgtagaccgctggcttgaaccggtgctaatgagtgcagatgtgaatcaagcccaggtctctgtgggattcttagttccaaagtttcacgtgagcttccgggcaatgttcagacatggttcctgcggagctcatggcgtcacccttggacctggtgatatttattctcctcatcttaggatgctttcgactgggatgtgtccacatcggtgcaggtgaataactgctggcattaaacacctttgttcccagcagatgagccagtctgggtccaagcgcttttcttttgctgagacttcttcacctctaggatcaggacaatgaccctgggaagggcggtagtgcccacagccctgcagggcttgctggcggtcggcatgctgctgtctgctctacagacgctgtccattgctcccggcaggcctgtggagcaggtatgctactgtcatttacagagatggaagctagggctctgcagtcccctagccaggaagtcacagagtggacgtttgaatcagcatctgcctggtgccatccacaggacgaggcctatgtcacagtgtcccagatgtattccatcccttaaatgagaaaatgaatttcaaaagatatgacgtgctaaaaataagtgatggagatttcagtctttctacagttttccattgtttccttctaagattaaaaacaaatttaacccctggcgccttcatcttgcaggaatttttatatccccgaattttgcagcctttccaaaccctcacattgaaggacggacgtggaaagagaaaacatatgttgttggtagagataagagtaattgaatgggctatttggacgtggatcagctgggacttactgtaccagtgaatggaatctcttgtttttcttggatgcctcatccaaggacagcacaggaaagagtcctgggcgccagctgaataaatggctccttgaactagcctcgggctgcaggagagggaggggggctttgtggtggcctgatggagctgggccagaatgttgggtgcttagcagggcagggaggcattggtcccgctggtgggcggtgctgtccccagcaccttgatgctctctggtcccagtcctggctgggaactgtggggctttctggccatcctgggtgatgtcagctagagcctcagacctgcactctgttttccagcctgcccggtgtgaatgctgctccttgcccgctccatatcccctcccgtgcccctcagtggcagatctatttttagctgcagcttcaagccaaggctgcagacacagccagtggggatgagtggggtgatgttcggggttgtccctgccttccccacgttgacgtgttgagcatctcagcctttctcagaggcgggaacagcgattctggatgggaagtggaggccccttcagggaacgcctgctgagccatgcctggcaaggggcaacagtgctcctgctgggtagtactgcacctcacaccatctgcgagtagaaagggcctcaccccgcaagtcccgggtcccgagcctgacctgttacagtgctcaaggttccacgctctggatttcaccacaggcctggggcagcatccccagcagaggaagcagtgtcctgccaggggaaagaggtgctccccggcagcctggagagcatgtaggggccaggcgcaccccttctttgggccctccgtgcctcctccctgtgctgcagctgggcagcgggcaggtctctgtcctttggccctttccgtctctgcaagtcctgggcttcctggggctcaggcctgctcactgagtcctggggagacagggaccgcgcctgtggggttagtgcatcaggcaccatgctaggacccacctgagcgagagctgagaggggctgcaaagtccgtagccttcctggcttctgccactttgcataaaatgcagccaattcctgtggtgttttctcccggagaagacacgccaaatgagcttttgtcagtagtctgggaactgtctcctgagatgggagcagagcctggcctcagagccctcccctctgtgtaggtgctggagcttcctggcagaggaggggctgtgcatccctgtgcctctgccacatgccaggagatttagagaggctcccaagggccacccaccggatcgaaaggtggcgccacacggagcacacatgtctgtacaatgacctaggctgtgggaaggacacggcacccagggggaatgcagtgccctggtgcatgtggggccggaccagggcgctgtgaccctggggagcccctggcctcaccgtgcttcccctccctttctgtggcttacttaggacttgcccaggacttgctgagtatgcacagagcaggtgcttcatggagagtgagattaagacacttaatgtcccaggaaggaagagaggtctggtagcacacgtaggtcagtttaggccttggtactaagaggtttgggggaaatcactccttctccttgggaatcaacagaggaagtgatccttacaggcgtccccgcctctgggcccctttgaagctgaccttgagcctgatgaggcaacttcaaagacagcccctgacctttcccaggcagctcttgctgacatcctctccccaaggcccaaggctggtgctccgtcactggatggctgggccagcccaacagctggaagaacacggctgagtaacctttgctctctgagacatcagtgttcccagaggacaagccccttctctagaaacaagctcacaagtccccattgatggtggaaaaggcagagacctggtggggcagggcaaacacaggcagcagcccttttgtgaagcaacacaggccaggaagagctgaggccctggggccaagtgccctggcggtgtctcccagcagagccgtttttgctcagtgaccatgaccttacagaacctgtttctgaatctgtaaaatggaccagagtcccaatgtgtatggcttcagagagatgaaatcaggtaatgtacacattgtatctgcctagcaaaggcacctgatggtcttgcattcagacaggcaagtagtgcttcgctgatctgtgtccaaggctctttggagaatggaatgataaaaacacgtggacacaaagtttcatctttcccctttcccagggaggtgaccatttcacccttggtctacctgggaggccccaggctctcggtgaagacccctgcttttgtagggaatggagtgatgcagcactggagcatggcaggcaggggagacagtgcgtcttcacgttttcccatgtggagaccaaggcttggagactcagggggtctgttcaaaaccactcgatttgtgggctccatagcaccccagagcacatcccctctccagtggcctagaatgggcagaaggaaaagtgcagagcatgttaaatataagtgaaccccaagtttcttttcaaagaatcaatacgtcagtatgttcagctctcttattctttgattctccattttaaagtttaacttcctggttctcttcgcccccttgcttctagtttcagtaaacaactttcccaacagtcctagtcagtagttcacatctgttcccctggtcacccaatccatcctgactcatcctggtcacctgctctgacctaagtcacctttagttacctgttcctaagtgtccttcccaccagactactcaccccaccactctggctcataccccggctctctttaaagtagccaatcggaattagcttagactgtgcagtccaaccctagccaataggggaatgacacagcagtaggggctacctgcatcaggaataagaactcgttcccctcccctgtccaggtgtgctctcaccattgttaatctgcaaggagcaccctttctgcagaaagtaaaaattgccttgctgagaaaattacatttatgttcgagtgctatttctttgcggcagcagggaacaagcatttctaacaagcacaaacggaacccagttcttcccgccagcatatgccgcctgacagaaaatatagaagggctgctgtgggaaagtgccagaaagccggtaggcgccagcctgtgagacgcctgctccaccggcagccacagctcccaggctctccaggctgtagtgtttgttgactgtagcctggtaaggagcagctatttccaggtggtgaaggtgagggtgcagagcttacagcctggaggtgtgcagggctgggaggcccctcagcaggaatctgccactgggcccgaggaacctgggagagaggctgccctccatgtgagggcccacggacggcgacaggcattggtctgtgcttagtgagggatttactcggttagcacttgtttgctgaccatagaccatggacccagctctgggccaggaactggggtgcaggagggatgagctggggggaagtgctgaaggaagtgtggaaagagccaggtttgggcttcagacagccttgagctccaggcctggtttgttggattacctgagcatgcatgaggactgtcagagcctctttgagctgggggccggggatcctgtgacacacagcagaggcctagatcctggcattgggggtgactatcccggaaacagccattcattcaccaaatgatcatgcatgtagcacagaattatgatggcagcagaaggtcttgcacaggagtggccagtggctccctgaggttgttcccgacctccaccccttggagccgtgtaacagccccttttggactgggttctgagagcctcagcatgtgtggggtcatacccggctggtcttcagtgggctagctctaccttttgaagatgatgtgggcttttttctagagtgcatgtgcttggttaaggctcactgacagccatgggtggtttgggaggatcatttattcaactgtttattcactccacaaacatctgtccggctactggatgtgctgacactgtgctgatactggagctgcagagataaaagatgacctgttctcacaaagctcacattgcagtgagcaagtgtttgaaccaagagtcgaggtgtgagtcatccccaaagcgtataaagttgtacccattttatgactgtgagttcctttttctgggaatagggtccatagttttcatcatattcccaaggggtctgtggccccagaggggctggacttgttttaattaaagaattagcagagcaggtcccttccctctcctatcgtggttccttcagggtactgcctgctgtcccccaacccaggttgctggccacagagctcccttgacgatggccagaacatactgcagctcttcccaaagacgtgcctctcttcttggcacccaacatcctctgggtgccagggcctggctgaactgttatatgtccccagcttctctctggccgtctggccgcatggggcagatctgacatcaggacccattctgtgtgtgtaggctgagtgtctccggttggggagcagagcagccactggtcattctcttttttggaatggagaaagtgtcatgatgtcatcagggagaagcatgaattttccttctttctgaagctgtgacatgttaccatccagatgcctctgctatttctggaagcgtgaactttattatgcagaaattcagctttgcttagtaagcaatagaagcgctgccttaactaaatgtctctgggggtcattaggacagtgagcggtagtgattgctgcatccaaaaatggaagcgcaggctgggcttggtgatcaggaaaggagccggcctaaaagctcctgggtgctgcgagccaggagtccaggaacggagagacccctcaggtcacacggccacacaggggcacgtggcatcagacgcaggcagctcggtgcacagcggtgactcctcctggactctgactcgggccagaaaccggggggctggaggagtaaccctggagaaacaaaatccctcagcttggcctccacgccactcctagagcatagaggacagggagtgctgaaagggcagcgtctgctgtgggaaaggagggagaacccatgaagacgtgacatctcagagatatctgaaactcggggcccaatttcaccgtgcagaagcagaggagacggcttctagatggagaccgtaggaggagccaagactgagagatgggacttatgcgaggcgtgtttaaagggacaggtttagagcgggtggggagggtgtgcagactgtgccccccccggattcacagtcccggtcgcagtggctacttgtcggctctggcctcggcaaaaccgttggtgctgcttgaaggcacagagcattatcattgagcagttaagttcctgcaggtgccggctgtgttgcaggtgtagacactcatggacgagcagactcttggggagggggcccctcacctgtgtcctgtcccctctagcactgatctcccacccacccagtccccagatctactggggccttcctggctgtcccctatgtatacacacctgacagtggagtgcagagaagatgtgagtcagttgcaaagtcaactaaaaatcttgggaaagatgcatgtttctctagattgataaaaatggcatggaagagctgcatgcggctggagtcccaccctgagccgtggaggagcccggcagaggagctggcctgggtctcagcagctgggcggaggccccggggaggcacggcaagcatcacgcaaagatgcacaaccctccttatgatcgcggaagtcaggtgcaaaggaagcaccccatgctgtgctgtcacacacgtttgtcagaaaagtacaggaaaaagcagccaaaacttgactctttctttgttgttgttgttgtttaaagagttagtccttatggcaaagggaacctgaattttattatgtatgacccctaataaacttgttttcataatgtttttagatttcatttttcaaggcaaagccccagtcacatcttatttgccatgatgctttggtcccacttctgagcaggttccttcgagtagcctttttggaagcagttctcccagatggtgaagcctcctttctcttcctttctactgccagatgtttatccacagtggacaactgggaaggccctgatgttgagctgatggctcgatggttgggagacaagtgctagagatggggacaactgcctcttcggtgacctgtcaataacagctgaaggcagcagggtccctggccaggccacctgggtccattgcaccttttttggggctagttgctctctccacctgctgctggctgtgtgcagctgttggcaggcagcccagggcacccagcctcgtgcttcctggtgagcaagttgctttacaagcagcgggccgcccaggcagggaggaggcagaggtggtcagacggccccatgctcagctcctgactctcagagggcaccatacggagctcctgtggctgctccggctgttgtgaggctgctctgtggccaccatgccttcctcggccagtggcagccgtgagagtgaacgggccttggacttggtgtcagcaggcctggactggggtccacgttgccccatgtgtttattgtgtgaccctcggcttccccagctgtcaagtggagataaaatggggactgtcgccttgggttgctgttgggatgtggggagaatcgcactcagattgtcagcgagcacactggaaatattgctatgcctcgccttgcctccatgggacaggccttcccctgcaaatgttcattagcactctttatcctcaagatacaaaccagactcctgcgtgtgtcctgcgataccaggcccatgagccgccgccagcctctggcctcacctcctggcgctccaccgctccctcctctgctgtgctgatccctgtgcacttgctggaaaccatggactctcacactcccctgccttcacacatgctttccttctgcctggagtgccctgggcacctttctgctctttcacctctgtctgaaccagctccccccgcccagattcccagggcgtcccgactgtcccgttgctccttatcaccctgcttcctctctcagacctcagtgctcccgggagcagaggtgtgtgcccgagtcatctctgtgtccctgtgctcagcagcgtcaggttcacagcagcagcttagagaatacttgaatgaaacatgacagacaacattagaatgaatgggtgggtagatgaatgtttgaatgaatgagcacgttctccttccacctcactggttttgcctgtacttttcctccatcccctccccttccttcaacacttgggtttttttttttttttgcaggtgctggtttttgacatgggaggaaattaacagtgaaagcaagcctgtcctatttacaaagggagttagtgctcacagtgcagctaatgccgttgctcttgagaacattcacaaatccattttgcacgccaccccccgccgctgtccagctgctttgctgttgacctgtgttacccatgagctcaggggaagctgagaggacattgtcccacacctctctcctgctagactcaggctgcagcggggagctggtgggttcgcttcccaaggccaagtctcctggcctcccggtcccagagggggagggcagtagaggaaggggagccgccgcagggctgtctgaggtcttgctttctggggagcagagatggcttcaggaaaaaatccccggagagggttggccttgaccctgaggtggttgcagggagaggtggccaaaggctggaagaggtatgctgaaattcagtccccaacctgcagcccctccagtgcctgtgtgcccctccacccccactccacaggcctctcctccaaatccccacatctgaggggccctggctgagagcacggcacagagggaaagaaactcagtgcactggctcagtctgtgctccgtgtccctggctgtgtgcgttgcctcggtcaccctcccacacagcctgtgaagctggagagcatcatttttattttaatgatgaaggccctgggactcggagttggggaacttgctcaaggtcagactagatagagaagatcaagaatttgaacccaattctatctgtctcaacatgcaaatgctttttaccaggcctcactgccccctagttctgtgggggacccaggtttcctgttactgatgaaataagaggcatatggcttggcccgtgcctcaagcaattgccagtcttatgagctttataaaccacgcatcaagtggcctcttcacaagggcggccctgaggtgctggggtcgagcgggcttgcggcagaagacaggacatgccccacatgccgctcctggacatcctcccaccttggtagggcttttcattagaggttcccagagagaggcgccagggcctgggctgaccgcataagactcccctgaagagcgtaaacaggggacttcccactccctcaccttccagggaatcttatctagaaggtcaggagcggagccgagatgacgcgtcgtgtaagcacttgcacagctgtggtgagctgcctgggaatttctttttatcctctcgggtctccacgtggacctgccatgttgatgatgccgttgtcatttgaaggtattgaatctgaagttcagagaaggaagtgacatggcaaggtacccctgcctgctagggcctggagctgagcgccaggcactgcactgaccctagggctgcgtgggagcagcgtgggattctaaacaggaggtctggaaagcccaggcctgctcacctgattaccgaggaaaacaaatatttagctgctgcctcttcacttcccatacctattttggtttgatagtctagatgcagaatctttgggcctattttatttacttgtcttttgatctgcagcccagctctgggttacaaggagaccaggtaggcccgattggcttccagggatgtttgtggaggaggcagcgtctcccgcctctcagagacatgaacaaataatggtttaatcattgacgcatctgcctcaggagaccgtgccagctttgaatgaagacgattgataggaagggaaggagccagcccatgccaaggctcggtaccccatcagccctcgcttcaagccaggaagggggtagccaggttgggtgattttagggggcatgagcaggccagtgtgcttcccaggcaggtcgtagggaaaccagcgctggcctcagtgcctgtttggcaccctctttcctgagcttatttgagaacctgccactgccaagtcctcagatgctgctgagggtagctgcaagcaaggcttctgtgagatttgaccaggaaagagaaagcagagaggagaggatgagagcagcacctactaggattttacgtgtgcaggcgtgatgccgagtgtagctacggcccctgctactcttaccatctcaccgaggctcagagaggttaagctccttccgtggagccacatagctggaagtggaggaaccagggtttgaatctgggtggctgatgggctgcccttactgaaggcgttctgtgtgctgggtcctgtgctgggtgctccaggtgtcacctccctgaccccagggcacagacacggacaccaagggcctggccagtgcccagcttccgtggctggcaagtggcagagtgaggcctgccccagcgtgggctcctgcctctttcctgtactaaaagcgtcattcatggcagcgtctgtgagctgaggctccagggaaccagccacccctatcgattctgactcaaagaaagtgagatgacttcagttctgatgttccagagtcatgtagggggtggaaaacattccagagtgtggaagaactcgacctcctgaggtttctgaacccagaaagcctcgcaaatccctcccagggtccgataatcagatagagagtgatgagttttctcctgtagaatgttgaaggcaaaaacgtggtcagatgtgttaattttcctggttttattgttttgtttggatgaccctttcagtgagaccatttgccctgaggattaaaacaaaattaaaccataaaattaaataatattttggtataatatagtattatatacgtatggtatacacatgtatgtgataactacacatatgtaggtagtataaaatattaacatatttatttgcaaataattagaaaacccaaaactaaaataagagcccttcgcttcctttgtaaagataccctaccttggctctcaggcccttgtccattgagaggcctctgtcccggctctaccctgggtgctcagagtgagcacatgttgctctcagcagtccactgcccccagcctgcccctggcccagccccttcctgggtccagccatcattggcccaggaggaactgatgcaaaggcctcctgttttttttagagcttaggcctgaatccccaccctgcaggaggtggtggctgaagccctgtttgttcattcattagtccttgcatttattatttccttcctttgttcattcggtcagcaagcatttcttgaacacctgacttgtgctaggtgcaggtgattcaggatgaacagagttctgtccctttcttcccagtcccttccacctgtggggcagagtctctttggtgaataagatgggggagtcataggtaccatgggcgcggggatacagtttctggctctttcctaaaaaggagaagagatttggaaaatgcctctgatcgcttggcctcccctcctccttttctcatgaggacccacactgcaaatgggaaactggttgtcgtgtctcccgaagggcaagcatcctgcacattgctcctgccaccgccatgtgctacaggagccgagcttgggaaggctggccagaaccatctggaacagggaaggcctgggggccagaggcctttacagaattcagcatggagcgtccccatgctgacaagacaggagtggtttaatgccaggtgttggcgtcaccacggaacacttcatgggaagcctagactcacgggaaagaagatacaaagaacctttgcgaatgacgaacagcagcgtatggcttggtcagcggctgacccagatgatcagacagggggcaggccagaactcaagatgccagtttgctctgcctacctccaagagactatgtttgcagtttcctctccccaggggctgcccatattttgaaagatgatatcccatcctcttgaataaaggatcatgaacttaccttttcatgtcatcaatcagaaacacacatctgccaaccagagctcccagccagcccaaggtagctggtgtaacctcatagaacagagaccatgccagcccagagggagaaaatggaatattttctttggtttgtgctgcccgatggaagataaacacatgatttccaactgattgtctgaaatattgagaatcattaccattaacaccattagtgcctttgggagcccaggtagaaatcatcagtctgactgttctctgtcattttatacatttggaaactgcccacaagaaggaagttcatcagtggcagaaccaggaccagggaggagaacagatattgtcagagcacgcactgtgtatctggcactcggtgaggagcctcctgtccagtggggaaggcgggcatcaacccatgaattcatgatccggtaccagaaataacatgggcgcacactagtgttctggagtgtgaaggagggagaggttagatctcagagactgtattagtccattttcatgctgctgataaagacatacctgagactgggcatgtctttaaaaagaaagaggtttaattggactcacagttccacgtggttggggaggcctcacaattgtggtggaaggcaaggaggagcaagtctcatcatctgtggaaggcagcaggcaaagaaagagcttatgtaggaaagctccttataatcatcagatctcatgagacgtactcactatcacgagaacagcgcaggaaagacctgcccccatgattcaattacctcccacggggactctcccacagcacatgggaattcaagatgagatttgggtggggacacagccaaaccatatcagagacgtccttcattcccctggcagaccctccaggagcatctgtgggatgcacagccagtccgttcaccaaatccagtgtccttctccacctgcccctcacagagcccacccagatccttcggggagactgtgcgtgactgaatgactttggagatctcctgctggtgccagctcaggcttctctataatgttaacagcaagtactgtatgcagccatgcatatgttccaaagatcatcaaatgtaaacatttgccgtgagtccgcgggacctttccccttcccgactcatttcccttttgaacgttgggttcggttttccggcactctccaggattcccaggctgtgttctcgtgttagtgctatcccacttgctctgcttcctctggagaccagagttcagggacctgctctgatggatgatttgaccgttcatccccgtttgaaataggtaccaggtggaaagcaggcccggtcccatgccttccgggatgcaccaccgtctaaccaccatcctgttgtcactcgcatacagctcccggagtcaagatggaggagcagttggtgacatctgtggtcagcatctatcttttgagttgctgtgggtctgagctcctgaattccagttgaaagtagcatggtgacacggggagagtgtgtgttctggaaggacattgacttaggtttgaatccggtcaagttcaagaaagtatgctgttccctgaccctgatatactgctctcctcggctcccattgtacgttgttcatacctctctgcagtggttcatatcgctgtctgatcacattgttatacagaagttcctctattcactgacaggttaggctctgacagtaacagtgtgtaaggaacccatgacatcatctgctgcttgggagctgagctgatgtgcattttctccattactgatgcttgtgaaagttcctaaggtgaaaatctgtggatggagagcttctgcagttttctttttacacgatgatctcttttagacagagttcttttgagcatggaggatatcttactcatcttgatcctgccatatcaggaatgcttcttggtgtgtggtaggacttcattaagtgatttttgggaaggtggatgggggctgagtatatgggaagatgagttgatagctagatgggtcaatggtcagatgggtcagtgtataattgggtgaagggatgaagactggattagtagacaattggatggtgaaaggataaatgggtggaccactgatgagtgggtagatggccatatgcatttgtagatggatggatgaatgacttgattgttcaactcattgacacagaaaaaagttttccttctgtgacttatatccctacaaatggctaattatatggcccagtggttttcagatgcattggcatgtatattagcattttgctcttcctttaacaattatgatgacttctgattacagtgttgtcacaggtagctcagtttctccccaggacaaggcaatgctgggattgcaatggcaagagagccaccaagagctcctgccccatgaggggcactggtgctttgggctatctggaaagaacactgaactctgcgagtcaggagccctgggttctagtgttggctctgcccctgcttatcatgagaaccagccatctgcagggtaagcattaattgatgtcatgcacataaaataattaccactgtgatcagcccatggtagacattcaaaaattctagttactacttcattcttctgagcctcttctcagtccctcatacccatttgtcatatgtatgaggtgagaaaacagatatcagagcaatttcataatggtctagtccccaggggagcactgagaaggggctcagagttctaagcaattggacagagatgcagggttgggctcaagtgttcctgggagctgatgcgggaaccgagaagcagagcagagagcccctgggaggtctggtcactggtggacaaggaggataagagctttcaggccctcagaccattccaggccctctcctggacaggagccacctcagggcctccttcaggtcggaaacactggttctgagccagggcgaagtgaggtatgctggcagagctggctctctgggcagacagactccactgtgaagaagtggcttcacctcctgaccatctcatcctctgtaaaatgaggacattaatatcttagaactcaagaattcagtgaggcagagggcagagagcactgagcacacttcctagtgtggacacgctcagaaaacgttcacactcatgatggtgttaccacaacagtgtccacacaccatatggcgcattattgaatattacacgaagtactctgatctataacctggaacatgtgatctgtttaatattgtaatgtaatacatttacattataaaagtatagttattccataatttccttaagacattcttgtggctagaataaggtacataatgaaaatgcagaaccagaaggagaggagagggagcagctacacctgttctggtttctgttctggtatctggcacacagcggactttcccagagtcatggccttggccgctgctggcccctgagtagaacacagggacagccccagtggcaaatgattggagatgcttggtgtcaacagggaacctctcctggtgtcaagagagcagtgtcttaatggcccaacccacatcacccacctcccatttgctctgtttctggctgtggccctctaagtgggcttttggagttctcgggagatcttttctccaggtatcctagacgaaggctcaatgcaatttgggaatggctttgcctgagaaatggctggtgatttgtcatccagagtccaaggggacactgagcactctcgtttgacttgggggccagttggcaccttgagtaactctcaggcagaatcagggggccgggaagtcacccacattgagtgttctgaattgaccaggcaaaagcttttcaagatgattccatccaactttggatgtctgcaaaacactgcattctgagcaaatctgtctctagcctcatatggcacggtcaggctagacagcacacctgctgaggggcttcagtatgtgaagcagcagcatctagagttggcgaagcaaacgctgagccaagggaaggctgcctacggggaagagaaagacaacaagggcttgttgggaacatgggcacacaccactcctgagtctttctttttaaacactgtaattcatctaagtatataggcttctatttcgggagctgggagatatatatacccacacatgcatatttatatggggagagctgtatctatacatttgtatgtctatatatagaaggtgatccaacttgagctatatgcacacacatagattttggatatatatatgtgtgtgtgtgtgtatatatatatatatctcacatatatgtttattccatatctcatgtcctggtttcctaataaacactggaagttttcctctctgggttgtgtattgcaggcaatcaatctatcaccgtgtgatatgccactctagactggatatctgtgtgcatgtgtgcatgtctctcatgcatgtgtgtatttcgtctattttctgtcatctttagaggcaacatgggcttcagttaatagtattttatctgcagtgtttgcagggaagcttgcagaggagtgagcaaagtgcccctcgcgtgtgatgcacacttggtgctcaggaggcggcggctggctggacaggggacatttgtcttcagtcatgcagtcctgtctagacctaggctgtcatctgcctgtccctccatacctgcttcccttctccctacaatgcttatggaaaaagccctttagatggtgtgatttgtccaaggaaagaggctatggagctcctgggacaggccctgcgtgaggggctaggggccttgttccagttccggcagaccaagtccaggccccacgtgccccagggctgctgctgacacagggcacaggcagaggcggcagggagcggaggctttggtggtggtgagctttttgccttggagggtctttaagcttctgttgccttcaccagctgtcagggaggcaggtgctcacacccatccccaggccgggccgtcaggaaggcaggtgcttgtgcccatccgcaggctgggccgccggagaggcaggtgctcgtgcccatctgcaggctgggccaccaggggggcaggtgctcatgcccatccacaggccgggccgtcgggaaggcaggtgctcatgcccatccccaggccaggccatcgggaaggcaggtgctcgtgcccatccgcaggctgggtcgcctgggaggcaggtgctcgtgcccatctgcaggccacgccgccaggggacaggtgctcgtgcccatccccaggccgggcctccagggaggcaggtgctcgtgcccatccccagacccggccgaggcgggactgttgcagggtttcctcattggtctgcaagtgtggtgtgcatttgggtgaggagtgggatgaactggctccggaaccccctgtgcttgcacgtgtctttccttctgactgaattaattgcattgattccatccctcagccaggatggaaattggttccatttgtttttcacctcacagttccgggggtgtgtggatggaagagtgtttcccccgctcagaaaacctctattggttttgctgtctcccatcagccagcattcagctctgctggcaaaagcccttagttttagaaggctgctgcatttgctccccaggaaccctctgatctgcttcttatggtcttgcgccttcttccttccctgttgtcagagctttgtcctgctgcgcacccacagttgctgcatctggggaccctgcagggcagggatggctgcaagcccagatctcggcacacagtcatctcttaataagtcatcactgaatgcatgattgaaggaatgaatagtgtgattgactggaccagatagcttcaagagcttgttaatggatttagataatcaatttgcatgatcaaaaaaatggattgatttgctgtggtcttgaatgcacagcctgcctgtacagttagcctactacctgcgcctgctcaccctgggcctcctccacagacagcatggtgggtggcctgctgggcacagccccagcacagcagggactggatgagggaggatgggaatgggcctcctccatgcccaactccgggatggcctcgcgtctgtcagagttttgaatgtatcagtcagcttccaatgcggctagcatcgtgtttgctgatgctgattgactagagctcagcaaaagagttgccttttctttcagagaccattaaaattatatgtgtgtgggggtgaatttctttaggagttgtttgtaaatatccatcttcatttttcttcttattcctgagataatgtattcactgcctccccttgatttaggataattcacctcgtcctgccagaggcagtcagttcggagagatgagtctgcgtttcacaggctggtgccaactggtggggcctggtcgtgggccatggataggaaaacagcagccaagccagacaagtgttatcctgatccccaccctcccgcagtgctgcctgctgcggggggtggggggtggaactaagagctcagttcaatctgggattgatgattgatcatcgggttcagtggggagccatgagcgcaggccggcatctgttcttgctgggactgttcacacagcctctaccgcttccggcaccaagccgagctgtctgaccatgcctcctctccctgcagcctgtagcggtgtttcttcacagaatgaagttcaaggcccatcgtggccaggccggcccccttggccttggcctcagcttgcggcacccacctcttcctccatgtttccctttggagcttcccagtccccacatcctctgaagccttccctggtgctctggtccttcctgctccctcttcagagtgtctcctccaccgctctgacccatgggctggctttccggtctcatctgccagcctggaaaccctttgacaacaaggatcctgcctggccccaaaggccacagcttgtctgttagggtctacttggctgcaagtagcagaaacccccgagtaatagtggcttcagtaaagctcacaggtctccgtcacattaaaatcgagaggcagacaggccaaagctgatgtgacctaccagtgccaggcacctgcactgtacctctgccgttgccctggggcacagcctggagtcaggacagctgctcccacactgcggggagcatggaggaaaggaggaaggcactccctccccggtgtaaggagacctcctggaatttgcacaaaccctctcccttcatcccttggccagacttagtcatagtgccatacccaattgcaagggaagcctggaagtacgggctccattaatatgcccagctaaatattggggttccattcttttggagggagaaagtggatattaggaagctattagccatctggcactccagtgcgttttaatgtcgtacgcttttatggaacccgtatatgtttataaaggcctgggccaggaatgcagtggagcacaggcgagagtttgtgcctctattgactgccagcctgggccaccactgtaccccatgcagctcctttccccctccccataccctacaatgcttggtggcattagcctcattcctgagacccagaaaaagtaatttttccaagtcatacaaccatataaccagtaaatggtaaaccaagggtcaaacctagtatctccttaaaggcgacatcatccttagctacctcaaattggagaaactcagctccgtgttgcttgagtgctgggacacacaagaaaccacgatgaatccgggcagggctggagagggggcggatgggaaggtgtggaggatgtggtactgatggcccagtgggacaccaagctgctgacacgggatgtgccaggcctggggacggggtgatgaactgggagcatgggggtggctgaggccttcaggccaagcctggccagcaggttgccgcagccagctgggggccccgggcaaaggcatcgcatttgtaagcaacttggaccttctgagaaagcaggagaaaggccttgcttagctggtgaatgaggtggcccttccttccacaaaatgaaaaacaattctattttccccagactgtcccaaagcttattccagtccccactcccaccagcagtccatgccagcagagctcctccccgctctcctgctcttacctgcctctcttccaccttttctcttccttaatttaaggtgtaaaatttagagtctgtggtttgtgtccagacaggaccagcccagccatagagcagtcctcacccactgcccgccctgcacagggctgtgcatactctcctttctggaaaattaacggcccctccgttgttcacagaaagagcagggaaggaacgtcttgacgaaatagaaaagcctcatccttctctctcatcctgtgacatgtttagagcccaattatttcatgtggggaggacaaagcagggggccaccctggtttgacccccttctcctgccaggcactctgccaagaaatggacatgaccttcacaacagccgggtgtggtctcaggttgccctgtttcacataggaaggtgaagctggggaggcgctgtaccagcagggcagggacagagttgggagtctacagctgtccttgaatttgtcctcctagcgatgaggaggtttccttgatgaaagccactctatgactctggcgggtgagcatagtcacctgctcgcctgcagatgggtctctgggaagccgctgaagcctggagaagtccacagcccatgccttctggagacccagagctgagtggggaggacaggacgagatatgccacactcaggttgccaaggaatagctagagagcactgtatggggagtgagggcccagcgctggagtccgcagctcatcagctgcagcagtggctggaggctgctctggtgaatcagcgtgcacatggtggcttaaagcaacacagatttattctcatgcagtgccagagggcagagtcagaagtggggctcctgggctaaaattgaggtgtcacggggctcattccttctggaggcccttgaggaggatccattccttgccttttctggtttccagaggccacctgctctccttggctcccggccccttccaccaaagccagcagtggctggtccagcctttctcttgatgccccctccctggttctgacgtttctacctctctctttcacttttaaggaccctggtgattacgtggggctcacctggataattcaggatgagcttcctgtctccaagtgagcttaattcccctttggccgtggaagaacaccagtccaccggttccgtgggtcaggatctttgggagggatcgttctgcctatcacacctgctatgaatgacagaaattcagaggagtccaagttcacttgatgcacaagtgggcatttcaaggcttctcccttgtggttctgcaggcacctggaagtcccagagagcagtgagccagtgaccagccccggggccgagtctcagccctgccgccctcctgctggctctgggaattcacttttctgagcctcagtttatctgtgcataaaacgaggccagtggtctctgccttgtttacctcacatgactgtttattcagcagatgcccaaatgcctacagcatgccacgtgttcttccacttagccctatgtgtcgagtgcccaccatatgccaggcatggtattgcacataaggtataaaccaacaaacaagacagcccagtccccgcccttcagctgcctctatctggaccaccaggcctggggctgggcagtggctggggcaggccaggttggctggaagcatctggcaaggtatgcccagcctgccacgtactgttccttcacctgcccggacctcagcttcctcatctgtgcgatgaaaatctgcttaagattagaggggtgacatgaaatgaaacccggttgtaggacctggcagtgcagctgctacattagtgactgtaagtgcagaactcggaggacccaccagctgaccaggatgccctcccagaagcacaatggccagcaccctgagcccgtctatgggcaggacagcaaacagcaggacagggcggtggagggacacttctctgtgccacaggcccgccccctccccaccccctgccagcccctcctccatgggagtccagccttctcaggcgggggccatgctgtgatcatggccccgggcacgaaggcgagagcggatgttgattcaatttacaaatgtgatgaatcgcctgccgactgtgtttatttgtcagggctgctgtgaagctggtgtcagtgggggatgtctgtgcgatcgaagccagtatctgctttgacaagagttagaagtagggtttgttttttcccttagaaactcttgctgttcactttgaatgtggagtgcggaggcctggctggaagccttctcctcaggacaaagagctggacagcagtggaaattctagagcaagtttccacaggtgggaagctctgggcctagactgtttaaaaagcaggtggaggaggagaaaaatccccaaggccagcagcagcaacatttcaagaggcagtgaaattaactctccctgcagctgtcaaaagagaggctgcaaattggccaggttgatgccaggacagtgttttaaaagcacagctctgaccagtggccaaaagtccagtgcagagttcctagtttctaatgcaagggcctcatggaccggcctctgctgagttctctttcctcatttcaaagcccctttcagctggactcacactgctgtgttttccaaagcggtctgggctctcccatgtccccggtcttcacttgctcagtcctctccaccccaggtccccagcttccctcctgccctgtctagtaaacctggacattgtcctgtggcttgtctttcagaagttccctgtgttgtgcaggcagctggggctgctccccagtgggtggtggcttcgtcctggaactctgtcacttggccttggggtgctttagggggctgggtcccccaccagccagtgagctcctcgtgagtgggcagggcccagcatgggggtgcctcccatcggctccctactgtgagcactgtgggttctgcgaattctgcctgcaccaggagctcctgcatccatgaggtgcctgtgaccacaccagggacagaggaggctgtcagcagcaccaccctccctacctggccagccttgccctgggatggattggccagagcctgcactcggcaggtgtgttgaccatgagcacagtcatttccgtgctgcctgacttcaggggtcagctgcttctgccagacaagcaggcacgctgggggagacagggaagaaacagcgcagcagtgaggcccgccggcccccaccagcaggctcctgtgcccccatgtgctaggcagagcaagcaagagcccccaagatgtccacaacccaaccccagaacctgcaaatatggtaccttacatggcaaaaggcaattagggttgcaggtgcaggtagttactaagcagctgaccttcaagcccagggtaatcacgaaggtcctttcagaggagaagagggaggcagaagaggagggcggagtgatgcgatgtgagaaggaccacaagaaggagccgggggcgaggggatgtgggaaatccctcagcaggaaaaggcaagcgaggggtagatgtttccctggagcttccaggaggaatgcggtcctgccagcatcctgattttaaccaggcgaggccgctttcatacttctagctctagaatttcaagacagtgaatttgtcttgcttcaaaccacagcaataggaaactaacatatccctttgtacctcccagacccgaggcatcagatcctacccttccaagcaccctagaagggctggctacaggaatgtcagagtgaggcagccatagaaagtagcagaaaactctgttcatgggcacaagggaaggacaagcctaccagaggcagccaggccttggtgagcgaccctgggctgtgggcggggcaggctggatgtgcctgttgattgacacatccgagaatgggcaaggccagtaaagactgtgagagtgtggactgtgccactgcattgctgagaaacctcccacgcgtggaaaccgccaccctcctggcccgactgtccagtgcagaatccccgttggtgtgttgaaggcccactagggtttagggtcaggctgcgtttctggtctgttctccaggaacacgctaccctcgccgacctccaatttgagtcgtgcagtttcctcatcaacgtccaccgctgctaagttagttcctttgcctccttccaggccccgttcacatggtgcctttgccatgaagatttaagcatttgagtctcaatggaatcaactcacattccccgaatccaggatcactcctgatccataggagattagaatcaattctactggaaccagtgaaaaatgaatgagtgaggggacatgaaagcggcagaagtttccccgctcctcagctgttcctcagcatctgagaggagtggccattgcaagccacctccctgcaggggaggccagggccgccgcagccacagtgtcacagcagagccctctctgaggagaggcgtggcagtaataaggtctgctttgtgtggttcacatctcctgggcctgctctgccaggccgtgggatggactgcacagtccaggggaatttagtacagactctctggtggtgcccagactggccgaacatttcatttactgtgcttttggtggaaaataactaccctctgtggctctcactacagaaataaagtcattgttaatagccagggtttctttggaacacagtctcagaaagtgaagtctgttggctacaacgtagaaaactgccgtgaaagcaggcatccggaagggagaggccatttgtttgtgtcgctgtcccagtgcctggcaccggctggcactttctgtctccggaataggccatgcccactctccctttggatggtccgtttgctcaccctggaacattctttgaacttggaggcagcacccagcagagctggaggcagcggcatttcagctgtgacctgaaggatgagtaggcgcccctaggaaacaagcagtgggaagaaggaatgcgccatgagcatccgctttcggggagcagttactgtgggttccgaacatgactaatgaggagggatcagtctcctctctgctgagtcccttcacagaggccaaaatcattgaccctactgtctactcccctgagaacctttcttgagcccgccatttcttccccactgtccgcatccccgcagagacggcctgtcagcccctcactacctggtggcctgtctgtcccctcccacagcatggacttggcttgtcgaaagccatccctgccctggggctgcataggacccctccacctggatcccgttctgctgcattcactgcccagcccccggtgtctcattccagagtggtctccatgatggcatgtccatgatgctcacatcccctgagaatgtccctggtgctgagcatagtgtctagcgtggcaggtgctcagcatttgctgaatgtgtgaagtagcgagtgcctgggcccaggcctgtgccacgtcccggacaagcacagtgctaggcccagcagtcagacctgggagggttatctggccaaagatgcaccctgagggagaggcaggggctgagccaccctaggataccgtctggcgttattcaggagatgcatcttctaaatagggccttcccttgtgaaaagggagaattccacccctcccagcgtggccatgtggattttgccccctggtgtgtccctcttgctgcacatcagctgacctggatcctcagctacactcctggtaacatccaggtgaggccctgggcctctccacagcagggctggacgggagagcagcaggaggaagaaaaccgatgtataagttcctaggcaagccctggacatcaggcctcatttagagagcctgtctgtcagaggcagccagaaaaatacctttgatgcggtcaagagtgttccatgaggctgctcctcctcctcccagaggctggcaggcctcctcggtaaccttgccacccacccgtcatcacagcagcagcctcttcctggagaggcctggccctgaaggaaagtggactaactctgcggccaaggagacccgccagggtggttcagaggctcccacattctcttccttggggggctccgagcagcccatgaaaatggcccacaccagaaagggcccttccatggcccaggctcactccccgctcagtcctggtgccaccccacatgccccagaggtcatggcctaagttattcatgtttgcttgttcgtgtttcgggttctgatggtaagcatgacagatgtgactcctgtgcccccagagcttgcagtccagcagggaagaaaagccataaggatgtcacacttcagcgatgtgtgccaagtgggagaacaggtaaaggcaggtgcgtgtgcccagcacagggggcaggggaagcctcctggaggaggagatgtttcagctgagacctgcaggatgaggaagagctatccagtcacaagaagaggcaagtcacggatggagagcggtgcatccaggggtttggggctgtggctgtggggaactgggagaattccacaaagagagagaagagtcctggtgtggaggcctgtgggtgcagcgagccctttagactctgtcctggaagcaggggcgtcgaaggctttgggtggtgtgatcagatgtgcagtgtggaaggagcctgcagcctgggccagaagaggggacaacatggttagagatgggcgagctgtgagaagacagtgtagccaccgggccaggagctcctgctggcctgaactgccatgccagccctgtggacagacagacatgggccgactggatggactctggaaggagaatctcggtggcaagtgagaagcggggagcacagaggagggccgaggggctcctggcatctgggttgggtgcctggaaggacgagagaccaggggtgtggggaaatggcaggggacagccacgtgggtgtgccaaagatgtgcgtggacagagctaggactcagcagctcagaaacgccttgggctggagacaggcctgccttcagggggccagtcccactccatgggtctctgcgaggccacccagtgagagcagaccgaggcagtgcaggcaaggccctccctgggcacgtgagccttcagggggctggtgggggagcgtgttgttgagttcctgccatggcaagaagtacccctcagagttcctctttggtcccatccagttgctagctttgccttggacagatggctatgggaggacaggggcctttttgaagtgccgttgggggctgtggtgggctgtcaggtgggagccggaagaccctgccccgtggcagctgtgcactgggggtggtgcctctggttaccgtgctgcctcgacagggtgtcacagagtgaagcacgtcccccagctggcgtgaacagcggcagcaggagggctcttgcatgtgtgtcacggtgatggtaagaaccgtagtccagcctttctaggctttgcagatgtattatcttgagctttgaagtttaccgagggtttctctgttcacttcctggtttgttccctgaactaacaccaccggtgcatagactattaaaacctaactgtcacctgtacaggtcctgttccttgttccaggtctcacaagcaagcaggacttgaacccagatcgctaggtccccaagtcctccttgtcatttccttttttaacaacaacaacgacaaacccacagagacagaaggagccgttcacatcaagcctttctgacctccctggaggtgatggggtaccatcgtatctcattgtttctggcaatgatggcaaacatcgagggtttataaagatcctattttttagcttacagaatgaagtatctccaattagaagcatcctcctgaaagagcactgtttcttcccatgactaattgcatgcatgctgagattttgtggagccttggtgtctgctcctgggaattccacagaatgtcccaaatgactctcgggaagccacgcccatctctcttcagttctttttggacttgggatgaatcgtgtgagttttcagtctccctcagttgccccgtgtggcggcagcatctgcattgctgcaggggagcagttgggcttcatgcaggcctgggctgggccctacctccctcccgaaccttgagcttgctcatggaagctctttctcctccaggtccccccagcggcttcccatgcacttgcccctggggagaattgcaggaaacacacacatcgagtgccgggcgcagggtcagaaccaggatcggtcccgctccggggtctgagatggagagctggttcttctttcagaactgcttccctttactggggtgtggtggctcacgcctgtaacccagcactttgggaggccaaggtgggtggatcacctgaggtcaggaattcgagaccagcttggccaacgtgatgaaaccccgtctctactaaaaatataaaaattagccaggtgtggcggtgggtgcctgtaattccagctactcaggaggctgaggagggagaatcacctgaacctgggaagtggaggctgcgctgcgctgaaatggtaccactgcgctccagcctgggcgacggagtgagactctgtctcaaaaaaaataaataaataaataaatgcttccctttgtgctacacccagctttccttggtggaaaatagcatttatgatagatagatgggtaggtagatatagatatatataacctgtccaaacagctggcaagctcaggccacatcctccactgctgattggggtggtgattcttgcactctctgccgtcctcggagcctcatcctttttgtaacggattctgtgggctttctagggaagctttttttttttttgttttttaatcttcagctttccctctcatgtcttggcaaagcagtgaggcctggagtctcttcatttcactctgacagctcttatcaatctccgccttaattaaagaaagcagatttggcagcagtgtctcttgtctgctgtcctttgggacttgatcgctttacagcagcagcactgattggcctttcttgctgctttccccactgtccccaggtttattagtgaggatgtctcgtggatacaaaaatagatacctagatgaatagatattagacatccatccgtgcatccacgcacagcacgggcgaacgtgcgcgccatcacagtgacacaatggggcgcaggagggaaggctggacggcggcgaggatgcttgctgcagagtcgcagagcagcggagccccggaggacctgccaggttccttggctcagtgacttcagaaatttattaatcaaaggcaatgtgtgcacaacgcagtatgtaaaacacataaaaagcatctctgttctgctcgaagtgggtgaggaggtcagaggagctggtcagatgggggaggatttgagggtgctttcacccctattgcctccaactcccctatttaaaaaccagtgctctagtccaaggctccaagaggagaggtgattcacccaaggtcgcattcattaacagcgaaaacccagtcaacagaaacctgccaacgagtctgatgcccactccatggggggcactttcacctttgaaatcttcacctttggcatctgggcttccctgtccaggcgagtcagcaccggcatgaaataaatcctcaacaggtgggatagaaatcgcctatttaatgactgccacggggtggtggggaaaacattggactcagaacctgggagagctggctcccagcaacagccccgctactggggcaaatgacttgttttctgagctgcggtttacatcctgaaatgcgcctgatgatgacagtgcctgtatctctcgggtgtgagatccctctcgtgaacttggacatggcaaggagggatggaaataccaagagctttgcagcctgccaggcaggactccaagttcaggctactctgcctgtactcctggtagaccatggataagccacactctctggcttcaactccctcagctgtgagatggggcgacaacgtccccactagtgcactggtcctgaggactcagcgtcatggagggcggcttccctgccattcgccagacgccacgttccgcctgcctgctggcggtggaggggtcccccgtgccttgcagctgtgcccgccccccttcctcagaaagccagctctgtctctcagttgtgcatgtcacgtggtgaacacacacgtcattgtcctaggtcattaggaatgtcagactcactgctcccgacacagccctctatggtccgtggagccttccctggatctccatttgcagctatggagttgcgtcaggtttctgctgccagctggtgtaggcaccatcatgcaagaatacctaaccttgactgacgttcttgcctggccaagcctagcaggtggcactaaccacaccaccagcaagcagagtcccttgtgactcagctcccactgtgacaggctctggtgggcgctgggtacacagaacctcacctcagtcttacaacaactctatgcaccggagtttctcaccctgcttcgttccagaggcccacacagggctccatgacttgcccagtgtcacatggttaccaaagccacgtggctggtaggggttgggtagcgatttgcacacaggtcatgccacaggaaagcctgcgtttcctccaccgccaaggcacctcctcaccaggggctctcatgtttctgatccctcctgactttcagtagccatacccaggaataacaccagggtggccctgcctcccctcccccacactcaagttcattcccggcccctcctgctcctgaagcggaaggaagctgaaatcagtcagtccaatgacgggcacacctctcagctctcctcatgagaaagtccacactgcacattagcagcggcccttctttggtggccgcagctgcttctggaaatgcctctttcctgcctgttctgctgggaaggccacgtctgggaaggggcagcacagtgccctgcctgtgaaccacccgtcaaggcctgcgtttagggcaagcctccgcttcgagtaaggaaatgacttctttaatctgcggggcatttgccctgccaacctctgaagtcagccaggtgccgtggccggattcttcgtgaccagctccttccattgccagagcagaagaagctgggtcatcagccagagagggtgggcctgtgtgggaaaggcaggacacaggcagcagcctgcctgggaacactgctggcccagcaggtaggagggacattctctggagaaactgaagcagaattgctgccccttttagcagaatcttaaagctaaggaaggggaagtcggctgggggaagggggctataggttttatgaaggttctctgctccaggatcacaaggctaaaatcagggtgttttgtcagactgggttctcatcagggaatggagaaaaatctacttctaagcttgttcttattgttggcagaattcaggtccttgtggctgtaggaccgaggccccagcttcctgctgatgtccgctggagactgctgtcagctcccagaggccacccccattcctggacacgtggcccctccatctcaaacctgcagtggggtgttgaacccttctcatgcttctcatctctgacttccccttctgagatcagctggaaaaatttctctgcctttaaagagctcagcctgttagattaggcccactcaaggaatctcccttttagcagagaatgccgtaatcatggaagccataacattcccaagttcccacaccctcatggggaggacgctatccaagggcgagggtctccgggggtcatcttggagctccccacaggaagggacacgtcatccaccttggaggtcaaggctgcttcctgcaggaggctcttctgggcaggctcatgaggcggaagagaagtcagccaggcttagagccccacaagcagagggaaggcctctgtgctcactctggcggacctttatttacctttccccagaatatgacacctgcccttggcaaagagctcgctgagttcaaggtggcaaagctgagtcctggggaggctggggaaatggcatggtcctcctgctgggccctctcccaactccgtgcccactggtctcccacccccaccagcctcccctgcttcgggccatacctgctcgtcccagaccaaccagcggctgggcttctggcaggagcggcaggtctcactagctgctccacgcgaacaccccgcgcattctgtctgcatggtgtacgtgccttgtcagatttcgagtattaaaagcagtctctgagctgggtggtcctcagatgttatcatgcaaatgtagctatttttactggaaggccaaggaagaaagaggccgttttgctcattgattagaaagtgcactcacagggtatcagacttgatctgatgagtctggcagggccgggagagccttcccaagggaagcttgtgagctcgaacgaggccctcagaggtggcccctgccctcaccctctcagagctggttactggcaggggacgcctgtgacaacatgaaaggtaggtgctcgctatgagcaccttgggaggggaagcaggaacctggagacacaaggttaatggacacttcacggagaggagaagggataattgagtaataggcactctgaaacgtagccaggacaatggggctactcaaggcaacgtgacggagtgggcggaagcactgtggaaagagcacggaggcagaggcctgggcagccttccgctctccctactgcaggccgagacactccgagcacgtccatccccctgggcctccattcccctctctaaattgaggagagtaacactttcactgcggcaagttgctttgcaaagcaaaggagcctcctctcacatgatacctgaccccccatccagtggggctcagtgaggggtggggtggatgactggatggagaggctggcacaggctgcggcggtgggggtgttcccacaggctgtggggcacccagcggggtggggagcttgggtaggagtccaggtctatgccagttccttatagggagcaaatgtaattaatttctcagttaaattgaggtgatttgtgtgtgtttatgcatgcctgtgtgtgactgagcgtgtgtgtgttagtgtgcgtgcttgcatgcatgtgagtgcgtgggaagagtgtgtgtataaattgtgggtctcttcctgtagcccctgttaggatcaaatatcaagaaacctcactgatggctgggagagtctcttgcccaccttctccaccccggaaacccaggtctcggcacaagcagatcctcctcagagtctgtcagacacacacgacacagcagaccacacaagtccaactaatgtgtgggcggctgtcttctgccccagatgtgtccttggaacctacaacaagaagcttagagtgtgaacttgtggagcctgcgtgccctgggttcaattcccagccctctctcctgtttgcccactgagtgcccacagggagctccttcctgtctcttagcagatggctcatttctgaaatggggcaagtgctcccgcttcccaaggtcgctgtgattgccaagtgcacgtgagcattcggcacaggctgtgtgcagggtaaatgtcagtcagcgcggccagcgatggagcttgctgccgtgcacttcatcactgttcaataaccctgacagttcagcctccctggagagcaggtgtcctgggcgggaccctctgttcgtggtcaccagcagccttgctcttcacagtgtgggcctgggatccagagaggcttccgggctccctggtgcagcagccgaggctggtgtttggcattggctaacacagccccttctagaggtgtgtgtctgtgtgtgtgtgtatttgcatgtgtgcatgtgtatatgcatgtgtatgtgtgtgcatgtgtattcgtatgtgtatgtctgtattgtatctgtgtatgcatgtgtgtgtatgcgtgtggtgtatgcgtgtggtgtgtgcatgtgtatgtgtgtgcatgtgtatttgcatgtgcttgctcgtttgtgtgtgcatgtgtgtatatgtattcatgtgtgtatgtgtgcatccttatttgtatctgtgtacgcatgtgtttatgtgtatgtgtgtagcgtttgtgtgcatgtgtatttgcgtgcatatgctcatttgcaggtgtatgctcatttgcatgtgtatgcatgtgtgtgtatgtgtagcgtgtatgcatgtgtaattgcgtgtgtatattcacttgtgtgtatgcatgtgtgtgcatgtgtagtgtgtgtgcatgtgtatgctcatttgtgtgtgtatgcatgtgtgtgcatgtgtagtgtgtgtgtgcatgtgtatgctcatttgtgtgtgtatgcatgtgtgtgtatgtgtttgtatacatgtgtgtgcacgtgcacgtcaggctccttcccttgcttgcgtgctagcaggccacagaccatcgtcctgtttctagatagctctgtaggtgcatttctgtttccagctaacttcagcttatgctaatggagtatttgtgttcacagtcattcatcttctctctctccttccatgtcactcttctccttgccacccctacccatgcatgtagagaggagagttctatggtaccaggacctgggaagtgcgtggtctgtggacacacatgtggctggattccagccccagcgctgtcactcactaggcgtgtgaccttggccagccattgacctctgtgagccacagtctcctggtttagaaagtgggaaagcctagctcatgtgtgtagcatcgctagagacagtaaggagcagatgtccattctttctgcatttttcgtcccttacctgtctctcaggatccattcttttcgctcttgtgttacaatatttgggatcatagccccgcaaactgtgtgagctggaagggccctccctcccagagtgcaggagttcgtgttgattctctcccacagcgcccatcccaaggctcttggtgagaaccagggttgtgagcatctccagatgggggtatccagacgttgctcctcctgggactgtgtgttagtagattgcactcgtgtgtttgcgtgcagatgagcattgaggcagagctctcccattatagcacgtgtgggagacccatgtcaggtggtggaacgggaacgggtcacaaggctgcagctaagacagagactactgctttggaggctgtgagcttgggcgaatatttgacatccctatcgtctgcttcctcctgtttgtctgcacagtgattgtgagaagtaaaggagacgatggctttaaaaagtggtgcacgcaccaaagcagtgatgggattggttcgtagagcgaagagagagcaaagactttataccctccggaagggcgtctccgtacatttacacattctcacacattagtctagtacacatatgtatgttacagtcagaaaagaaactctctaaatatagacgaagatttgtacaggaacaaggaaagagaagcttgccatgttgatctgcgggcattttttttcttcctccattctgcgtctccaaatgtaggaatttttaagcagagaacatatatggaaggaaagaagaatttcttttctaagttttgatcttacaaatatagaatagttgggtatctttagctgattttattcaaatgaatctgtcatttcattgggtgagccctccctcggattgcatgtatttgtataaatattgctcatctcttattcattggtttcatgctgagattcagacgttgggctctgggggacagagggcctgctggcatagtcctagggtgccgtctctggagccagacagacctgggcagcgttccttcaagttgctcgctggtgatcagcttcagggaaacaaaatgatgtgtcgatgaccttgtaggcctggcccttaatgaatgttacagcccagtgtcagacaccctggggaactcaagcaacaaatattaattgcatcgcccagccccatgccgggaaatctcaggatgttccttcaaaggagcatttcccgatttggtaatgacttttctcaatggagcttggtctttgaaccacttggtagaaaatgtgagcggttatcttcaattgacaacctttggtgtgcctttggccgcattgtctggcttattttgaggaaacatgtagtgtggtttcctagattagctcctggggaccagagatgccaaatagatcataaaagagaatgctaggaggaaagcagccacccttgcagagtagagggtattctgtcctcacgccagttcaggacaagccaatacaaactgaggacctctgtgtaccaggtacagtgtgaccctcagcagacaggcgtcatgtgggcacactgggcaacatgctggggagaggtgtggagtgaggggaacacagccctgcagccagacccatcggggaagcttgctgtagttgggatgtgtgtgtgtgtgtcccctccaagtctcatgctaaaatggaattcccactgttggtggtggggcctggtgggaggtgtttggatcgtgggggtggattcctcacgtgtggcttagcacctttccctcagtgatgagtgagttcacgtaagatttggttgttggaaagagcgtggcacctctccctgccttgttcccacttttgctctcactgtgtgacacgcctgctcccactttgccttctgccatgagtaaaagctccttgacgtctccccagaagctgagcagatgccagtaccatgctccctgtacagcctgcagcactgtgagccgatgaagcctctttcctttgtaaaccaccctgccctaggtgttccttgatagcaatgcaagaacagcctggcaccgagctcctccctcttgctgctgtcctggctggctttgccaggacacctggcttctcagagcctccattcacttatcagtcacgtgcgggcacgcagtccttattggcaccaccccagcacatggcaggcctgggttgaaaggtgagactgcctgacctcctctttgtgcttgcatcccagctcccggggaagccaacgcggtctctgtggccatctcccttagccccgtctaaatgctgctaccctgctcccggagtccccatcagggggttcccagcttgccgtggtgtcttcagaagctgcaagaagcttcagaatcccttccaaagggattacggggatcagccatggctcagccttcctctgtcctgcatgcagggccactagcaatgacgtctagcatgtgccagacacatgcctcggccctgcggatactgagatggtgaagaaaccaaggtgcctgtcctcctcaggcacagggagccactaccctgagccgcgaggccctgctccaggccgagacctgctgtaggcgcttcccgggctctagctcaccattctgcaacagctgtggggcaagtgccttcccttccccattttagaaatgggcaaacaggtgtgagaggtgtcctgcaagggtttccacctgatggctatgttctgtgttagctcctgcattgggagctactgcagagtgactccaggttccggaagatggaccggcaagcagtctgtcccttctttgatcacacgtatattccctaaagacatgtatgttccattctctccgggcttctaactggttctccctccccatggtgtgtctccggcttctgtgccttgctctctgtactgatggctcccacagggacctgtaccaacctctctgcagaaacccaggctctcctgctgtacctttctgttcacagttcagtgtatctccagaatggagttattttccttcccttccaaccttgcttttcccccggcgtccccagtccacaggaacggcgtcaactccagcctttcacacgagccagagccccgggccaggctgacagcctcacactcctctgccctttcctgtccatcgccgagccctgcccatgtggcctggcaaggtctccgctatcccctcctgctgccccactccaccgcctctgccgtggttcccaccctcttcattcagttgtgcgtttatttggtgccactcacaggggtctctgttccccccaggcaccgaccctgcgggggaaggaggccacagccccagctggccagggctgagcatggcttgcccaggctcacccggccggctcctgcagcccccatctgctgagaagccctgccttgtcttgtctggcccacactgtctctcactctcctgttccgtccctcctcttttcacctgcagtgtagtcctctggaagcgcccctccgatcagtcacacctctccaaggaccacagcccagtggactccctgtttattgattccaggcccccagagtctggcttttagcctctccctccactcccctctcacagcctgcccctctgggcctagaaagactgggagaaccaacgaggctccaggttgggtcaccctgggctctctgtgccctcccctacttcagacctggccaggaagacctctccacgctcctcttccttgcccaccaggcagaatgggctctcacccccacctgggagaggacaggggccctggagctcccctgctgttgcacatcctcatcatggcctggtccacgggcgggttatatccgatgctcacctctccccaccagagcctggcatggcgctttgcacaggaaatattctgattcaggaacccatgggtgaggaagccctggaaatccttgggcgttgacactcagctccggccatcgtctcacggctgttgtctcggaggctcgtctgctcttcggaattgcctccctttttccttccgggcaagctggctgctcggcggtatcctccacggggcgtctgatcactggctgtgtcctgcagaagccctggcccaaagcaaacaaaccagagccatgaaatttcccccgggtggaagtgacttttttctcagaacttactatggaaattaaatttccatttttcttgggaacattaattgatcccaaagggattaagggcagagattctctgagtggagattcagatcctgaggtctgaggttgggcatgggacccatgcagcccccacctggccctggtgcccatccatccggcgcccgggaagcacttcctgggcccacagcccgtcattccttatcctgcacagccatgggatggacaggccttcatcctcacaggatgccagtgccgcctgcaccaggacctgtgcttctcctctcctccattcggcgggaaagagtgggacccagtgtggctgcaggtcccagaggagtggctagttccctgaaagacaggagccgtttctctgcccaccctgcgtgggctgccctgttgggctctagctctgccttgaggccaccccatgcctcagtaagaccttctcagacccctctgtaatcctgtagtcccgcagcccacgtcccacgtccagggcccgggtcatctgtgacccccactccagcaaccccacccctgagtgttctctgtggaatgagaggtccttttggcgctctgtgagggggaagaagggcttccctggtcacgtccacctccctgcaggggactcacgagagcacacagaaaaccctggaggccttgagtaaagaaatctgtgaatcccatcacacccaaccgggcccagcctccttacagcatggaaccttttacaaaggtaaagtcagctaggcacagtggctcacacctataatcctagcactttgggaggccgaggtgggtgaattgcctgagctcaggagtttgagaccagccttgccaacatggcaaaaccacatctctattaaaaaatacaaaaaattagctgggcgtagtggtacttgcctatagtcccagctactccagaggccgatgctcaagagtcgcttgaacctgggaggtggaggttgcagtgagccaagatcacaccactgcactccagcctgggtgaaagagcgagaatctgtcgccaaaagataaaataaaataataaaataacataaatataaatataaaggtaaagtccattaaatcccttaaaacgggtgttcccatggagcatcctttggaaagtcgccctgctcagacgtgggtttcctccaccgcccgacgtgctccactgcctctcctgtggccctggcagctccaaggccttagccacgtggtgactgatgttaatgacagtgctgtggtgctggatgtccctgcaggcccccgaagctctgcacaggaagcacgcttggcatcgtcacagtgacccggcgacttcctcacctcatccgttttgcagatgaggaaactgggctgccgaaattacgtgatctgtacacacaccgctcagggctagttccaagacccagaaaaccttgtggccaagacctgaccactttctttaatggtcaaattctttgagtctgctttctcccttgtaaaatggggaagacatcacctccctcccataagtttttggctctgagtgaaaatggggtgaactgatacacgtgagagccccatgtaaactgctgcctgctcctgtaatagaagacctgggtatttttatccggatcctcacgggcatgtctaacaaattctcagcagtcagtccagcacctttcaactctctctccaagaccttctgtgccaagggtgggtgagagggcctggagggagcaggtgtgggcttgaacaccatcatgtggccgcgagaccccagctgttcacgttttattatcctgaggatgcccatcaggcctctctttgtggcagcgcagttgcctctgcaggccccagggatgttcagagctcagcgtcagccccatacctggaaagactggcacctctgctgcagggcttcccaggaacactgtccgtcagcagacaaggctttttataggtctctgtttccacctgggagagacccccgtgcatccctcttcctgggcatggcagctcctggagcacaggcccaagtccagggataaacaggggcatctgctggtctgggtgggtcactgtgaccctgccagagtctctgatggttgcaggagacatctgaagtccttggcgtggcatttcaagctctttgtggcatgttttcaggctcctcaaccacccacaccctgggcaccttggtctcttctctttcctgtgaacccactctgcattcgggcaccaagcctctgcttgcttgagccccttagcctggatgtcaactctcggtccccacctgcttcccccacttaaaatcacactctttctccacatcagaccgctgggcacctggtccagctcaagcactgccttcctgtgacaatcaaagctcctcccacctcgcgcctctggggtgactgggcactgggaagggtactggtccgaactgaatgtgtccccccaaaattatgtgttgcagccgtaacccccagtgtggttgtatgtggaaatgagacctctgagaaggcaactaagcttaaatgggggatgaggatggggcctgagtcaatcaaattactgtccctgtaggaagaggcgccagagagctgcacacacctgaggaaaggccatcttgagctcacagcagcaggttagcggactgccagccaggggagggccctcagcagacatccaccctcctggcaccttggtcttggacttgtagcctccagaactgtgagaaatcaatgtctgttgtttaagccacagtggtgacacattgtgacagttgcctgaactgactgtggcaggcaggaacaaggctttgctcatgtttacactactgccaccctacccagccatggtcctggtgtctgaagactccatgtgtcagcggcaggcagcgtgtctgagaggacgcatgcactcagcaggcctctggcagatggcagcccctctgctgtccttcccatggaggcaaggcagcccccccccgccatcctacggctcttggctctcaggtcagactcctctccttgagggaggccatctctagcacctgcttgaggtctggcccctgggtgtgctcttttcaaccgcacaatagggtgtcaatacacaggcccggattgccagtgtcggtgtcctcacctgagctccccaggagcctggggcggggtctccttgccctatgtagctggtacctggcattgttctctcggagcacatgagcacctgggcaaccctttcattttacaaatgggaggccatgccttagaaggctgtggagatcatctcctcatatgtcactgaccccagtaacctgggagccactttggagtgggtcatgccgtcttccaggtctgcttcctgggtgctggtgtttggcctggagtagatgctaatacaggattgaggaagggactgaggaagtcacctctcctcccccacggcctggcccacagctggcccagctcagcgccaggtaatgggtttttaattgagctggatgaactggtctgcccagagcctcaaggctgtttgcagcaccccacggtccctaataaagccatcacgactgaaagggcaggggtcaaagccattgtgccgagaaagaactctcaaatctctcttctttattgctcagccacttaacgaattctcagagtaaggaacaatttaggcccagccaatagccgagcatggcactacgattcattttctctccgtcgagctccatggggagaactccagctgctacctttttgattcctatttaccaggctattatggcacacgaatctgttggtctctactcagaagccttaacaagctcacgggtcccgtgcgcagtggtggctggaccgtcatggagcctcaccatgggtgctggtttgtagtcgagaaagcactttaaaaacattgattacattttttaagctgtaagagtaatctctgcttattttaactattgaaataatgcaaagcagtatagaaagtgttaatcttctctgccacctccattcccatccttcggagaagcccggtctggaccctggggtaggaccttttccacatttctccaggctcacattgatgcatatggagatgtattaacatacaggaaatgggtttgttttacagaagcggggtcctgctattcttagattcctctgagacccgcatgctgacattttgacctgtgccacagcatactctccaagtaccaggctgcagcatccacgtggccccagcctgggagagcagcccctgggcctcgcccttctcagcactgtgcacattcagggacttcatattttgccatttgccatccaccgaatgaaacacattgttgctgctttcacttgcttttcgctggctgctccagaggctgggctttgctcatgtgtttctttgatcatgtggatttctctccttagatgccctgttcacgttctctgcctcttctatagaattgtgtggctttttcttatccatttgtaggagattgtgacctggagtaggaaaagactgcctactgcagatacatttcctggtgctgcagatacatttcctggtctgttatatttcttttgactttgttttcatggcttttgccacataaaatttgttcatttttctgcaatccagtatatcttcttaggaatgtctatatatataaaacatatatatacacacatactctcttattatttttaaaatttaaaacatctggaattcatttgtgcatatacaataagatagatccttgttttgttttactttgttatgccaggaccagttgattttaaaaaccatcaatttttccttgaattagcatgccacctttgtaatatatttagttcttttgtaaatgcggatctatttctgaattatctgttctactgtaaagactgctgtgctaatgccatgcccttttgtcgtaatggctttaagatatgttttaatacccgataaagcaagttctttctcacatttctttatggcttttgtagttatttgtccatttgaactttaagaacatattatccagtttaaagttagcattctatttggaaatacataaaaatgtgtatatgtggaatatttgttttttaatgaaatagttcttataaatttggccaggtgtggtggctcatgcctgtaatcccagcactttgggaggccaaggcaggtggatacttgaggtcaggagttcgagtccagcctgaccaacatggtggaaccccgtctctactaaaaatacaaaaaatagccaggcatggtggtgcatgcctgtagtcgcagctactctggaggctgaggcaggagaattgcttgaacccaagaggcagaggctgcagtaagccgagatggtgccaccgcactccagcctgggtggcaaagtaagactccatctcacaaaaataaaaaataaataaataagataattttttttctctctccattttaagagttttcttttctgaaatctgaaattaaaaaaatgtcttttggcatttatcagcatacttgtaacttcttttcccttttcagtgttgtaatggttttggacggtagttttctcttttttttttttttttttttttttgagacagagtcttactctgtcgcccaggctggagtgcagtggcacaatcttggctcactgcaacctctgcctcccggggtgattctcctgcctcagcctcccaagtagctgggactataggcgcacgccaccatgcccggctaattttttgtatttttagtagagatggggtttcactgtgttagccaggatggtcttgatctcctgacctcatgatccacccatctcggcttcccaaagtattgggattacagatgtgagccactgcgcccggcctggatggtagatttcttggtgtgagctctccttggattaatcatacttggtgctggtggatgattctttcgatgcactgctgggtttgatttgctaatgcttcatttagaatttttgccctgtgctcatcagtggaatttatctatagttgtctctgaaatactactgtcttccatatgccgcctctgtgcactgatgagattgtccctgtcccaggggcttccaaggaatgatgataaatgctagagcaggtggtccccaacctttttggcatcagggactggtttcttggaaggccatttttccatggacagtggtgggggatgctttcaggatgattcaagcctgttacatttatcgtgcactttatttctactattattacactgtaatatataatgaaataattatataactcaccataatgtagtatcagtgggagccttgagcctgttttcctgcagctagactagatggtcccatctggggatgatgggagacagtgacagatcataaggcattagattctcataaggagcacgcagcctagatccatcacatgtgcagttcataatagggtttgtgcttctgtgagaatttaatgccactgctgatctgacaggaggtagagctcaggcaggaatacaaacgatgtggggtggctgcaaatacagatgaagcttcacccgccgctcacctcctgctctccagcctggttcctaacgggacatagaccggtaccagtctgtggccagggggttggggacccctgtactagagaatcaatcttgtggttaagatgtgtacaagggactaagaggtcacagaaaagagtgtgacaaattgtgtctgaagaggacaaggaaagttttccctaggtattgccatttgacctggttctcatagaatggggaagggctttgccaggcgacggaggagcaagactgttcactccacttggacagctcacattgtcaggaatttcataagccagttaacatcacattggtaactagaaatcagccaggcaggaagtatttacaccctagaaattggcaaatattaaaagtcaggttacccccacaatagccagttgttaaacatataccagcacaccactgactgtgttactatttttttctttctttttttttttgagacagagccttgctctattgcccagactagagggcagtggcgtgatctcagctcactgcaacctctgcctcctgggttcaagcaattctcctgccccagcctcctgagtagctgtgattgtaggcacacaccaccatgcctggctaatttttgtatttttagtagagatggagtttcaccatgttggccaggctggtctcaaactcctgacttcaagtgatcggcctgccttggcctcccaaagcactgggattacaggcatgagctaccatgccaggcctgtctttttctcttatcctcacagctcctaatcagactctccacccctgagggagggatcacatcatttcatcactgcacagggcccagcacctagagacagggcatgcatgcaggaagctgttaagaatactctttggagtcagaaagccccgaggtcagtcactaactagccaagggcaaatgacctgaagtctttgagcctctcttttctcatccatgaaatcaggatagtaagccctacactcatgtataaacagtgtatgcccaattacttagcatatactggtacacacggtagcttaagaataaattgtggaactgaagtggattaattcagcacatttttgtgatcctcctatttgtctttggggatctcggtatggctttgtaagacatgagtaagcaagtctctccctgacccaagagtgcaggtcatgttgtatatggctctgtctgttcccatagcctggaggtattcccgaaagtctttacctaagttgcctctatttcaccatccatcccatagaggagtgagcagctcatggctgagtggtccccagcagtggaggaagcagaaatcattaggacccttgcaaaggaaaaaccttctaaagagaaggctgtgcggtgagcagcagccatgggcccaagcctcgcccttctcaccagccacgtggcgcctgctgccgggacgcatccacgggtaaggggttaatgaacgagaagccaggcctgtggggcaggagaccaggagggcacgctgcggctgctcgattgagggccgtgaggacgatccatgggtctggctgcctggagcagcactgaatcgcagactcatcctgctcctttgccactagttcatcctctcggtagtctatcaacttctcagttttcaaggaaaaaggaactcctgagatgtaactgccataagtagcattctaagattctgtcctcaaaaagagacacagctgtgccctccactgctgcatggcatgtggaaatatatgagatttgcagcctgaacctgctatccccagccatgtccactgaactggtgtcttggcctctctaacctcattgacttaactccagatggggcgctgtgaacctgctccagcggcccctgcaaggcatggggctgatggggctgacctgcacagagcaccaggcccagcctgcagcaccctgggggtgctcagaaagcagtggctggtgtgtgtgtgtgtgtgtgtgtgtgtgtgtgtgtttagtttatgttcttccttactgaagataggacttaaatggctcacaaggattcatcaaaaatgcaagataatatacacttaaatgcatatcatctggagcaaaaggagaaaaagaagaagatggttattaaatggagacagaaatgaagctgagactgtgcctgcatgtgcagtgagggcgggccgtgagtttggttccaagcagctgatggaaggaggtgggaagtcactgttcctggcaggagttggcggacccaagacagtgtccttatccacgaagcacaggaagggtcgcttggcattgcagaggtcatgacagatgcccttccattttaagatgtgaatattatgtaaaaatgaaatgaccctctgtaggaggctccgtcttattctttgtagcaagtcccagacctgcagttgggtcccagagaacactcaggagccgtgggatgttctctgaggagcagtggggtgggaggggactctctgggctccacctctcctctgtcccctctgggtcggcccctgtggcccatctccatactgagatgggggcagcccccttgcgtctctcccagccccacaagccagggactcaaagctctcccagtgctgcaacacacccagcattgctctaaatctgcacctggtgggctggcaaggaacgttctggggacagattgaccagcctttcctcctttccccaaagcctcaccagcatctggctggcccagctgctttcaccggaaggtacccactatccccttgcccttggctttcctctgaaccttgctctgaaaatccagttcacccaggccccgctttgcctgatcaccccctctcatctatcaagtctggccttccaggcctccacaccaccccttccagaagcttccccagtcaccaaggctgccctctggtgccctgcggttctcccacccactctgtgcttcccaaccatagcatctgccaaacacagccgttcttgccagtttctccagtggttaagccagttttatccaggctcgggaatccacccgcccggtccccagcctggctccgtcactcactgcccgtgtccctcatgcaggttccttaacctcgctgggcctcggcttctacgtcaggtctcaaggtgactgtgaagagtcagtgagctcctaagagtcaggtgatgagcacaagagccacccgtgtttgcacacgcagcctccttgccctctgtgtgtgtgttcccctgctggtgatccccggagccactgctcaccccaccttcccaccacgagtccgtaggtagcacagtccctcctgtcaggaaatatctgtggattgactgttgaatgttagtgagtgcttgccgggcgctgtggctcacgcctgtaatcagcactttgggaggttaagctgggcggatcatttgaggtcaggagttctagaccagcctggccaacatggtgaaaccctgtctctgctaaaaatacaaaaattaggcagccaggtgtggtggcgcaagtctgtaatcccagccacttgggaagctgaggtgggagaatcgcttgaacccgggaggcagaagttgcagtgagctgagatcacaccactgcactccagcctgggtgacagagcgagacggtctcaaaaaaaaaaaaaagttatgaatgctgagtagttgtggtgatttagaaatggaaggaatgtgaatttcagatcagctttgtgacctcgagcaagttatttgctacccctgcccccattctcatctccagtaagagaggatgacacgcaccttctgccacagggaaggcgggcagggagctgggagtgatgggagcttctccggactgaaggctgtcttgcattttttctcttccttttgcagtcccttcccctcaattgactgatacagatgttctaaggcagtctaaaacagactgtccactgcaggactttacaggcaaccctgggattgaagctgacccacaacaggacctgggggaagctgctaagagtcgggcccaggtgctggcagctttgccgtacacatactggtggcagcaaggagcatgcgggtttcctgtgacatcaatggccctgctggcatcaactcggtgcccggccatgtctgtcctcaaggagctagcagcatcgttttccagaccctgctctgcaagcacgttgggtgatttataggaactccttgggtgcaggattctgaaaccacaccttctgtctgtctttggcaccttctgggagttttttaggatagcaacccttggagctcacagctactgtttttcttcctttcctttcctttttcctttcctttcctttctttttttgaggctaactagcagagtttaggagggaaagctttgaaaacagacctggattcaggttctagccctgctacttattggctgtacaactggaaaagttagtatttcagagtctcagcttcctatctacctggaaggagagctgtgagatctgaatttagggaagtaaaactgggcccagaggagcctctgaactctggattcactgtcctgtcctttaatgtcctcctcaggggccccggggtccttttcctgggcctgctcttgcctgagggacttcttaccctccctcctgctagacagtctgctctcccaagctgagcaatttctcccccatttcctgacagcttgaggggttctgagcagcgacggtgactgtttttggcttctcatcgccgtgtctccacggggaaggccattggcatggaaacaggcccagctcgaggcttcatctctgttctgccgcctctcccagcagacataattctccctgtttgacatcacagcctgcccctggccgcccaccgcctgcctcgcggagcacagggctgctgggtggactgaacagctgtggcggctgccggaggaacgtgattcttcttgccgggcttcgagctcagaggcgggagctcagaggcagtgagggaagatgcagggagagaaaaggggacttttgagtcagctggactgagctggattctggtgtcaccttttccaggaactttctggggcaccctcaccgacccctgggctgggctgtgaggtctgtcttctgtgagccacattcctgtctgcagccctctgcccccacgctgtcacctctgccccggcaccgtcacctcacccccggtgccgtcacctctgccctggcgctgtcaccatgtggtttttgtctgctacctgcctgtctttcccatgattctgtgggctccttagggcctgtgacatctgattcattctgtgtccccaggcagcccattctgcagccttgcacacattagaccccaggaagcctgccttgctgacctgggcaccagctttccgaggcccctcaactagtgctgagcagagctgggcccagaggcagctcttcaggcctcatggtgagctgtttgcctctccccacccggtgctgctgccaaggtgctgggaacggtgttcagggaggcctggtgctcccctcctctctaggcctggcccttctcggctcatagaccagcaccaagtctcattcctgcggcatctgccatcgttctagaggacggttccagaaggtgccttctctccggagcatgatgggagaagggggctggccgtgggcctgggaggcactgcagcgtgttgcttgtgggacaggaggagtctgagctggtgctccccctcccttcttgcactgtccccacaccagccccacagcaggtgccttgtcatgacattttaagaggaggaaactgaggtgcaagaggggacgtgacttactctaggtcacacagatgtgagacctcatcagagtgggcctagtttgcctcctctttatgttctacctgctggggcacgccctgcttgtggggacacagggagaccggcagcacagtccttgagcagctggcacccggcctctgcatctcagaccccttccctggtagagctcaggagagctgagaagacagcctgaggaagggtggagaagtgggccggtcacacccatttggaggaagctgtcagggccaggcgtggagcttgcagctctagaaccttctagcagctgtctgcaaagcaccgttctggcccagcctcacacactcggtgtttttaaccttcccgaaacccatgtaaagtagcttatgttttcccccattccatagttgaggaaactgaggttcaccttagctatagcccatgcccctggaaggcaaagctcttccaagggttcaaattctaggccctgattccaacacctttactcttggtttgtgtcttttgggggtgcagaaaatacactaatttatataggagtctctggttaaaaatatctatttaactcattaacatttttctttaatgatgagttttctgtaaaggttttttatttttaagtgatatatacatgtgacttaaaaagccaattcgttccacaaggcacataacgaagaccagcagtccttactcctgcctgccccatcacccagcgccagtcctcagaggcgcttctgcaaatgctaaactgtttccttaggtatttaccttgaaaatatgactgaattaatgccaaatagagtacgctggtgtagtgtgatctttcggtgttagacatcgtctgtgggctgctcgcctctacctgtctactacagttctatcacagttcttggttaaatccccacagagttcttctgttcatttttactgtgacaatgcgattgtttttcacagctaagccaagcatgtattatgattatacttcccttccttaaacagttttttttgctttttctagaattataattgtattttctgcagtgtttatttttctgtgacgctaatttttcttgaactttccatcagaaccacaaaattcctctcaataccaccaaacccatcagctacatcgtgtgtgcatgcgtggttccaggagatatctctccagcgttctcatgtcctgcttccatgtggcctgatgtcctccaggtctgctgcagggctgtggtcctggcacattcctcccactgtccccagcaagcctctggactctcatctatgccagatcctgcttctgcttctcctgcctttctctttatcagtttacttcttcagtttgctggagctcatcctctagtgcttttccaggaaagagtgcataggaaaaaaatgtttttgaaatattgcatgtccaaaaaaatatatcttaaatctccctcaaatttaattgatcactcagcagaatttaggatttagattctttatcagtcaggtgaatttaggatttagattctcttccctttggaattgtgaaggtgttgctctcatttcttagcttccaaaaatatatagctttaaaaaacaagctccctccaccctattgagaagtcccctgccatccagattccgagctcctgatcctttgcaggtgacctgcttgcttctcttgggaagcctttgatatcttctcttcagtctccaatgttctggttctgtaatttcacataatgcctcctgctgttgttcttcgaaactcatttgttctaggccctcagtgggccatttcagtgaaaacaaacacaggcatcaaaacaaggactctgaaaaatgatttttaaactaattctacctccctgttcctgggttttctcttccagaatgcctgtttactggatcttggacctccttggctagtcctttaattttcttttctttgctgtttcctatctcttagaatgcttatactgcttcctggaaaatatccacaatttcatatccaatctctgtattaaatttttttatttaatttttaatttccaagagctcttccttgttctcagttcctttttatagaaccttgttcttttgtaatggctggactgccttttcttatctctgtgagaatattaattgccactttctgtgaaggtttctttgttctgtgaattgtttctgccttcctctttgtcttccccttcatttatctttgtctcttttactttaaaggtggtcctcaagtggctgtgccctttggcctttgttcctatgaggccctaaagtagatgggaagtgctggtctctgtgcttgggcaggatggctgactggtgggcttcacggacaggaagcatggtgggccccacccagagttcattagggactcccccacctatcctgagtctgtcctctggcctggtctgtcctctggcctggccagaggagatcctggagtatgccatggatctcactgccagcattcagggagccacatccaagaaggaggctgcccctccccataattcatgtcaggactttgccttcatccctccttcatggaatcttgagtccagaggcttcctggcccaagtcctaccaagaatagaacttctgcaccgtccaccgaggtcctgttcatccctggccatttgaaggaggagagctttacgcagtggtgtgctggtagaagtttaacagccagctctcaggggatgggggagccctggtctgtagcatttgctggtttctgagatgtaaacactcctgtagtggccagtttcaaggtcccaacacgatgtcagccaactcgtgaaatccctgaaactttgtcagctccggctggaccctggctcgcaggatccgtcatggtcgttcagctgccactctgcacccattgctcatccctgcccatgccccgtggctgctcctgcttcgtgaaccctcacctccccacctccagcagtggccttgtctccttggcgtcgcctcccagggtttagcttctgctgccctgttaggtcagttacccctcacccatcctctttgcttcttccaaaaatttgttgccctctttccacagctgtcattgcctcctcttcctggtggcttcatatcatatgtattctggcactgtctgtctctctgtgggtttcaggagggaacagggtgaatgtgtgtgccaggtctgcctgtctgagcagaatctccccccacctgtatgtttccagttacccagtgatttagcatcaggcagatgtgcagagatgccagatgtgcctctagcacctctgctttcagcgcacacaggagtcagggaagagggtctggggtggcgggaggaaggggggtcactcagtatcctgccgctcaggaatgtgccttgccaacctcaggggctggcatgtggggtatctggtggctcagcagggtggtggccgccgtttatatggcaggcacagtcacagctactggggttgaggtgggggttggctcttgtggctgggagaggatggtgccggcagggctgtgctggctgtcatctggggactccttaagagagaatgggggcttctgcagggagagcaggaagatcagggctgggctgtcaggaggccaggctctggaggaccccagatgccagcaggcaaaattagacttgcatcctgaggccacagaaaggccctgctgtgggacagagactgaagtcggaggcgattgcccaggccccctgcttcagtgagatttacacccggctgtcgtatccacactcagtgatttcatagcctgcctcctgtctggcgcaggaagttgcccggtggctcttgggaactttcctgctattcctcagttcgcagtctcctccctctccagcactgtcagcctctaggcatgcctagaagaggacgcttcactcccattccccgtgctcacttagtcagtgttgctgatgcactcagggcagactgctgcatctgcctttggacaggactgtactgtgaagtcagtttcagaaatggcttctgtgcaattcaaggtgactttttctctcttgtttggataaatgctaagtgggacaagttaagtggattatctggatctggcatttgtttcctagtccttagaagggttatcaaaatagatgtttttgataatgaaatattacaatcagtagactctggtgttaatccatgttggaacctttgtcagatgcaagtcagagaacacaaaggggtttggagtcaggcacatccactcctaggcaaagagcattgaaaacatacatccacacaaaacttgtacgtgcctgtttgtggcagcatttgtcataaaagcaaaacgtgaaaatagccagctcaagtgtttttgtttacctatccatcagctgatggataaaatgtggtatatccatacagtggaatactactcagccagaaaaaggaacaaagtactaatatatgtgaaaacataggtgaatattttaaaatattatgctaagtgaaagaagccagacacaaaaggccccatattatgcaaatctgtttatatgatacatccagaattggtaaatctgtagagatagaaagtagattagtggttgtcagagggggtggggagggtagggaatgactgccagtgggtatggagttgctttttaggggtacatgggaatattctggcattaaatagtgctgaagggagatagaaatattctgaaatgtaataatgctgatggttgtgatatattttaaaaaccctgaattgtatactttatttttttgaaatggagtcttgcgctgtcgctcaggcttgagtgcagtggcaccatctcggctcactgcaaccttcacctcctggattcaagcgattctcctgcctcagccccttgagtagctgggattacaggtgtgcaccaccacgcccggctaattttttgtactttttagtagggacagggtttctccatgttggtcaggctggtctcgaactcctgacctcaggcagtcctcctgcctcggcctcccaaagtgctgggattataggcgtgagccactgtgtccagcctgaattgtatacttcaaatgggtaaattgcatggtacatgaagtatgtctcaaaaaagtaatagttaataatgggtcaggccgcacccacttgcactcctctgtgatcctcaggcttggtgactttaacgaggattttcccacctcctgccctcctcttaggtcaacaagatacacacctgtagggatgcgtgttccatttgtgcctgcccccacacccgaatgcccttcctgtctgtggagaagttctcatgttatgagtccagcccatctaaggcacagccagagctcatccctacctccagaacccacccagccggtgcctgtgctttgttcattcaatagagcttcatttttcatatttttttatttatctgatttatattgagctcctcctgtgggctctacactggttttccttgaaggctattaacaacctctgtgctcatagtcaaagaaagaatttctcgggtgttaagcagagaggagctgtaacacagaacccctgcttggtaccgttcgcccaccttttgtggaggacccgcttcaatctccgcacactttcgtccgcagtgcctccgccggtggttgtgttgaggacgtctcctgtcggctcctgtgctgttcattgcgttttccttgcagatttttgttggtgattaagcaagagcacatttatgaagcgccccgtgtagggtcctctgttttattaatggaagggaatcagtaaagcaagttcatgttcctccccactcttagttttaccagaactgccacctctgctggccagggaaagggctgccagctgtccgctttgccccttggagttcagaggctcttctgaacgcatgggtcatgaggaatgtgattctggggttgggtctctgatccctgtaactggctggtgtgacctgcaccgctgtggccttggcaacaatggtgtctcttcaaaggactcctgtcccgctggctatgctttctggcccctactcaccccacagacagccccagctctctgcgctggaaatccctggcttcccaagttttctgtcccttccctgggaagcctcagtccttctgagtgggtggaggctgtgcagggcattattaggtgacaggcttcctcctgcctctgagggcccttggttggctgaaggtgtctcgagggcatcggcaggtggctctccggaggccgctaagtgctcgggccttcctggcctgtggccgatcaaagcactggctcttttccaaagtcaagctgaaagacaactctccttaacacccccgccccttctataagcttctcccccgtgcgtgtgcacaccagaggagtgaggaagcctctctctccccatcatgagaagcaggatcctaaaggaaagggtacagctttgatgcaaagggcctggtgtgaatcctgcagctgctgcttgagaatcagggttcttaactgccagcaacagaaatggactctggtcaacttcagcagaacagcaggtgcctgggaaggctatcaggcagttcaaggagccactcagagtcaggatgggggttcaggaggctcggctactgccggacccagctgaggtcacacctggatgcctcccggttcaggtacacccttggggagctgctctgggacctgaggctacttctgctccactcttaatcctgttgctgctgctacatattgttttcacgggtccttggtgtcactgccgctgagccccgagtggaaacatccaggtggccaagatcatgtgcctgcgttttagtccaccaaggacagtgacagaggggacagggaagctctccccacagccagtaaaccagccgggacccacataccaccactgctgcgcacaggagggaaatcaacccctcccgccgggcccccacccatgggaaggggcggagactgtgtgaccacacaaagaaactggcaaagatctgctgctccctttgattgcaggtgaccatttgatctccgggagccctggctccctcgcttggaacaggagccacagctgccgcgtgggatgatggtaagggttaagccctcggaatttatgtttagtgcctggcatgatacttggcaggtaggaagctctcaattaacgccccgttctcgagctacactttgcagcccttgactgttccactgagagctcggggcttccttctccagcgtgctccgcgcacacccctgcctctgaaggcatcattatgtgattatatggatacattgtgattacaggttagccttaaccaggcttttatacattgagacacttacaggcttgcattttagttcagtctggagtgggctttctggtactttaaagtgtatcatgagccctccttcttcgttctgtgtattttcgtctatacttaatagctgttctctgaggccgcattctctgggtctgtggttgatctttttaatacatgtcaggaattaccagccctcccactcatgctacgggctccttttataactcctcttgtggactctgcattttgaaaggttttatatgtcaaaatatatactactcagaaatcattaattcactgctcctggacagtaggggagcctggccagccccgactcccagaggaacgcaccaagcacagtgccaagcccacactggatactcaataaacattttcttggcaaatgagagaacaaagaacctggggccccaggatgttcaatgtcttagcctgagtgcacagctgacaaatggcagggctgccaggtctgcaggtccccacctgccgagtgtggggtcttcccacttccgaccctggtgagggccctgcaccgggaggaggttggattgggtggactctggatgcctgtgcatggcctggagttttcagacttccaggcaggaggcagcccaggcacacctcacgccacgctagattccacaaagccactgaaactaccaaaaggacacactggggtacgcctactccacatccagggggtctccgcagggtttggtgtggatccaacagtggaaggaggccaggagagagctatagtctgaccttcacctgcaaccccaatgggatgcatgatgaagagacacctccctcggattctatcatgcccctggaccccagcatgaggacccctctccaggggagggggcttagtgagttcatgcatgaaacatgctgtgagtgttgccacttgaggacctggccctgagctccagcctgctgctcccaaccatggtggctggtggggagctttccttggttgaattttatactcctcccatacaggggtcctcatgggattcagtaatgtgtctgaagcactgcatggaagaggctgtggggagagagctgccttggtggtgggtggtggctgcggcggtggtgcttggtggtggtggtgggtagtggtggcggtgcttggtggtggtggtggtggtgcttggtggcggtggtgggtggtggtggtgggtggtggtggttgtgtgtggtggtggtgcttggtggcggtggtgggtggtggcggtggtgcttggtggcggtggtgggtggtggtggttgtgtgtggtggtggtgcttggtggcggtggtgggtggtggcggtggtgcttggtggcggtggtgggtggtggtggttgtgtgtggtggcggtggtgggtggtagtggttgtgtgtgtgnnnnnnnnnnnnnnnnnnnnnnnnnnnnnnnnnnnnnnnnnnnnnnnnnnnnnnnnnnnnnnnnnnnnnnnnnnnnnnnnnnnnnnnnnnnnnnnnnnnnnnnnnnnnnnnnnnnnnnnnnnnnnnnnnnnnnnnnnnnnnnnnnnnnnnnnnnnnnnnnnnnnnnnnnnnnnnnnnnnnnnnnnnnnnnnnnnnnnnnnnnnnnnnnnnnnnnnnnnnnnnnnnnnnnnnnnnnnnnnnnnnnnnnnnnnnnnnnnnnnnnnnnnnnnnnnnnnnnnnnnnnnnnnnnnnnnnnnnnnnnnnnnnnnnnnnnnnnnnnnnnnnnnnnnnnnnnnnnnnnnnnnnnnnnnnnnnnnnnnnnnnnnnnnnnnnnnnnnnnnnnnngggtgtgtgtgtggtggtggtgtttggtggtggtggtgagtggtggtggtggtgcgtcgtggtggtggcggcggtgcttgatgaaggtggcgtgtggtggcggcgatggatagtggtggtggtgctgtgagagcagtggttgttgtgttgtttgcagacttgagggattcactggagaaaggtgattggggaccatctttcttcatctgtggtaaactccgttgaaagttcaaatgacacatttagacgtcatttatttcagactactgccaaagtgactgaaataaaaatcccagccacagcccggtcctcttggggaagtggtaaagtggagcagcagattctgagaaaagaaactagacagcgtgatgcatctatctcaagaaatagccctgccttccagtgactccggggaacagccacatatcgcctttgagaaaaatgggtttgaagttctctggaaaaccttctgccagtaaactgggaaggaagtgaacatttgttgatgggctgatatgtgcaagtgataggcagaacatgagacatgaggtgttggtatccagctgtgtttggggtctgtgtgtgcacaccctccaactgtgggcttatggtctgactgcctgcacagagagcggtgctgggcctgaggcttccctgcagttgcactgtctggagggtgggctcccgcatgaggtggctgtgtcccctggcactgtgtgtggttcatcagaggcaggagcacctgtatcccttctcctaggcagtggcagagtcaaatttctgcccacggggctggagggcagggcaggctgcaggactcgccgctctagagtttccaacggacgttgccttcctgagaggctgtgagcctgatgagagcctgtgacacacacacactcaacagcacacagacatacaccttcacatacacattcacacatggatgcacacacaatgacatacacaacgcgcacacagcacactcacacgacggcacacagacacaccttcacatacacattcacgcatggatgcacacacaatgacatacacaacaagcacgcagcacagtcacacgacggcacacagacaccttcacatacacacacgttcatctacggatgcacacacaacatacactgacatacataacacgcacacaatgcactcacacaacagcacacatcttcacatacacattcacacatggaggcacacaacacacaccgacatacacaacatgcacacagagcactcatacaacagcacacacacacgcaccttcagatacggatgcacacgtgacacatacacttcacattccacaccccgctaatgcctacactgcaaagcttcaattctcaaatcagagcctagaggcactgacagtcactttttccaaacagaatgttccacatagaaagcattcccatcatcgtcagcaatgaatactagttgatctcttgcccgtaaaagagagtattactcaactttgcactactggactaacataagcaccttacaggatttgaaagcttgcgatcactatgatatttcatcctcacagcgatcctgtgaacggtttagtagcaacctcatttcaaagttgaaggaactgagtcagagggccaagggatgcctgagtcctcactgggtggtgctgggagccagggtgggaagcccactcctctgactgcacttctcctccactgccccagggacccctcccatagccaggatctcagatcattgagggacccttttctcccaaacacagctcctctccttgtctcccctccacccctagtgaaaagccagtccccgtggggccagcaaagcggaggtgtgagagcaggaacccatggcctcattttcttgctggtctctcctgcgccatgatcaggtgggcagtcttcactccaagtacatttgtgcagggccagattctccaccctgcttgctccccgcctggcacagagggtgtgctcaggtgacccatgccattctgtactgggttgcgtgggacaacagggagtggagaggagggaagaggaatgggctagaggaagaagcccagagctagaaaatcaagctccagccaattcctgggagacacagcaccttgagtgagctctgctaagagcacctgggtggggaagattttctggagccccaggagaggtccaggaaccatgtccacaggcctcagagactccctggcggattctgcaggcccagtcctggattaggaggttaccgagaggcgcagattgttgacaggcagaccactgcttcagggtttgcatgctccgcaaatcccatttattagctaattggcgcttgagaggtttcaggataaagaacagattggaagaaaggaggtaacacagcataactgacgcagaggagttcgtgcggattcctggcaggtcccgtctgcgactgtgcagttgaaacccagaactgtaaaagccacagtgcctcctggctggaacaggaatcccggttgataaccgtaccccaccccccactttcgcatcccagcaccccattataggttacagctcctggcattttcactgcctctgcttcactcacataacagtggacacagccaagggaaggggggcggggcaggagctccagccaccatgcctccttgggggccaggtgtccctctccataggcatgggctccctgggccccagattcctgccacacccacgcaccactcactggtaagccctgatgcctgcggctttgctcctggtgagcaccctggctcaggaggtgtccgggctgggatgctggggtgtgtggcccaatgtgagcaggaggcatgaactatgtcactttcaggaggatgcatctaagcagggaggccaccagccaagtctccccaggaagaggaaggcattgtgtggtctgtccccaccctcattcctctggcacctcacacttgtccctgtggagatacccatcctatcaacggacagctgctggtgggagggaagatacaggagggagggaagataccagagggagggaagatactggagggagggaagatactggagggagggaaggtgccggagggagggaaggtaccggagggagggaagatgccggagggagggaaggtgccagagcgggggaagatgccggagggagggaaggtacaggtaccggatggagggaaggtgccggagggagggaaggtaccggagggagggaaggtaccggagggcgggaagatacctgagggagggagataccggagggagggaaggtacaggtaccggacggagggaaggtgctggagggagggaaggtaaagataccggacggagggaaggtgccggagggagggaagataccagagagagggaagatactggagggagggaagagtgtggtttcagacagctctcctgggctccagtccctgccctgccatggaccagctctgggacctcaagccagcgactgaatgtcttggagtcccgtctccatacagatgaaaaacctgccttctggggcagtggtagtggccgcctcgggaacagctgtcagttccttcccgggaggggcacttgctctttctgggagctgcacatctcactgcccctcagctttgggacaggcgacccagaaagcagctggtctttccgaattgtcttcctgcctctgcacggacccaccagaaaccctgctcttggcccctcagtgtggacacgtgtgtcctcttccaacagctcagtctcactgggtctctggggcacatgctcccaggatggcagctctggtcacccacttccctggccctgttggctgagttcttgggcctgactgcttctcaggccttggccagccacagaatgctgtcctggcataggtggctaccacatgtgtagtcagcatggcacaggtgacaggtctcacagcaccacacagcacagcgggctggggacctcagccaaaggcgccccagcggcaggagcgcagtctggcccgtccagtacaatgccctctccgtcttttggcacctggccagctgctagcaagcgtaggtgttttgtggcatctgtttgctgtgccttccatgcgtctgtggaatctgactgcctctggagctagtcctgccctttgtccatctccgtgtctgtctcagctgctgccctctgggccccgcatcacttccctctcgtgattagtttccttgcctgtctttccccatcggcctgagaagcccttgaggacagcagttctgttgtatttgcctcagtggccccatgctcggcacagtgtggggctctgaaaagggggacgagccccagcccgtgggactgcagggcctttcccaaggctgcccagccccgctccttcccctgccaggccggggtaggacattcttcctgttactgctctaagagctcatgggagctcttccgtgctccttgcccacggactgagtgtggacagttggagacagggcacggaattttcatggggggtgatgtggaattggggatacagggtctgatggaaccctgtgagactggatagcaaatgcagtctgaggaagccagaccctcgtgggagccagcagtggactgatggcttcagtgggtgattcagggagggtaagggctggcccctccatggatgtggttttggggatgccatgtgtctacagggttatcctcatctgcacaagaagcagtgtggtcagtggaaaaatggcctccaaaagataggcatgtcctcatctctggatcgtgtgcatgttacctgatagtgcaaaaaaggttggggtggatctttgcagatgtgatcaaggaattcaggatgggtggattatcccggattacatgggtgggctatgtattagtccattctctcactgctattagaaaaaaaaaatgataggttttcttgctatcatgagaacagtaccaaaagggaagatctacccgcaggatcctattacctcccaccaggccccacctccagcattagggattacaaactcaacatgagatttgagcggggacacagatccaaaccatcccaggctctaaacaccatcatcacatgcatttttctaagagggagatgggggattttacccatggaagagtaggaggccacgattggagtgatgtggttacaaaccaaggaattccagtggccccgaaaagcttgagaaaacagggaacagaatctccgccagaaaaagtacagccccgccgacaccttgactcggcccggtggttctgatttcagacttctggcctccagaactgtaagagaatacatttctgttgttttaagcccccaagtttgtggtaatttgttatagcaggaactgatgcaagagtatttctcagatctggttatgtgttcccagataaactcagggaagtgttggctaggaccctgagcttcagaagagaaccactggcataccagctcttccccaggggaccgtatttacgctcttgacagagctgacctctttcaaagcacagatcctgagaaagccacaccttgggccacaccctgtccagacctccccagtgcccctgtctttgaaaaaaccaaacaagcaagcagtctctggagcagtcacagccattgctcaggtccccgtcttctcatcctgggttacacatcaacccccttctgatttcaatgtccccagtatctccagaatcttctctttagggtgctaaagtagtatttctaaatcacagctctgtttaaaagtctctattgccgtgcaagattggtatacaaaaatcaattgtgtttatatacaccagcagtgaacaatccaaacatgatattaagaaacttccatctacaatagcagcagaaaagaataaaatactaaagagtacatttaacataaaaagagcatagcatgtacactgaaaattacaaaacattgttaaaagaaattaaagacattttaaaaaacccaaataaatagacaccctgtgttcatggattggaagacttaattttgttaagatggcaacactcctcaaattgatccacagattcaacacaatctctgtcaaaatcccagctggcttcttggtagaaagtgacaagctgctgatcctaaaattcatatggaaattcaaggaactcagaatagcaaaaataatcttgaaaaagaagaacgaagttggacaactcacacttcccaatttcaaaagttactacaaagctgcaataatcaagacaatgtggtgctggcataaggatggacgtacagatcaacagactgaaatcgagtgtctagaaaccaacccttgcatttacggccaagcgattttcaacaaggctgccaaacagttcaatagagaaagaatcagattttcaacaaatggtgcttgaataaccagagatccttatgcaaaagaatgaagttgatcaaatatctaactatgacagctaaaactataaaactcttaggagaaaacacagaattcttccatggcctcaatttggcaatggtttcctaggtagggcacaagaagtgcaagcagaaaataaataaataaatatagccaggtgctgtggctcatggctgtaatcccagcactgtgggaggtttaggtaggccaatcacctgaggtcaggagtttgagatcagcctggccaacatggtgaaaccctgtctctactaaaaagtcaaaaattcccagggcatgatggcgggtgcctgtaatcccagctctttgggaggctgaggcaggagaattgcttgaacccgggaggcggaagtcgcagtgagccaagatcacgccactgcactccagcctgggcgacagaccaagactccatctcaaaaaaataaataaattggacttcatcaaaattaaaaacatgtgtgtttctaagaacaccaccaagaaagtgaaaagacaacacaccggatggattaaaatatttgcaaaccatatatctgataagggactggtatccagaatatacgaagacctctttcgactcaacagtaaaaaagacaaataacccaatttaaaaacgggcaaggacttgaatagaaattttttcaaagagcaatataaatggccaagcagccacgaaaagatgccaagcattattcattagtcatttgggaaatgcaaatcaaaaccacaatgagatactgcttttcaccagctaggatggctagaatcaaaaagacggatagtaacaagtgttgctgaggatgtggagaaactggaaccctcccactgctggtgggaatgtaatagtgcagccactttggaagacagtctagcagttcctcacaaagttaaacataaagttaccgtatgacccagaacttctacttctggatatatacccaggagaatatatgttcacacaaaaacttgtacacaaaccttcatagcaccgttgttcataataaccaaagagtgaaaataacacaaatgctcatcagctgctgaatggataaacaaaatgtggcatagccataacatggaatattattcagctctgaaaaggaatgaagtgctgacacatgctataacatggatgaaccatgaaaacattatgctaagtgaaaaacgccaggcacagaaggccacatagtgtatgattccatttatttgaaatgtccagaattgacaaattcgtagacacatgcattcaaggagtggttgctggctggtggggatggggaggcgtctgatgcatcattggatcagggtctctgggcgggaaccaactacctaccaggtaaagtgaggtcagctcctccccctttgctggtgagcccagtatcactgagtgacctgcctaggccctcagatagggcagagcagggctctgcttaaatggactgagttatatgaatatgtttgtgaacagcgccgaagggaagcctcttaagcaaaatcacctcctcctcctcatccttctcctcctcctcctcctcttcctcctcctcttcctcctccttctcctcttcctcctccctcctcctcttcctcctcctcttcctcctccttctcctcttcctcctcctcttcttcctcttcctcctccttctcctcttcctcctcctcttcctcctcctcatcctcctcttcctccaccaaacccatttcatgctcttaccaagggtgcgagattcttaaagacagcaatttgagtttggccgccttctcctgtgttgtgtttgttcagtgaacgttcaccgtgggctaatgaccctgtgcattcacgcactgggatccagttccctccgtgtgccattttgaggatccatctccaggtggtaattggcttgtgcgcagctgattttctgtcccagaggtccgcctcccacccctcacgctcactggcccaggagagcatcatgacatcagattgtttcccaacactttaattgcgtactctgggtttcaggttagtttgcggattatctttcagataattgaaaaggatgctttcagatgccaaatgatgactgtaagtactcatcaaagtgtccgcttactgatgacttcacttctccccgccgcccccaccccctccctgcccagctttgattacagatcctatcagctgcattgcctagcaattaagccatgtgtggctcaggggaaaagctgtgtttgaatcacacaaacacaggctgcaagtggtggaagggtccctggggatcatctggtccgactcatctcacaggcagtgttctgagatctctgtgtccaggagaagtgtggcatcttcccgaagggcccatggggaattaactgcaaacacgggatggctgcctggctctcctgacttctcggcagtgcgcttcctctcaccgtaattgtctgataaatggggttgtgggcacaatgcaaaccttgcagagaagaacaggctctgtgctggagccaggacacctgggcccccgggccttccccagcagggcccatgggggacctgggctggcagtgaaatcagtttttgtgcctgcccgttgtctttggtctcccttcaagaccctgataagttattttttcttggggagttgagaggcctaagcaagctaagggatgagaaataactgggacgtagtaagtgcttaatgaatgctggttcttgtctttttattccctgcgttctcctcaccccaggtttaggaaaggagctggatctgtgttggtccatggacctgatgtcaggtgactcaggatggcacagcctctgccacgtgaatggccttaaaagtccaatgacttctgggccatccactgctacttgtgcagaatggtaggcgactcccacaggctggcttgtatggttggattgctgtctttactgagcactcgtcctcgccagcccctctgaggatggcagggaccagcatagcctcaggcaccaagaactcccaggcagaagcactgggtccccagcagtgctcctggagagggagtgccaggaacgggagccaagaggatggccaggtcatggccctgccctgggggagcacacagttgctgggcagggttcacacctggctttccctaagtgtgtccctgaagtgggcccagcgtctgttgtggaaatgccagcacctcagctcaactgaggctcccaggagtccctgcctaacgaaaccgctcccctttggtaagcgagaatgcctccatttggccttggagtcccctttttctggcacacctgtctatggacagcgacatctggaaacggcctgagatggggtggtaatttgagatgtctgcaggcgagtacctgaggttcagctagaggacaagtgcgggcagcttctgaggaggagaggaggccctgtttgaccccacggcacatcgttaggggaccaccaaggtcacagagccaggcaggattcttggtgctgggaccacagtgggagccaggcctctgctctcaggagctcctggggcaggtggcacggggcaggcgtgagccgcatgggtggggtctgcccagcgacgctcagagccatgaagaacagcagagcagggtgggggacaggagtagtggggcaggaagggggtcagcaggggaggcctctcccaagagacctgcaggggtgacggggaggagcctgtggctgaagccccaagcatgcagaggccgtgtcgggaggtgctgtggccagtggggtggagctgggagctcaagtcgtagggatgatgggagaggaggacatgtggccctgcagtcctgggagagactttccattttatttcaaatatcactccctccttcattccgactcaggttagtgagtgaactgccctttttccactgtctggagctgctcaagttggatgtggatctgggtctccatgtggatctgggctgacttgtgtaccacccacggtgtaccgtaccacctctctaaacagccacagcctctgaacccaggccacccctagcgacttcagccctcagggaagctgtgtctccttcagctgaggctcctgagctctgcactagggtgcagagatgactaagtctctatccagtcttcggcactctcagtccatggtggcacaaacaggtgactgtcagcaacagtccaggccccaggtcagcgcaaggcacagtgggctcccaggggccaggcggcaggtggcgggcaggagcctgtgaaggctggagaaggtttccttgaagaaatgctgctggggtggagccctgtgggctgaacaggagtcccctgatgagtgacagacctgcagtctcctgcaaagactggcatcaagtagtgcagggcacacccatgagctggagtgggcacagccggggtgggcactttgcgtggatggaacacacagggaaaggagtctggttgggacagaggggtcctggaagagaaggctgcagaggaggggacagccgagtcccctggtttagtcctgacagcgactccaagaagaaatgtaggctccgagagatgaagcaccttgcccagtgcatgcagcttagtaagtggcagaggctggatgtgagcacagcattcctccctggcagctgggccgccttggacccctggctgggtgcgcatctcagtgcaacgccagacccagcggatcactctgtccaggtggcaagctagtcctgtgggccccaagatgccaggagctgctctgtggaactgtccctgccacctgccagctccgtcccttgacagaagatggcccgtggagaccctgtattcctcttgcttccctgtgaatgatgttttttccaactgctgttggttctcgtccctgcacgagtaggatgtaaagtctgactagatagcagcactattgctccaggtggggtgcaggctgagcccatccctcgccggccgtgggtccagctctgcaatgcactgtgggggtcccaggcctgcagccccggagctcctgcttccttccttgtgcagtgcagacacccaggactggtcttcaggtgctgggttggagttttcagacacagggtagcagggcttctaggctggtggccctggctccccagcctggccctggcctaccccatcagccccacatccaggcgtctgccaccaagttgctgcttcgttcagtgggaacagtggggcatttgtctcccaagtgcatctgtgtatgtaagcgccccacagcacaccatgccaggcccacacgcagccaggcccacgcacacacgcgcacacgcgtgtggcacacacagactgctctttggcctctgctcacactgttctctctgcctctaggcctttcctgcctgctgccatctggataattctttccaccctcagcatgccacttaggcatgtcctccagaagctctcctgagatggagaggtccccctactcccctggccaccccccatctcaggacctcaagggagactaaacctgctgtctgagtgtctgtctccccagcagacaggaatgggggactgtgctctctacccctagagcctctgtaccagcacaggcctggagtctagcacagggcaaatgttgacggggacagaaaaaaagaataggcggcaggcggcgggcaagagcctgttttatttgggggaaatcagggagggctccctgtgggaggtgacgtgtgctgaaagctggggtatggacaagtagctcctgggagcctgaccacgcagtgatggtggaatccttgtcgaggggctccttccacacccccaccccacgcgcgctgcagaggggtgatggcagtgctgagtcctgggttgcggagccgcatcccatgcagagtgacctgtgcactgtccctgtccctttgtgttaggcaactggggttctaatgtgccagcaaccacccagctgggcgaggacagagccagggctgcccctgagctgggcttgtgaccaccatgctgccctgccttgactgtagcgccaatccatacaacatccaggctagaaggggcaccagagcccagcgcctgggcttacgggcaaagcagtgcaggggagacgggcgcctgtgtgagtgtgtgtgtgtgtctgtgcaggggagatgggcgcctgtgtgagtgagtgcaggagagacgagtgcctgtgtgagtgtgtgtgtgagtctgtgggcaggggagatgggtgcctgtgtgagtctgtgcacgggagacgggtacccgtgagtctgtgcacaggagacacacctgtgtgagtgtgtgtgtgagtctgtgcagtggagacgggtacctgtgtgagtgtgtgcaggggagatgagcgcctgtgtgagtgtgagcgtgtgtgtgtctgtgcaggggagacgggcgcctgtgtgagagtctgtgcaggggagacgggcgcctgtgtgtgtgagtctgcgtgttagagtgcgagtgtgtctgggctgccacagttgcccgaagctggccagctggcagcatgacagggaccgtccctgaggatctgcgaccctgttctcaccagcgtggcttgtgcactcccctgggagccccgtgccttccttcattgctgtcaaggaatacctgaggctgggtggcttataaagaaaggagggtgaattggctcgtggttctgcaggctgtccaggaagcatggcagtatcttcttggcttctggggaggcctcagggagctttgactcatggcagaaggtagagcgggcacaatagagaaggaggaggaagttgccacactctcctaaacaatcagacctctcgagaaatcactcactatcgcaaggacagcaccaagggcactggtgctaaccatttatgagaaatccacccctacatcgagtcaccttacaccaggccccacctccaatgctggggattggatttcaccatgagatttggtggagacaaacatccaaccataaccactctccacctggacagacggacatttggggcccatcatcctgtgccgtggggctgtcctgtgcattgtcagacgtgcagcggcgtccatgctctctacccactgaatgccggtagcacccactccaccagatgtgacaaccagcaatgtctccaggctccgccaagtgtctccccaggggcaggaccacccctggtgagaaccccaaccccttggattgcagtcagtgcccggagcctgcctctcagggcagagatggaggcctgccttcccctgtgagcaacggctctggtctccgaaccccataccccacgcttgtccgtgcccctaccatggcacctcttgctgaagaacaaagcgctccccggtctctttcattctcagcgcacagtttctgaaactctaggtggtgggctcggaacttctgaatgtgattagtggagctgagctctctgcgtcagcggcagcagagcacttgagttcctgttcaaacagggctaaacttatctttcggaaaataggctgtttttgaggcctaatcataggcattaaagccattaattagtaataagattcaatttcccagtgtccttgcccgtgtgtgtgtcctgatgtagagattgtgctgcgagcatgttccgcagatgcatggacagacacctgctgttcccgctcagcagcgacgcggcgtcatgttccccagcccggccaggccccaaataaccccattactgagaaggatgatccacaccaaatgtccttcccctgggtcgggagggacgcaccgggatgggagcccgagaaggctgtgggtagggcccgccttcatcagagcaccgccttcaaatgctgcactgaggccggcctacagaagggatgtaccagtcctggagttgaggtctctgctcagtaagaccgccatttggtcctccctcgatcacatgattctctcggttttcctaaccacctccctcctacctggccttcccctgggacccacacaggcttccggcgtcacaggtgtacttacccttcatcccagcacagggcactcgggagcaaagagccaggaacatgtggacggccggaagagggaggtctgggtgtccccccagcactgttgaccacacaggttgggtgccaggttacatgagcagatgcccaaaaatgctgggcccataggaagctctcagagaggcactcgcccctccctgtgttaaagtgtggctcaggaggtctgagatgtagatatcctggggggggatgaggccacatctaaacaggcatgtgaagctgggtcaggcgatgctgctgtgataaccacacacagccacacaccgaggggcagcgtgcacacccttcgaccacatccctgtggctcccagcaggcctgaggagtgggcagggaagaccatggaatcctcagtttccatctcacaacccaaccacgcagctcccctcaaggcagcaccagagcttggtgcgggcccgggaccctagacacctggctgtgtgcttccgaggcaggcgtgggtctcccgcccgccgggcaggccgtgggctgcagcagatgagtgtgagccagtgccaaagtgaatggagcactttcccacacaagagctccagactgacatttctggtgcattttggataatttatgatgtttagatgagcgtgcatgctgattttagctgtaccgtgttcttagcctcccataatttgtttgcatcttcatggatagaatgtttctcagaaagaattcagtgttttgtttttggctttttcaaaacaaaatgctccccacgtgggcttttcttttaaaactttggtctgacctgcagaaggttggcaacagggcccctgtgctggccctcaatatcttgttttgtttctgaaagccccccaccacacctcttgtgaaggcagctggcccagggtgttgtgtgatttgtgggtcacagtgagttgactttgtgtcaagggagggctgtggaccttgtgctcagcctgcgcccacgaaggcaggcgtgatggtaactcgactctgcgtggccgtcaggagggaggtgggagaacaaagcgtgtgcccagggccagcatctcacacgggggcgggggtgggtaccgttcttcatgggctgtcgtggagtggccacggacctccatgccagggtctgctggcactgcctgagcagctgccatgccccaggaccatgggccgcccgatggctggctgtgcctggagggtgctggcaccaggaagggccaggctgggatcctccgcagctcccgctctccctccccagcagccgccatccttgccctgcctgatagttaacagttttgacaggccaggctatttttagaaacctgttcccactccttttccctgtgggaaaaaggaaagcaagttaaattttaaaattaatccaccacccttcccctcctccaacatacactgacacacacattagccacccaggacctgaagctcagcagagtcctgggccacaggaggggctgccctgccaggcgccaagaggggcatgtgggtttttgatctgggaggcggtcctgtgggacttagggtgttgtcatcattgtccccagcagaaaccagtgcagtggggaagtggcttctgggctgaagcctggttggaattcgggttcctagttctgagtccatgccctttgtagtaccatggttggcagtggtggaggacgccacagggtcagatgcccgcggtggggttcctagtctcacttcccacaaccccgtgccttgcaaagctctttcatgcccccacccgatttggtcctgacagtagccctggaagacaggcccaatcaagattttcacccaggacacatctggaggcctggcgatgaaatcaaaattgctcaaagccacacccctgggagccgtcttcctgtggggtctggtgagcacccagtggtctctagacagaaacacacccaggtgctcattggcaggtagcaccgaccccggacagggacgttgaaaaacagtggtgttagcttgaacaataaatttaaagtgaaagttaatagtcgccagtttttaactattaacctaataaccatgtagaaagaaattctgtgtatatcagcgtccttagcttggttcatttacatttaagctttcggtgaggcctttttccatattaggctttgaaagcgtctgcagggtcggggcagaagggaggacagagccaggcaggcccggttcccaccttcccttggctctgcccctgcccggcagggagattttagggaaggtgtcatctctttgaaccccaggtcctcatccttaaagggtggcgacagcaacccctgctcccaaggctgcagtgaggatgaaagagtcatgactgtacagtgggtccagccacatctgccccccacccctccccgctcaggctacaagagtcataaagcagctcagttgcctctgaacgagatttttcctcctcaaattcaaatcaagcagtgactggccattcccgcaggctgtgactgtgctgggtggccacactcactcacgcccgtcagctcgctgtgttttcataagaaaggcaaggacttactgggtgctggtagtaatagaagtgattgttggtgtgccatgactgactcagtctctgaatttttttaacagctttgttgtagtcttactgacacacaataaatgaaacatatttaacatgtatcatttggtgtgttctgaagcatacacacccgtgaaaccgtcaccaccaccaagattggacggagtgcgttcatctctcccaagctccctcctgctcctttctgaccctccctgacaccttcccctccgatcactgacccgttttctgtcactgtaggtgaggttgcactttctagagttttaaataaatggattcccacactgtttttttaactggctttgttcatgcagtgtgattcaggtatgtttttgcatgtcccggtagctcttttgttctgctgagtagtattccactgtatgcatataccataacagttctgatccactcacttgatagacacttggcttgcttccagtttgtggcttattacaaatgtaaagcagctaagaccatttgtgtaaaagactttgtgtggacgtgtgctttcatttatttggagtaactgcctaggagtagaattgctaggtcaggtggtagttgtatttttttttttttaagaagcttccaaactgttctacaaagtggttgtgccattttacatgcccactggcagtgcacgagagttccagttcctccgcctccccaccgcacttgatgtggtcggtcattttcaccctaggccctctaacggattagtgaattcgcgtctcgctgtggttttgatttgcatctccctactgactcacggtgttaagtaccttatatgcttacctgccatctatgttgtcttccttaggagggcgtctatcaactcttttgcctattattttactgggtttatttgtttgtttgtttgagacagagtctcgctctgtcacccaggctggagtgcggtggcgcgatcttggctcactgcaacctctgcctcccaggttcaagtgattctcccacctcagcctccagagtagctggaattacaggcgcccgccaccacacccagctaattttttgtatttttaatagagacggggtttcaccatgttggccaggctggtctcgaactcctgacctcaggtgatccgctgcctcagcctctgaaagtgctgggattacaggtgtgaaccactgcacctggccttgagttattttcttattagtaacatttgagagtgcttcatatattgtgtatataagtccttcataaaattgatgatttgcaagtacatattccctatctgtaacttgtcttttcattctcttaatagtgtcttttgagatcaggaatgtttaagtctagttgatcaaggttttcctttttttttcttctttttttttagatggagtcttgctctgttgcccaggctggagtgcagtggtataatctcagctcactgcaacctccacctcacgggttcaagcgattcatgtgcctcagcctcccgagtagctggtactgcaggtgcccgccaccacacccagctaattgtgtgtgtgtgtgtgtgtgtgtgtgtgtgtgtgtgtgtgtttagtagagatgaggtttcaccatgttggccaggctagtcttgaactcctggcctcacgcgatccactcgcttcagccacccaaagtgctgggattacaggtgtgagccaccctgccaggccaaggttttcttttaaggcatgtgcttttggtgtcgtatctaagaaatcttggcctaactcaaaatcacaaagagtttctcccacatgttctttcaggagttttatagtattagattctacatttgggcctctgattcattttgagttaattttttacagaatacaacgtagggactgaagttcattttagcgagtgtgtattcagttgttccagcctcatttgttgaaaagacagtcttttcttgactgaattgcctttgcatatttgtcaaacatcatttgtccgtatatgtgcagatctatttctggactatttattctgttttaattatctgcttgtctgtcttgaaactaataccacgcagtcttaattattgctgttgtgcgaaaactcctaaagtcaggtaatattttggccattctaggtcttttgtatttccatatgaatcttctcatcagtttgccactttctattttttttaaggcctgctggaattttaattggaatgatgttgaatacgtagatcaatctggggagaactgacatctttgtattgagttttcctaaccaggatcaaggtatatctcttcatttttttgagccgtctataatttctgtaaatattttgtggatttccacataccagtctcacacgccttctgtcagattcagccctaagtatttcatattctttatgctattgtaaatagtattttttaagttttgatttccaattgcttattgttactatatggaaatgcagttgatttatatatatatatatatatatatatatatatatatatgtcagtcttttatttatttatttatttatttatttgacatggagtctctctccgttgcccaggctggagtgcaatggcgcgatctctgctcactgcaacctcagcctcctgggttcaggccattctgctgcctcagccccctgagtggccgggattacaggtgcccgccaccatacccagctgatttttgaatttttagtagagatggggtttcaccatgttggccaggctggtctcgaactcctgacctgaggtgatccacctgccttggcctcccaaagttctgggattataggcgtgagccactgcgctgggcctatatgttgatcttatagcctaaaaccttactaagcctacttattctagtggctgtttttaaagattccactggatttcctacaaagtcaatcatgtcatctgaggataaagacaattttaattcttttccaaactaatgcattttattttttctttgcctagtacttccagtgcagtgttgaatagaaatgctgagaataagaaattttctgatctgaaggggaaagcatggggtcttttacccttaagtatgatgtctgtggattttcagagatggccttgatcaagtggaggcacctctctcctgtcctggcttgctgagagtttttacattttcaatcaggaatgaatgttgtgtagtgtcacacactttttctgcaaccattaagatgatcatatggtttctctttttttatttgttaatatggtgaattacgttgattgattttcaaatgctaaaccaaccttgcattcctaagatgatcttcagttggtaatgatattatgttttcatatatgttggattcagtatcctaaaaaaccttgtaagaatgttttaatctatgtttataagggatatttgtagttcttttgtaacattcctgtcttggtttggcatcaggataatgctggactcagaagatgagttggaaaatattccctctgattttctggaagagtttgtgtctttcttcaatgtttggtagaatctgctagtaaaataatcgggacctgaagtttctttgtggatgttgactatgaattcaacttcttttgtaggcatattaaagaatattctgattagctgtttcttctttagtgaactttggtagtatgtgtctttcaatgaaattatccattttatctatgttgtcaaatgaaatgaagcttttcagaatatttccttattttcttttcaatatttagagaacctacagtgatgtcatctcttttatcgtgatattgataatttctgtcttccttcctttcctgatcagtttggctagagatttatagattctgttgagcttctctaagaaccagcttttggtttcattgattttttttctattgattttctgtttgttatttcattgatttccattttgctgttcatccttttcttttctttctttgcatttagtttgttcttctattcctgatttataaagtggaagacgaaatcataaatttgagtttttttctaataggtgatttgtgctatgaatttccttgtaagcattgctttagtgatggctcgcagattttgatatgttatactttcatttttattcagtttgaaataattcttaatttctcacttaatttcttctttgacctgagggttatttggaagtgtgttgttcagtttctaaagatttgggaattttccatgtatttttctgttagtgattgctaatttaatttcattgttgtcagggaacatccattgtatgacttgaatccttttaaacttctagtcaagaatatggtctatattgataaatactcaatgttcacttgatataatttatattctactattttcaagcaggatgttctgtaaatattgattagaacaagttgtctgacaatgtcatttcagtcttttatgccctggctgattttctatttgctggtatcgatcattgaaacaagatattcagttgcccacctaccatagcagatttgtctgttaccaatcagctccattagattttacttaacgaattttggagctctgttattacgtatgtaatttaggattcttatgtattttttgaggaattgacccctttatacttatgaaatggcatttataactttataatatcaattgctattatgttaatatagccaatataaccttctttacatttgtattaacatgatatacctttttccccccttttctgggagcggggcccctgtggccaggctagagtgcagtggcacgatctctgctcactgcaacctccacttcctgggttcaactgattctcctactttagcctcctgaatagctgggactacaggtgcatgccaccacgcctggctaatttttatatttttagtagagtcagggtttcaccatgttggccaggctagtctcaaactcctgacctcaagtgatctgcctgcctcggcctcccaaagtactgggatttcaggcatgagccaccacacctggcccctttttccatactttaaattttaacctatttatttttttacacttaaagtacattttttgtaagtgcttgcttttctttatcctgaaaatctttgccttttattgggtgcgtctgcatttagttcatttacatttaatgtgattattaatatacttaggtttaagtatatcatcttctgtttgttttctgccttccccaactgttctttgttctatttttctcttttcctgacttgttttggattcactgagtacttttatgattccattatttttatacactatttctagagcagttttaggttcacagcaaaatcgagtagaaagtacagagttcccatatacccctccctcccaccgcacacacaggcacacacacaaacacacacagcctttcaaactctcaacatcccacactagagtggtacatttgttataatcaatgaacctacattaacacatcaatatcaaccgaagttcagttttcactaaggttcactcttggcattgtacattctatgcgtttgaataaatgtctaatgacatgtatccactattagagtatcatacagaataggtgtattgccctaaatgtcctctattctctgcctgtttatccttctttgtaccctaacccctattgtttggccttttctagaatgtcatatagttggaattatacagtgtgtagctttttcatattggcttcatttacgtagtaatacacatttatgtttccttcatattttttcatggcttgatagctcatttctttttggtgctactatttcattgtctataagtacagtttatccattcacctactgaaggttgcttggttgctaccaagttttggcaattatgaataaaacttctctaaacatccacatgtaggtttttgtgtagacataaattttcaactcatttgggtaaataccgagaagtgtgactgctagattatactagtaagagtatttcagttttgtcataaatcaacaaactctcttccaaagtggctgtaccattttgctttcccatcagcaatgactgagttcctgttgctgcacagccttgtcagcatttggtattgtcagtgttttagattctaataagcatatagtggtatctcatcattattttaatttacaatttcttattgacgtatgatgtttagcatctttttatatgtttatttgcctttttttccctcttttttgttgaaatgtctgttcacctctttggcccatttttaaatcagattgtttgttttcttatcattgggattttggagttcttcgtatattttggataacagtcttttgccaaataaatctttgaatatatttgctacggcttgtcttctcattctcttggtggtgtctttaacagagcagaagctttaaattgtaatgaagtccagcttaccagttctttctttcactgattctacctttggtgttgtatgtaaaatggcattgccatacccaaggttatctagatttcctcctgtgttatcttctaggagctttatagttttgcattttgcatttagttctgcaatccattttgagctaattctttgtgaagggcataaagtctatgtctagattaatttctttgtatgtggatgtccagttgttccagcaccatttgtttaaaaggctatattttctctgttttagtgcctttcttcctttgtcagagtttatgatacagacatgagtgtatttctgaactctctgttctgttcccgtgatctgtttgtttctgttctggtccattgatctatttctttcaccaataccacattgtcttcattactgtagctttatagcaaggcttaacatagggtagtgtcagtgctatgactttgttcttctccttcaatattgtgttagttattctggatcttttacctctccatataaactttagaatcagtttttcaatgtccacggttggattatggttggtattgcattaaatctatagataatcaacttaagaagaactgacatcttgacaatattgagtctttctacccatgaacatagaatagttcttcatttatttagttcttatttgattttctctcatcagagttttgtagttttcctcgtgtagctcttgtacatgttttgttagatttatagcacagtatttcattttggggatgctagtgatattatgtttttactttcaaatttgacttgttcattgctggtatataggaaagcgattgacttttgtatattaaccttgtgtcctgcatccttctaattattgctcttcactccaggagggttttttttgtcaattcttttagattttctaatagacaaccatgtcatctatgaacaaagatagttgatctccttcattggcttattagctataactcttttattatcttagtggttgcatttgaggtttagaatatacatctttgacttatagtctgtcatgaagtgacattatacatcttcgtgtatactgtaagaaccttattataatgtagttgcaatcctccctatgggctttaatactattgtcgtcatacgttttatttatacatacattataagccccacaggactttattattattgtaaagagatttcaagaagaaaatcttatgtatttactcatgtagttaccatttcctgtgccttcatttctttttattaatccatgtttccatatggtgctattttctttatgcttaaaagactttgtttaaacagttctgataatgcgagtctgctgctgctgaatgccttctgcttttgtatttctgaaaaattctttgtttcaccttagtttttgaaagagttggttttttgctgggttcagaattctaggttaacagttctctgccctgcccaccccgcacttaaagatgttgtcccctgtcacttctcttacattgtttgtgatatgaaattggctgtcattcttatcttcattcctctgtatacaacatgtctctcttttctgtctaattttgatattcttgtcactggttttgagcagtacttattaggttggtgcaaaagtagttgcagtttttgccattacttttaatggcaaattaaaagtaatggcaaaaacattttacaatatagtgtgccttggtgtagtttacattatgtgtcttgtgctttggatttgtgtagcttcttggatctttaagtttatagtttttatggatttggggaaaattttgaccattattttttaaattatttttcctgtctccctccactctcttctccttcagaggtctccagttacagctgtgttcagcaacttgaaattgtctcagagcttaccagtgttttcttttaataaaatttttttgtctgtgtgtttcattttggatagtttgtatagctgtgtcttcaaattcactatttttaattctgcaaggtctaatctgttaactccatcctttttgtttttatctgagatgttatatatttcattgacataagttcagtctggatcatttttgtatcttctatgtcattaaatttttgaacaaatagaatacagttatgataactgttttaatgtcctcactgctaattctaacatttatgtcagttctgggcctgttttgattggttgtttttactcctcattgtgagtcatatttttctgtttctttgcatgcctggtaatctttcattgggtgccagacattataaattttgtcttgttgggtgctggctataaatatctttgagatgctaagatacagttaaattactcagaaacagttatatccttttgggttttgcttttaagattttttttaggcaggaacagagcagtgtttagtctaggactaattattccccactactaatgcaagagctaaatgtgctacctaatgccttatgaattctgatgggtgtgtgtgtgtgtgtttgactgatgggaacaggcactattcctcgctctgtgtgagcatcaggcacattttcctgtaacttctcaagtgtttcttgcccttagccttgggtactttcagtgtcttgctgaatccgtaagggaaccccccaccgatctctataggtttttttttctctctctctcccttccttccccgtcagctgcagctctcttgtctcctttccagtattctgtcctgtaaactctagctgcattcaccttcctagactctcagttccagctcctcaactcacagtctttaggggtgcccctgaggtccccactccctgtgctgtcacaatgagctgggatgattctagggctcacttcatttgtgtcttttctctctctgttctttgttccctaatggccagtgtcttggaaaccattgtttcatgtattttgtctgttttattgttttatgttgtttgttccaggcggagggtaaatctatccttgttactccgtcttgactggaagcagaagcctcattcattctgaatgttttgataagattttgtttcaccaacatacacgttatgtaagaagtctcatggccaggatgaatacacgatctagaattctttattgtcaaggaggaaatctttccttcattcatttgctcattcaggaaatgttgacctcgcctctacaaggcctcgcctctacaatgccctacaaagcattaggttgcacatttagcccttgcattaggagataacacagtgagtaaacaggcacgctctgttccctctggggcttatttggagccagacctaaggagttttaacaactctcatgggtaaactttagaaaaatgaagctctctatccttcattcagcaaacatttactaagcacccagcatctgtcagaccctgctcagccctgtccctaaggagcatgtggtctaaccaaggtaggtggtgcagaagtacttcctgctaaatgctgaaatggaaatccataggaaaggggactgtgtttaattttgaccatgcggtagagaaaacacttcctggagaaggtggcagttgaactgactcttgaaagatgatcagagcaggaggccatggaaggtgaaggaccttggtggtgtgtgtgaagagtggaagggcctagtgtggctggaacctcagtgtttggggctagttcaagaatgactctgcaggggttacaggcaagctgggaactggcacacaggagctacagagggtgcaaggcacagcccccacgtcatcaattggtggtttaggcgaaagtaaccatgttgtcattttatagtaagtcacaggcgcaatggactttggcttttattgcctcagaatcatttttgttttccctgaggaacttcttatgcagtcgtttcccaggtaagatttatcattccttttgttagctggggagcctgtcctacaccaagctcttgaagccagcacacatgtgcctttctgtgtgtgtgtgcgcacacacacacagacacacacgtgcacacaggcagatgacgggaccaaagctccagaggctccgagccatgtggcggagtccaggttcagaacacagctgcgaatgaggcctgggtggtcagctgtgccttcctaattaggcagtcgctattgcgatgaagctcccgtttgccgaatgggttgagatgcatcacctgtgtaaacaagcgacgctaacccctgggtgatgagcatgtgtcttcaccctggtgccaccccatccttcccaattcgttgtgacctctctttgggtcacggaggacaaaccgatcaatactatgttgtgacgagtgagatgacgtcacatagcagctgacgtcccctgtttgggcctgttggctttgcctggagtggctgagttcatctgtgcgctgagtcatctgactgggaggctgcagcctggcgtccctgtgcaggaggcctgcaggatggaaggaaccctgtcggggagcccagagactgaggctgggtcccaagcccccatgactagcacgtggtcctggcagagtccagcctcgtcctcttgtcctcaggaaggaggttggtcagggttggtggctattgctcaagacctctgaaggtgcctggtgagaggaggaagacagctcagagccagaagcaacagaagctgggaggctggcccaggggctgccttgcttgtcagatgcatggcccagagacactctctggagtggacctgccttgggtgtgcccgaaggcggagttgactctcatctgtggaaatggacgagggcatttccaggcacacggcactttgaggcccaggtactgggcaggaaggacagatggccacagagagccaagcacttcatcttgaccatggccaggcaggcctccgaaggctccagaatttgggcttcaccttgtagggcaacacgaaaagagggaagtggccagctagggggatgtcggggtggccccagcctgccagactcacagcctgggctctgggctcacacctggtgaggccaggccatatctatgggggaaaccaggctggcctcagatgtcctcgggactcagccctgggctgccgccgtgcccccagttagcccacacccttcccctggagatgtggcctcggccccttgacttcccagcgccccagaaaagcggtcagtgatttctagctgagaacaacacgctctgggcccagcccaggccaaaggccttttcttaagcatttctgggaaaagcaaatttatcagcctgtgcaaagggaaaatgtttacaggaatggaagacacaaagggaatgaataatcagggctcggctcggtctccagagaccaatattctcatctagtttgcttttattagagaagcaagcaaagagaactcaccctgtgactgggagtcagcccctcagagcttccggactggcaggcgggaaggggctgaggtcctcccacctgttgtggacatggccctgtgagcccctgggtggatgtgagtctgtgcagaggcccagggttccccagagtcccgcccagtcagggctaggtgccccacagacccggacagccccaaggatgcttcctgggcccactctggcccttagacattcttggggaccagagcccctttggaccccttagtggcagcctgtgccccactatctggttaagcattgcatgaggcgacatgataccatccgggcgttctgctcaggttcttgttcctgggacttgaagactttgctgttgatgctgtgtgttctctgtccccctccgggcactcccaaaagtgtgtgacatcgacagggattagggctgggccagaagagcaaggttggttcctagctctgccccttacctgtccactggagagattctgctcccttgccaagtcttcctatcctcatcaggaaatgacaatttcaataattaatgataataagactcagctcagccttgccaggagaagccctcgttcctccgggaaatgttgtggagcacctgctcctggccatgtgctgcttctggtcctggggaggccgaggaaacatcgcactgtgctaaggcaggtgagccagggagggaggacgcggcacagctgctgtcgctggcggtcagcgggaagggggtctctccaggcagtgatgcttgtgagtggacagtgaaggtcatggggatgagtttgtgttgggggaggagataaagctgccccagggtgtgcacacatgcactcacacacagacacacacttgcacgcacccgtgcagacacacgcacacccagcccttcctgaggctggccagcccaccgcgcccccagtcccagcctccatcctccggtttctcctgagccccttccagagccttccacctgtccctactcggtgtcaccacccacagtctcttctcacagggcagcccgagtggcctgtgatccataaatccatctatgaccctctgctcagcccatgccgacttctgtctcactcagggcaggcgtgggagcttcgtggggcctcctccttcttgccgccccagtggccttcgcccgcgtccatgtggcctggggagcttgtctctctcccactgcgctctcagcagcctgcagctccagccttccccaggctcctggtccagctcagcaccgtgctcctctctcccctcgcagccggcctggctttccttcgtagggtcgaccgctgtcccacgtgggagatgatgtttggatgttttctgacttctccactgaacatgcgtgccgtgaaaacaggcactttgtcttcctatgttatttatttttagacattttaattttctttctagaagggtgcctggcacataggaagagctgaattgagagtcgctggatgaatgaatgcatggttgattggttggtcggtttcaggcaaaggttccgcacacacagaggactacagaggtggctgatgggtggttttgctgccggctggagtgagcgggtggtgagggactttgaggcaggtggcagatgcctgggagccagggtgggggctgtggggaaggtgcaggctggcgtggggcatgggagtgatggtgtggtgagcaggaagcagctgtcactgtccagctcagcctagcgacccagctgtcccaacgacctctgaggtccgtccaccggggaggactcaccccatcatcgcctccatttcccttcggggcagtcgcctgttcaggctgctgattcccccacccagtgccgtctgctgcactgcctgctcccagggaggctttcaggacaaactccaggaatgtagccggggcctctggcagccgttgggaactttgtcttcatttgtgttcattttagtgatcccactggtgctaaatactctctagcattcactttggattttcgttgaaacctgttagagccatcggcacgaggagggacagaggcagagacctgggcgcgccaggcgtcctgctgggtgactaaccccacacagccctacctgctgggtaggtgcagccacgtgactcccgaggcagccagtgctccttcagaggcgtggtcctgccacgggacccacagccactgcgaggtggcccagggcacaaactgtgggcctcctggaggggtgcctcactggggctttaggctggaaaggaacacagtgacctcagcctccagcctcacctgcttcatgaagctgctctgcagggattcactttgcattcactttgcaaatgtcggcagcattggtttcttctgaggcctcactccttggcctgtagacggctgccttcttcctgtgtcttccctctgtgtgtgtctgttttaatctcctcttataatgacaccagtccgagaggattgggcccatcttgggcctcattttactttgtatgtctaaggtattgtactgggctttagggcttcaacatgggaatttttggagtcacaattcagcccctaacactaggtgtcgtatatgttagtagacatttaatagagctgcacaaagattagaataaaagtgagctatgagctctgcgtttagataacccctgggctcagctgtggccctgggaattttatgtgtagccgactccaggcaaggcagtgggggtggccatgtgcaccccgaaggcagacgcctggggagctcacaggcagagtgtgggacttctcaggatcccaggagcgtgggctgggatggtggccatggcgatggctagagtgaaggagtttggggactgtcagatgagtccctgatgaggccccagcccccatctcctcatctgtaaaatgggataatactctcccctcactgggttcccatgaggtgatgtgaaatgacctctttgtagcaccaggcaccagtggggcactcagtctgggcctctccctctgccctgcacgggcctgtagggccacaggcacagacctgtgcatcagtgggttcacctggagcatattcatgcgtgtaagcacatgtgcacacgtgtgggccgtttggcttaatgatcaccttccatgtggatcccaggtgatgtgagaagcaggttatctgtaggcctcagaggttggcgggctagatagatagccctcagcagcatgtggtagccagtgccccatccatcctccacaccaggccgcagcataattaagtctccattaaaggggctgtcactgtgagctcagatatctcccttctcaacaaacctagccacccagatccatgctgggcggagacttctccctgttccctctctcggcaagccaggagggctgtgggcactgagtcaggctcctgtgttgtgtcctagagacacacctgaccctaaaggccgagggtgcctggcctggccaggagagctgcaggagcaggtttgggtcagcccagcctggcggctctggggtctgcgctgtctgcacacacaggcttcaatcactgacgcgcagattctacttccacttgtcacaaatatccgtgtggtcctcagcgcctaccactcgtgtggggtctgctgccactcccctctgtgaaagtcacttcagatgatcagcagtggtcctcctggctgcactgtcctacgcttccatgacctggccagagctcagctttctctcctgcatgttttttatttcaaaacctaccccaaggcccctatttcagaagagctggccagggttgcaggcttcagaggcatggatgagtagtgcctagacactctgggttcacatggacccctggcttcaactggcatacactgtgtttctacacatgggatccggcgtcctgggcagggcttcatgattggctagaaatgagtgacaggaggcgccaggactgatgccaggtttcttctgagagtgctgggcggcaccgttctctgagatgggactttgcagaaggagcaaatgtggcagatagatgatgcgttaagtttcaaaagagatgagtttggggccctagagttttctgggagccagtctagcaccaggactggaggtggctgggaaggaggagttccctgccctgcaggtgcacaaaggatctgagctccccctttcagctcccaagcaggcagaggcatgctcaagggctgaccacacagcaagttcagtgtctccagcatgttggcgtccctgggggtacactttctagaccagttcctctacccaaccctcttctccacttgtccagggactcctgcgggagggtcccagaagcccagacgcatcaggagaggcgtggtgactcttccctacgcccgccaggcccgggcagggccagcctttgttcaaggtctctggtggtgggactgtcctcagctgccttcctgcactactgtcttctggaattttcctcctgcctgctggggtccaggttgttgaacttgttttccccaccacgctaagggctcagtccatctctgtgaggcctctccttttccatttttaagtcattgaatttcttactgtttctcattagtgatgtcccccagctctgtggcctcaggaaaagagcatctgccatggtttcctccctcctagagcaccagacgctggctgagctgtccactgggagctctcagttgaggcactgtttgcgcagtttcacgatgtcacagagctggagaatgatggggccccgtggggacccaggcccatctcgccaaagcagctccctgtggaacctttgtgaacccgtgcctggagaacttcactaagatgacactcccattgtgaatccctaaagcctcagacaccaaagccttccccgctctgcaaaggagcaaaacatggaaagaaatgtgagtctcaaaatgcggggagccacggtgaggaccggcttccgggagccagggcttcttcaggtcgaggtcccagcccagcatacaaggtcgggaggtggcagcagaacctctctccggggcgtctgggctccattgtcaccactgccctctgagccaggctgccaggagtaacgggctggcagcgctgtgggtgccttaggaaatgaagggtcctgaagagacctgcagtgcagatgggagaccagcactcgggattgggctttcgctggtgtctgcccagggtggccagggtcttccaggccagcgcagtcagtgtggcccacagggcctggcccaccactggcgggtggcaaaacctgcctgccccgtgcccccagttccctgccttccctggggagttgcaggagctagggtcacaagtgtcatattcactgctgtggctccagggtccagcacccggcaggcaccagatcctagatgctgagtaaatgaccacttcctttatgtatttcttcttctttttaagcatgttttaaacaatttgtacaaatcagtataaaagtaattcatgctctacctaaaatttagtgaatattagttcttccactcattttctctgacctatgagatctaggttactgcttattttaagcctttggatcattactattcaatcttatttttattcttcactttatttttgtttgtattctgtgtttgcatttgcttctttctaaaagtatctggaagtgcagcagtcctcccttatcctcggttttgctttccttggtttcagtgaccctcgttcaaccatagattgaaaatgtgaaatggaaaattccagaaataaacaattcgtaggttttaaattgtgcagtgctcagagtagcatggtgacatcttgcccgtcatgccctgcatctccctttgtccagtgaatccacgctgtgcacattccccaccctgagccacctaggaggtgtctgccgtcagatcagctgctgtgttgtagtgctggcattcagtcactcttattttactcaattgttcttttgtgttattagttaatattgtaagtctctcactatgcctaatacataagttaaactttatcataggtatgtatgtcgaggaaaaaacatagtgtatatagggttcagtactatctgaggtttcagccgtccactgggggtcttggaacctgcccccgaggataacagggttactgtagtagtttttctaacaaagcactacagactgtgtggcttagacaacaaaaagttatttctgacagttgtggagtctcgaaattcatagaaattcaaggtcaagatgtcggcagcactggtttcttctgaggcctcgctccttggcctgtagacgactgccttcttcctgtgtcttccctctgtgtgtgtctgttttaatctcctcttataatgacaccagtccgagaggattgggcccatcttgggcctcattttactttgtatgtctttgaaggccctgtctctaaatacattcccccccgaggtattgtactgggctttagggcttcaacatgggaatttttggagtcacgattcagcccctaacactaggtgtcacgtatgttagtagacatttaatagagctgtacaaagattagaataaaagtgagctatgagctctgtgtttagataacccctgttgatgaattaaaatgaaaacggaagtcatgctcattgtagaaaactaacaattggaggtgaacacaaagaagaaatggactattaccagaaatcccaccatccagagatggtgaccactaacagataggtatgcagctttctagatgattttccaggtacatattttattcaaaattagacatcactgaaaatatggccagggtcttccaggccagcgcagtcggtgtggcccgcagggcctggcccaccactggtgggtggcaaaacctgcctgccccgtgcccccagttccctgactgcccagggaactgcaggagctagggtcacagctgtcatattcactgctgtggctccagggtccagcacctgggaggcaccagatcctcaatgctgagtaaatgactgcctcctttatgtatttcttctatgcttttacttaatatgtaaaactatgcttttacttaatatgttccatgccaaatctacatgtaaattatgatttttaatggctacatagtattcctttatgcaaatgttccagaaagtatttagcccatccccccatatttttggactatagggagtttttagtttctcagtgttacaatactgcccatattataaatctggccatattaataatgttgtattataaatctgcccatattaacaatgtgaatagaccctgagtcaaagggtctgtatatttttcaaggctgtttgctacttgtgaggttgccctccataaatattacagcttttagactctaatcagccatgtatgaaaatatccatttcccttgactcttgccagcaatagcttttattttccttaaaaatctatgccagtctactaggccaaaaagaattgtgctacagtctctcagcctgcattctttgattactggagaggcctggcgccttgccacgtgctcatcagtggctggcgtttcttctttgatgaagtgcttgtcctgcttgttatttccacttctctgtgcagaatctgggcctggccagaggggctacttggtgcagctcaagcccaagcctctacctctgcaccttggttcatctgttccctccatctggaatcttctctccctcccccttccacccccacatgcacctgccagcatgttcctcctggatccgtctcacccagcattggaggcctttcactccctcccactttgtctgggacggagccctcgtgaggacgggatgctgccctcgtgaggatgggatgctctgtgggacagccatcctgttggtgtcagaagaaacggatcctccttctctggtagcagtttgcattttctacccgtgttgatgaacttagctcacttcagaaaacacaggcagagtgggaaaagcaaggctttggaggcgcacagacttggctcacatctgtgctgtaccctgtctagctgtgtgatgtgggctagtccctacgcctctcagaggatgccttatttgttatataagaaatagtaattcctgcctcgccaggtctccactaaatcagatgatgtgtaaagcacctggagccatgtggtagctgacacgtggccttgtcatcatcagggtcctcgttggcgtcctcagcaggcatagcagggggcacagtccagggggcatggtccagcaactgccagccgggccctgtgccagggccgcactccaggggctcacagtcatgtggtgggcacagacatgcaggtgaggacgcaagagagcatatgataagtgctgtagccacaggtctgcgggacgcacaagacagcaattccctcaggagaacagggatgattcccaaaggatgtgacattccgttggcttgggccttgaagaaagtgttcttaggaggagccaggcggggagctcttgtgggcagagggctgagcctgagaccgatctgttgtctccctccagtgagtgacctcaggagcggggaccttaatgatagaaactgtgtgttgagcaccttgcatggaagggctgctgagtccccacgtgatgccggttaggtcgttatcaatgaggaggagcacctggggccgcgtgtgcactcccaggtcctgatctgaacacaggtctgattccagagcccctggtgcagaagtcagtacatatttattgaaggacttagacagagccacaacttgcatttggggaatcagttgtgacattttagaggcaacctggggagagaggctcccagagcacagccactgtgccaactgttgaggtaggaggatcatgatgggcacagggaggccaggcccagcctgggggcattactgcagcatgaggggccacaggggtgtggagccaactgtggatggccagaccccagtacgggagcagagacactccctggcctgccccctccttttacagatgggctgagcctgagcaggtggcagacacgcccaaggacacgcatcccgtcagggctggcagagctggtgagggagcctgaggctgtcagaactcctctttctttccatctctgcgccctagtgtttggggccaaggggatttgacaggttccctgaggccttggaataaagaaagcaaaacatttcactgttggattactttgcactttagctgttgcatctatggaaattacacagtgatgatgtttgtgctggtagccctttgagagataaagcttcagggccacacctgcgcccttcaaggcagccccagcagcgtgaggtcagatgggggagaagcctacctacgtgtgccgccagctcaccgccctggcacagaccccggctggggatgaagtgtgccctgtgccaggctgggtgatccaaattcagttgtgggaaagagctctcctgggttatacctcggaggcagactggcacaggcttggcatttcaagagcacacatctgtgtgtccactcctatggttgttcctgcctctgcccccagaccctcacctccgtaccccacacagggtcctctggcagccttctgggaatcccagcccctgtccttcatcaagggcctccggagcctgccaccacttcacctgcccagccccttgatgggggttctgacctgaaaccaagaaaagccctcccttccttgcctatttctaaactgttcttcccttaactctaatcctcttgccctcatctctcctcccacccacggccaccctgtcctttaagatattggctactaaccttctggagcctcagagcattttgatgattggatgaaagctttggactatttgtctaggaaaacgcaaacccacacatgtccacacaatagtgctgtccctcgagggcgtcagtgaccctgtagctgggggagctttaggaatcccattcagtggggtcttcttgacctcagcctggcttttcctcccttctcctaccagaacttgggcagttacccaggtcctgtggtgaggtccgcctctgagcgatgggatggagaacaaacgaaccaactggagagagtgtgtttggggggaccaggcagcagccccacccttgggtgcatctgtgggtgctcgttccagcctgagcaggtgttcagtggatcctcatgcaggaacccaagcgttggcttggagagactggcaagaaggtgacggagtgtctcctttagaatgaattgtcttatgtggcctgaagacctactgtgccctgggatgatggagacgatggtaggagagaaggcagagtgtctagataagtattgcagagagacaggagtgcggttctgggacgagaaccgagtacttgctgccacgtttcagtgtcttcttcactccttgtatgcttctttccccaacacatctgcagactggatgcaccggaccgtggtggggagtgggcagctcaggggtaggggtcacctcctctagccggtcgcctcactgatccagatccagctgtcttcctacacatgccctacgtacacaccaggacagggacgcctccaacttggggtttccggtcattaagtgtggagcctggtgtgtccttgtgaacacaggcatgctctgaaaagtgaactgaggccacagtaagacaggccacagggggcagaaccacctcagctgaacccgtgtctcactcagtgctgggaaagccattctgccggcactagaggggaatgaattattgtgcctgcattttaagcatgtcctggatgatggttgatggcctttccatggcttcataggtgatccctctgggacacagctttgcagccctgccctgctccctggtctttctttctggactgcttcaggttcttcagcaaagatgttgtggcatctcctatcacaaaatgccaccatctcctgtgatccacgtcctcctgcagccaccccatttcactgcccctgctacagccacacggactccaaggtgccacctctgctcattcctcctctccttctcccctagctctctcgagcacacccaccccaggctgcagctcccaccactccatccagacagtggatgtgtcactgtggcctccatgccaacacagtccccacacctgtgccctcaccgtacttgccatcactgatagctccctcctcccaaggcccttcttcacttggcttctgagacaccgttctccctggggtcacaaccccccatcggcagacctaccgtgtatctaatgagcacttccaccttcacaaggccaagatcaaatgctcgatactgctaacctcccgagtcctagtcctcctcggtgtccccagttgtcaacgggcagttcttctggctgctgaggcccaacacctgaccccttccacactatgcctgctccatcactggcctgctggaacatggcctgacctgaccacttcttagcttgtacagcttcgacctggtctgagccactcctcgtctcccctgacccacgtggcagcctccagctccctttatcctgtccccgcttaccagcacctgaatgatcgacgtgtgtgtgcacgcgtgcgtgcatgtgtgtgcatgtgcctgtgtgcacatgtgtgcacgtgtgtgtgtgtgtgtgtgtttatgtgcatgtgtgcttgtttgttttctggtttcttctaccagaaggaagagactggaagccatgggcgttgttttgtttgtagaacctggcacagtgcctagcacgtggtgactgctcagtgaatatttgctatgagtgaaggagggagggagggaggggactaacatgtccccacgggagaggggctgtagcttccatcagattttcaaagttccccatgactcaataaggaattagttttctagataaatccatgggtctttttcattcattccaaaggcgaggccttcctgtagtcatagtgaaagatcatgagctttatattcgccagagccacgttttaatccccacactcctctgtggttttaaccaaatggcttaccctctcagcgccttgttctttttcctctataaagcctggcttccagagttattaggaagacaaaaatgagtcgcttggaaaatgcctattgctgtatctagcacctggttagtgctaaattaaggccctctgggggaattattcctgttcaatcacagaatgaagaaggcttcagccagtccatagcagagacccgtaccccacttccaggaagccagggtgagcactggccctgccccggctgcagctgcagcctcattctcagacccggtgcagggcatgtgcagtggctgccctggactgcgctgctccacctcccatcaccaggcaactgagactgggaacttggtcctcatgttcctttctgggtgcgtggtgggcaactcagaggcagaatgagaggctgaaggtcccgcagctgagacctgagacagctgcttggggctctcccttcccaggtgccctccgcaccttggccatctgtttcctgggcacatgtatactctaggggagaagagggcagtggagaggattaaattacagtcgtgcaccacatgccatttcagtcagtggtggaccgcatgtgtgacggtgatcccgtgagattataattccttatttttaccataccttttctgtgtctagatgtttgggtaatacacaaatacttaccattgtgttgccgttgtctacagcgttcagtacagtcacacgctgtacaggtttatagcctagaagcaatgggctccaccacacggcctcggtgtgtagaggcttgacctccaggctcgtgtgagtgccctctgtgatgttcacactaggacaaatcgcctaatgacgcatttctcagaacctatccgcagtgttaagctgtgcgtgactgtatttaagagaacagactgttttaaagcaccgtgatttgcatactagttcttaatatgctaattacacatcattctttgggttctcagaagcagcacttcaggacacttttgcagtgggccgctctgcttgcgttagaggtactccaggggtcttcctcagcccaaatgcaggctgctgaaagctggccttctcccactcctccaatgagcatgtggcaggccctcactcgggctgcagggctgggtggctcagagggctgtcctgggtcccaggaaggagcagagcatccttgggcctgggagcccagacagggccgggttatagagggacacctatagatccaggcacggctttgcctgtacaagtgtaaaagaaacaatctgtttctctctgtcaagaatcttcttctgaactgagcaccagagcataaacaagggggagtcaggggagacaagcagaagaagcagatgcacacgtgcaggcagccaggcgtggtgtgggagggcttggagttgagaaatacgcagggtgtggcgtcaggcctagagagtggtcctgccccgtgacaggacagcagaacggggcgggcctgggttcagggcttgggccactgtccagtgggccgtccctgaggggggtgacccagcacctggagccaggaagtggaggatggggcaaggtcatcaagtttgctgtgttgacagcacgccacgagcatgacacctggcggagctgtgctgaggggttgggtcccaggtctgtggtcagaatgcggggtcatagtaccaggcagggtgtggggttgggaggaggaggtgggcaagccagcaccagggctgggagcagggaactggcgcacaccgcatcatcactttcccgcccagaactctaaggggcccgggaagtctacattttaactcggccttcttggtcgctacaaaggtaaatttgccaggaggattaaacaagcttcatgtccggctgtgagcttgattggtaacttctgaagattcagacgtcgatctaatgtggcaggtgggtccacacctgtgctcttgccctgcaccctataaatggtgtgtctgggcccagttggtctctgtttctcccccagcctttaccaacaggtcccccagcacaggcacctcatcccctgcccaggacgtggttcagggacctgacattgcctccctgtgaagtaagtagacaacagaaaggcattcatttccaagttgccttcaaaaaccctgttcttaccttggaagcagtgctgttggcccagggaggcctgtactgcaccttggtggattgcaagaggctaagcaaccaagtcaggaagtgcagagactgtaggagattcaccaaggcagaaagacccaagctacccaccccatctgatatggtttggctctgtgtccccacccaaatctcattttgtagctccggtaattcccatgtgttgtgggaggggcctggtgggagatggttgacttatggggtaaggtctttcccgtgctgttctcatcatagtgagtgggtctcacaagatctaatggttttaaaaatgggggtttctctgtacaagtgctctctttttgcctgtcgccatccacgtaagaagtgacttgctcctccttgccttacacttctgagacaggctggggtgatcagatgtcacctgagggctggtggaaggcgaggagccctgtcagatacggagggtgatcagacgtggagtctggataaaccgacttcgtaggattctcacaaaaggacagtgcagaaatgaatgaggaaatgtacaagttaaggcctcattgagaaagagctcagggagtctgagagtttggtcaaggagagaaccttcgctactttgccaagttgctggatgccctttggatgatgttctgagcgtgcggtcactttctgtccgcctgagacaggccaccctgggagggaggggccaagcagagcgcatcttggccccagttcccactccccagggtgggccctctccaagctgtctgtctgctttccttcagcaatggggggaaagcccccattgctttccttccctgttctttgctgtctgaatctggtattccaaggatggagagcgaagggtccacgtccaccctccttcccctactcacagagccacacagacctggcctcgctgcagcccccaagccactggagtaggtcatatacactacgctccacacccacatacactcacacactcacaacacacagcacactgtgcacaaacgcacacatgcatgtgcatgcttcatgctgagatgagcacggggggtcagacatgacgggcgtgtgctggtgcaggggcctgggcttggagagacagggctgggagttgagtccatccagcccccagggacggcttcatggacagctgggtgggcactggtctgggagtctgtcttggagacagtgatggtgctggctgccggcaggctgcgctgccctgggccctccccacatctggcctccagggctaccttgcctccacacctggcaggactgactgggggagggcaggagcgggtgccagccctcctgggagcactgggtggcagctggatctagagtttgtgtccccccaggggagcccggcccccgtgtctgcagttcgtgtttcccagaggaggctgcctttcagaatgctccttggctttgtttagaacagcgctcatctgtctcagcctcgtctgaaaaatcgccaggctcgttcctctgcagaggaaccgctgtagccctagatcaagaagccgagtctgtcctctccatatctttccgggcctttgaattcccagcagtcctggcatttcagcaccgcccacgtggcacagcccaggacaccagccttgacctttcagcctggccaaggtgcctcctcctctgcctctcaccttcctcatggcaatagtactcatctcagagggcagaggcaaggattccaggggaccatgtatgtaaagagcctagtgcagtgccaggaagatgataaacactcagtgagcggcaggtattcctccccgccccttccggctttgccttccctttcccaggggactgagttcagaagcacccctgctaggttcagactccagctctgccattccctatgcagcctgggcaagttgctaacttctctgaccctcggtttcctcatctgtgaaatggggacagtcatagcttctaactcagagggctgtgggtggagctgaagcagcacccggcccactcaccagttgccatcaacacctctaccactgcgcatgctgaggcggaccagaaagagaacagaggcacctctcactcatgcagtgtcttgggttcagtgccagggaggccagggctgcccctgcccttccacagtctccacctggctccacaggtgcttggctagggtccgctggaggatggggaggcaacacaggctttggcgtcagaaacccgcctcagcctcaccacctgggacttggagcgattcccataacttacttggctgatttgtagcataacccggtttcgctacctgtccagccttttctctgccactacctccacacactgaagctaggaaagcttcctcagcctgccccaaccgccttcaccttctgacacaaggttttcttgcccctgccttcgtggcacaggtcctcctgccctggggcaacccctccttcagggagcctggctcagtaaacattttatcagctgaacccacgaggtgcttccctcgtaccccgtttgcctccctgtgtctgcatccccatcccctgcccccggcctccccacagcaggcagaagggcaccaggcctcatttctgcattggcctcaccttctagccaggggtattcctggtctaactagtatgagagctaggatgttgacagagtcaatatgtgagccaagttcagctttagtttctttcctttgcaagatagacaggataaagccttcatcaccaagtaagaaatgtaaagcacgcgacgtgggcatgctcagtgtgagtcccattccacacagggcggtctcctccacaggcacatgtccccaccccacataagcctggcatttgctccagccccagccagcaagtccagcgatgggcacctccagccatcccggccctgaggggtgacactggcttcccaggcccgagcgcttggcctccccgctgtcacgggattcccttccaagtggaagaagacaaagattaatttgtttttaattcatcttctaattgctttcttctctaaagaaggcctccacgaggcccaggcccaatccctggggccatggttgtttaaaataaaaaatgaggccactcggcagggacacatttttaatcactggaaaaatcctcctggcatcagggcatgcagcctcctggcatgtgactccctggaggaagcccagcagaaagcgtccttgccgtgggttcagggattcccccttggacagggaggcgagcccgccagcagtgccgactgcttgcctactaagcgtgagaactgtgggcagtgcaggtgatgtagaaggtcctctctgcactcagcccaccaggccccaagagaccaggcctcaagaatgagacaggcctggccagtggcgtcagaagtgaatgatgcctgggctggggggactccctctagatggcactgacaggcactgccagagcagccactgggcccactgcacagcccacttccagggcccctgcgacatgccatcctaatacccacgccccctggctcctccggcgacacgctgtccccatacccaaaccctggctcctcctgtgatctgctgtcctcatccccaaaccctggctcctcctgcgacctgctgtcctcatccccaaaccctggctcctcctgcgacctgctgtcctcatccccaaaccctggctcctcctgcgacctgctgtcctcatcccccaacgctggctcctcctgcgacctgctgtcctcatccccaatccctggctcctcctgcgacctgctgtcctcatccccaaaccctggctcctcctgcaacctgctgtccttataccccatccctggctcctcctgcgacatgctgtcctcatccccaaccctggctcctcctgcaccctgctgtcctcatccctaaaccctggctcctcctgcgacctgctgtcctcatcctcaaaccctggctcctcctgcgacatgctgtcctcatccccaaaccctggctcctcctgtgacctgctgtcctcatccccaaaccctggctcctcctgcgacctgctgtcctcatccccaaaccctggctcctcctgcgacatgctgtcctcatccccaaaccctggcttctcctgcgacctgctgtccttataccccaaccctggctcctcctgcgacctgctgtcctcatccccaaaccctggctcctcctgcgacctgctgtcctcatccccaatccctggctcctcctgcgacatgctgtcctcatccccaatccctggctcctcctgcgacatgctgtcctcatccccaaaccctggctcctcctgcgacctgctgtccttataccccaaccctggctcctcctgcgacctgctgtcctcatccccaaagcctggctcctcctgcgacacactgtcctcatccccaatccctggctcctcctgcgacctgctgtcctcatccccaaaccctggcttctcctgcgacacgctgtccttataccccatcccgggctcctcctgcgacctgctgtcctcatccccaaaccctggctcctcctgcgacctgctgtcctcatccccaaaccctggctcctcctgtgacctgctgtcctcatccccaaaccctggctccttctgcgacctgctgtcctcatccccaaaccctggctcctcctgtgatctgctgtccttataccccaaccctggctcctcctgcgacctgctgtccctatacccccaccctggctcctcctgcgacatgctgtcctcatccccaatccctggctcctcctgccacctgctgtcctcatccccaaaccctggctcctactgcgacctgctgtcctcatccccaaaccctggctcctcctgtgacctgctgtcctcatccctaatccctggctcctcctgcgacctgctgtcctcatccccaaaccctggctcctcctgtgacctgctgtcctcatccctaatccctggctcctcctgtgacctgctgtcctcatccccaaaccctggctcctcctgcgacctgctgtcctcatccctaatccctggctcctcctgtgacctgctgtcctcatccccaaaccctggctcctcctgcgacctgcggtcctcatccccaaaccctggctcctcctgcgacctgcggtcctcatccccaaaccctggctcctcctgcgacacactgtcctcatccccaaaccctggctcttcctgcgacctgctgtcctcatccccaaaccctggctcctcctgcgacctgctgtccttataccccaaccctggctcctcctgcgacctgctgtcctcatccccaaaccctggctccccctgcgacctgctgtcctcatccccaaaccctggctcctcctgcgacatgctgtcatcatccccaaaccctagctcctcctgcgacctgctgtccttataccccaaccctggctcctcctgcgacctgctgtccttataccccaaccctggctcctcctgcgacctgctgtccttataccccatccctggctcctcctgcgacctgctgtcctcatccccaaaccctggctcctcctgcgacctgctgtccttataccccaaccctggctcctcctgggacctgctgtcctcatcccgaaaccctggctcctcctgcgacatgctgttctcatccccaaaccctggctcttcctgcgacctgctgtcctcatccccaaccctggctcctcctgcgacctgctgtccttataccccaaatcctggctcttcctgcgacctgctgtcctcatccccaatccctggctcctcctgcgacacgctgtcctcatccccaaaccctggctggcttctccacaggtctgtcctgcatgctcctaggttcactgattcactcagcacaagttatccgaggacctggagggtgccaggtgccacaccagcactgagccagcagtgggagctggggcagacgaggctcggagctcatggctcccccaattacaacgacctctcaggtgacctcaaggctggccgagggccatctcatcacccctgtcctgttggccccaggcagccaagaccgatggctttggcccgtccttcccagggcccctggcagtgacagctccgtgtgccgcacagctcctggggtttccctggtagccacaccctgtgttcctagtacgttttgcccgtttgacagatgaggaagtggaagctcagaaagtcactcagtaagtggtggggccaaggctaagtctctgatgagttgaatgtggttttgcaccagcaggagacctgttttcagccaggggaggaagatgtgctgttcagcttgtgacacggggtgggggcgtctctggaaaacagaggctggcacgcagcaccttcaggtcagcacggtgggaaggagaggaggaagcagatggacagagaaagaagctgggcaggcccagtgaggatttcagccgacccatgggagttgggatggcttcttgttgttaccccgagtttgggtgaggtgaggggcccagccttgataccctgtgtggatcagtcaccgcatgtaggtcaccccaggaagggtctgtgatctcggtcacggcagcacccctgaatggaggcagtcttggaaggcagcacccagctgtctgcaagcagcacccagagtgcctgtggactgtggctctggccttgattgctgaggggcaccttttcagaccagctgcactcctgggagcagatgtgggagccccaggtgatacaaactgactagttcttggtgatgtctgctgttaattgtgcagctgagaccaggcagtcaaaggggaaagagctttgggggtcactcattagatgcccttatttcccagggaaggaaagcagggtctggagagggccaggctccttgggaggtcaggagcagagcatggagcagcagcaggctgggggggccttggctgtttcaatctaatggtggctgccacatggcttcacctttccctgcagagccagcctgagctaagaacacactggatggtctctctttttgcacttgtccgttcaagattgagacgtgccaagatgaagtcagtttgattcagcaaatatttatggaatacctgctctgtgccaaggagcaggattgggatgcacaaacaaccatgatgggggtgcttcagctgaggagacagacatgcagacacctcgctgtcccatggccacaacacaggcgaggagaggggggtggcattgcccagcagcatcatgtgttgaggtggcagcgctactcatagaagtcctttcatcctcgcggtcacccttagtccatgttacaaatgaggattccgggacttgtagaatgggtggctggccagagggccacagctagtaatggcagacataaggcttaatgggactcatctgactcaggcaaacaaggagagtatgatcaaggcctcaggggagcatagagaaatctggaaggagtacagaaggcttgcagcaatgacttactgcatccagaccttgaaggatagatgagcattcagcagccactgggagtatttcccctgagggaagagcagaacaaatcagtaaaacggtaaaacgcatgaacggctattgggaaatctgatgggaagtgaataaagggagggaggaaggaaagggggatagatggaaagatgagggatggatagatgggtggatggatggatgggtagttgttgatggatgaatggatggatggatggtagatgggtggatgggtggatggtggatggatggatggacggtagatgggtggatggatgggtagatgttggatggatggatggtagatgggtgaatggatggatgggtagatgttggatggatggatggtagatgggtgaatggatgcatgggtagatgttggatggatggatggatggtggatgggtggatggtggatggtggatgatggatggatggtagatgggtgaatggatgggtagatgttggatggatggatggatggatagatgggtgggtgggtggatggatgggtagatagatgttggatggatggatggtagatgggtggatggatgggtagaagttggatggatggatggatgggtagattttggattgatggatggatggtagatgggtggatgcatgggtagatgctggatggatggatgctagatgggtggatggatggatggttggatgggtagatgttggatgggtggatggatggatggatggtagatgggtagatggtggatggatggtggatagatggtagtggatggatggtatatagatagatggatggatggatatatagatggatggatggtagatgaacaggtggtagtggatggatgtatgaatggatgaatggtagatggatggatggtagagagatggatgagtgaatggaggaatggtggattttggatggatggatagatggatggtagatggacagtagatggatgtgtgaatggtggatgggtggatgctggattgatggtgggtacatggtggatagatggatggtggatggatggatggatgggtagatgttggatggatggtagatgggtggatacatgggtagatgttggatagatggatggtagatgggtggatggatggatgggtagatgttagatggatggatggatggacggtagatgggtggatggttcaattgtggatggtggatggatggtagatgggtggatggatttttagataatggatgaatgtataaggtggtagatgggtggatggatggggggttttaaaattccccccggaggcgggggatatcagtaccgaacgggcnnnnnnnnnnnnnnnnnnnnnnnnnnnnnnnnnnnnnnnnnnnnnnnnnnnnnnnnnnnnnnnnnnnnnnnnnnnnnnnnnnnnnnnnnnnnnnnnnnnnnnnnnnnnnnnnnnnnnnnnnnnnnnnnnnnnnnnnnnnnnnnnnnnnnnnnnnnnnnnnnnnnnnnnnnnnnnnnnnnnnnnnnnnnnnnnnnnnnnnnnnnnnnnnnnnnnnnnnnnnnnnnnnnnnnnnnnnnnnnnnnnnnnnnnnnnnnnnnnnnnnnnnnnnnnnnnnnnnnnnnnnnnnnnnnnnnnnnnnnnnnnnnnnnnnnnnnnnnnnnnnnnnnnnnnnnnnnnnnnnnnnnnnnnnnnnnnnnnnnnnnnnnnnnnnnnnnnnnnnnnnnnnnnnnnnnnnnnnnnnnnnnnnnnnnnnnnnnnnnnnnnnnnnnnnnnnnnnnnnnnnnnnnnnnnnnnnnnnnnnnnnnnnnnnnnnnnnnnnnnnnnnnnnnnnnnnnngatggatggcggatagatggtagtggatggatggtatatagatggatcgatatatagatggatggatggtagatgaacaggtggtagtggatggatgtagagtggatgaatggtggatggatggatggatggtagagagatggatgggtgaatggatgagtggtggattttggatggatggatagatggatggtagacggacaaagatggatgtgtgaatggtggatgggtggatgctggatggatggtgggtagatggtggatagatggatggtggatggatggtggattgatggatggatggatggatgggtagatggtgagtggatggatgaatagtggatagataggtggatgataaatgaatggtggatgggagacccagccaataaaatcaaaggggcagcagcctgagggcatctcttgtctgctggaggatggatggatggatggatggatgctggatggatggatggtagatgggtagatgctggatggataggtggatgacatgtagtctagagtttttgagtttgtggaggcagaagaggttgtgtccaggtctttgttctagggttggggcatgggagtccagatacctaggcagatagagctatatccgtcaccctaactaagaacctcaccaagctgaggtcaatgactttagaagtgaaacaggggagtcccaccctgttgctagtggccacaagctagtattggaagcaagagggcagtgggaagaatcagaaatgagcaaggctagggcatggccctgggaccagcagcagggatatgcaggggtgatctggtgtctgaaagggccaggcttacttatatgccatggcgggggtcaatcccaggtgctgtgggcctggcccctgggcatccccagcctctggacccctgaaaagatgcattctgtctagttctggctgctgatcattgcacagccaagaaatccactgtgatttccagactaacacctgacagagttgggccagaggtttcagacctgtggctgggtgggctgactatgttgacctcccataacctttctcccaggcagggctgtgctaattttaaatggcgtattgattggccagccagccattccctaggatgaccccatagccctgctggcttgccctggcacagcccatgaggaagtctcctccccttgtgcttggctgtctgcagcccttggggtgggccagagactccatcacactgcctggcagagggtggaggctcttggctctagtgctggagtcacacttggtttccctgtgctcagcagggtgaagacccacctgctgatgtcacctgctgctgctccaggaaacaaatggactcctggagatggaagcagttgagagtgttagtgagctctgcaggtagaatcccagcataggctgggacctgttgaacaggtgcagtttgaatggtcccacgggactcatcccaggcaggcccagggtgttcctgccccctccgtgctggaaagctcatttagagaagccgcatggtctttggagagaggccagaggtctatccccaggagcaggggccacaagccagctttgggggtcccagcaagtcctctcttctctagttcaggctgcctggagagcccctcagcctgtgcccagcacagctccatgggtcttttcatgctggggtgcaatgcaggggtgctgcctggccctaaggtgctcctctgcacactgaggagacccagcaataaatacaaaggggcggcagcctgagggcgcctcttgtctgctggaggtggctagggtggaagaggacaaaaaggcacggtagacctgagcctgctgaggcctggggaggcgtggtttgcctccagggtctggtaaaccagtattcattctcagggtggctgccataatggagagcaggaatcctgtgcacatctgggaccccggattaaattaatacttgcagcttttggggtgctcaagccccatcagagaagcctggggagcaggggaggttgggcaacccctggtggatgcttcaggactgaggtgaggtctatgccacactgggacagccagggctcctgtggaccctcctgtatccagcccccaccactcccagctgagatgggatggggtgggggacactcctcacccggtcttggattgtgtgggccacagtctcccctgcaggctgtgagctcctggtcgtctctgtgttgccagcccaagcctaggacagagggagtgtctgggcccatctcccttgaccaggtcctcaggaacctccaggctgcctgtggccccgcttctaaaagctccttgcccagagtctcagcagggaggtgctctccactgggcagccctgcccctccagtccagcacaggggcagcagctaaccgccacccgctcatccagctgcccggctctggcggttcaagcagatgggccactagaaggtccttttgcacctcatgtccttcccgtttgtgctctaagactttatagttctatgtgaagctttggctgtcaccacatcaagagtctgtttaacctcgtaagcactgacccagcaccaggcaggggtcagccctgggctgtgtgaggacagtctgggggtacagggtgagaggggttcccggcatgcttcatgacaagcatggcaccttttcatggtaggaagaagttctggacatggcgcccagagatgagaacatgaaatagtgagcctgtttgaaaccattcagcccattgctctcatgtgacaatggggacgctgaggctcagatcggttaaatgatttacctgaggtcacactgtaagccattgaagggccaaggccatcttatcgtctgtccattcatatggcagaggtcccccaggagctcaggagagacagtccctcagcagcagattcccgtgtgggccatgcaggccatggcgggttgctgggggctggatgtgcttcaggaagtcttcctggagcaggtgctgcaggagcccagctttggaaaggccacagggagtcagcaggagggagggacagatggagcaggggaagtcgcagggcactggggtgagagaccacaggggacgtgatcagacagccttgaacttggccttgaatactttggaggagcaattgaagtcgtcatttctacatccacaatcactttatgtcttctctctggaaaatgtcttcctcctgctgtctccctgctgcacacaccaggagtccagaaacctggttttcaagcctggacctactgccagagttcaaggtctagaaatcctggtggagaccccatacaggccccatacacacaggccctgctgggcactagggcctggggggaggaagtgccagcctgttagtggaggcggccccctgcccccaaggtaaatgcccttctaggtggcacacatgggcacaaggtgcagaatgccgagggcagcaacagaggtccctgggagggaaggcttccagggaggagaggctgcgctagacacgccaatggcagatgcccaggcagagccaacaagcagcctatgcaaggcccggcacagaaaaccagctgcagcccctcagtactcctgcatgccccccatgccagctctgacacctgcaaatctccacacacccgctctgacccctgcacaccctcacacccactctgacccctgtatgccccccctacctgctctgacacctgctgtgtgtaccccctgcatcttctctgatccctgcacacctccccacctgctctgacccctgcacagcccccacacctgctctgacccctgtacgcccccctacctgctctgactcctgctgtgtgtaccccctgcatcttctctgatccctgcacacctcccacctgctctgaccccaggacaccctcacacccactctgacccctgtatgccccccctacctgctctgacacctgctgtgtataccccctgcatcttctctgatccctgtacacctcccacctgctctgaccccgggacacccccacacccactctgacccctgtacgcccccccaacctgctgtgacacctgctgtgtataccccctgcatcttctctgatccctgcacacctccccacctgctctgaccccgggacacccccacacccactctgacccctgtacgcccccccaacctgctgtgacacttgctgtgtataccccctgcatcttctctgatccctgcacacctcccacctgctctgaccccgggacaccctcacacccactctgacccctgtatgccccccctacctgctctgacacctgctgtgtgtaacccctgcatcttctctgatccctgcacacctccccacctgctctgaccccgggacacccccacacccactctgacccctgtacgcccccctacctgctctgacacctgctgtgtataccccctgcatcttctctgatccctgcacacctcccacctgctctgaccccgggacaccccccacacccactctgacccctgtatgcccccccaacctgctgtgacacctgctgtgtataccccctgcatcttctctgatccctgcacacctccccacctgctctgaccccgggacacccccacacccactctgacccctgtacgccccccctacctgctctgactcctgctgtgtgtaccccctgcatcttctctgatcctgcacacctccccacctgctctgacccctgcacagcccccacacctgctctgacccctggacacctccacacccactctgacacctgcacacccctcacatctgctctgaccctcctgtactccttcccttccaggcctcagcttcctcctctaggaaagggtctcatgattcctccaaaccccctgggtgctgaccgtgcccacgtgtatgatctgattggcagatgagaaagtctgagactgggttggcattgtgtgatgaggacaaggactcaacacagagccacacagagcggtgggggcggggggcctgcctgggtggcgagagtctttgctttatttagacaggcttgagagaagatgaaaaatgagagattgaaaaggtagagacattgcttggggacagaggagtcattttaaattctctgctcttctcagaaagctgtctttgcataatgcttccagccagcaggcatattttccatttttttccccgtttctttttcttctggtttatcttcagttgtctaaagtgcttgtccaaaaagagaaggttgaaggggaagcacttaatatagtcattgtctccatgagccaaggcgttcctggtgcaaaacacagcttgcctgtgttgagagagaagggactagaggcccagtgcctgtctgccatggatgcccaatgtggccgtgggcacagcagcgcatgggggccctggtgcttcctcctgaaagggagggcttggttaaatgagctctggtggcctgtaaatgtcacagctaaatgctgtaacaaacagccccaaattccagggacctaacacatcagcctcattttgtttatatctcatggtgttcttggtgcaggcagctttttggcgctcacctggggacccaggctccacagtgttctggctctgaccacctcgtgtcttcgtcccctgtatgtccctgcctaccctgaggctctacccacctggggccccacccctaggggctcccctaccccgtggacctgttggtcccatagcccgcctatcttgcagctcctccctcctccagccctcagtttcttcagtttctcctctcagcctggagatgggggactataggatggatgtgtttacggtccaggtttgtcctttccctctaagtccccttggtctggacttgatcttgtgtttccaactcactcccttggagaggggctgcagtctgtgcccaggaggaaacgcgatggcttcccagacagcctctgcaaccagaaccttctcgaggtcgagtattccatgagagagcagggaactgcctcacggagggggcagatgtgcagggccttgagacacagagctgaggtgccaccggcggcgattgcaggagcccagcacagagggcaaggggcactgtggatggcagcagatgccaccctgatcacagagccgtggagtgaaggtgcacactggccttggtgccagggagacctgggttgaagtgctgactctgtctctttaaaccaaaacaggcttgtccatcaagtgagcaggacgatgcctctcggaatgtcactgagaatgttcagtgaagcagtgccagcgtgctcgccatgggcacgtggaggcgggctgctgcccaccgactcagtttacccatgtgctatagatttgtacatttgagctcagagaggtgaagtcttggccaaaaggcacatagtagcaaggcggcgagcccagtccctggtcccccaactgcccgctccatccagaggccctggcttcccctttgcctccctgtcctgctctgtttgtccccaagggaggctccagccagggcagcaaatcccagagcctgctgggcctgaaggaggactggtttccttcagcagcccatgtcctgcccctgctaggacgacctggcctgtgttcaggctcagctctctgtgcacagcccaccccgactcacccgctgtcctaccaatcgctttgagcgtgctgaaggcggagctgagctggagccgctgcaagtgcatggcctggattaacccacaactcctttctcagctctcctgggtgtgggagccaggcaccagtgattcacacccctctgttcattgggcatttctctctggccaggatcagagctcagccctctccttcactccacgcaccacctttcccttttttagacaaggaagcagaagctctggcttccgaaggggctcacccaggcccctgagtcagcacctaagctccaaccatcatctcacatccaagccataaagccttcgacctgaggatcctggcctggtatccgtggagggtgtccatgggctgggagaccctggcctcagtgtgttgtgttggtgacggtgtttcaccccgtcctcaaggcagccacggccaccatccccagcaggtcctggccatgcagggtgtaatcaggaggcctacctggaagggaagtccttctcctctccggagctcacctcctgcacatccccggggtctcccctccacaggggccctggcatccctggatggagggtgggtgagctcaggaagcagagagcctccgatgagagaactccaagctgtacaggtctcctctccaacttcattttgccctaattttaatttaattccctttaatctttaatgaaaagttgtaaaagtaaattatttacccaagagagcccaacagctcctcaggagctgttctcgacttgagggtaattacacatgcggggccagcaccaccgccctcccaggatgccagggaagaggcgtcctggtttatgaactaattagctccctcagtaactgttaaaaacgcatgccatttggtggattgagagcgaagctccagcttcatgaagtgcgtgccctgacagtcgctgatggggggaaagagcctgtgttctgtgtccatggggtcagcgggagtgtagccagctggagtgtgcagagctgggcctgcctcggctcctaggagagcagtgctctgggacacggagacggagcaagtccttcttccgtctctgtcacccagcctctgtctccctgtctgagctttccttgggctccagcaccctgagagaaggccccttcccagcagtcagggtctggaagcggggaaggggtggtggaaaggagcaggggtggggaggggtggggactgtgtgatttgacacatacctcccaggctgtgcactgcctctttgactagacactctgtcacagcaccgtcacccccatttcctggccattatccacgcttctcgcttcttttccaaactctctctggatatacaataaagagtcgaaataaaatgcagaaggtctggaccaagggaaaccatattggcatagttggtcaagacttggaagagcagttgtgcaggagaggctgtgagtgcgtgttcatgcgtacctgtgagtgaacgtgtgtggcggtggcagtgagtgcacgttcgcgtgtacctgtgagtgcacttgtgtggcagtggctgtgagtgtacggtcactgaaggccaacatggtgctttaggtggattcatgtttagttctgagcttcctaacagccaaagtgaaaaggtcagttacttggctgtcatcaataaagagggaaaacatgctggactggggggcattgagtagctagcaaccaaccacattagcagtagagaaagttcaccagttatgttagataattggaaatgagagggttttatatgggatgtgcctgcctgccccccaccccacaggacagctggcccggtgttggtgaagggcaggaaaccttggctttgcagtcctctctcatctcgggtcttggctattttatttctccatagaacttattttgcttcatctaaagagggagaaaactccttgattaattctgaagccaaaccttacctgaatcaaatttggctctaaaatttaggaccgcccaagatttatgtcaactagaaaaatgtgtgtcttctgaaatttaaaagttaaatatattatagctgaggcaggctggatagagccttaaaaacttgactcactttgttccttggtcttcaagtcatgtatttccactgcattgtttttgtctttacatttttaaatcccaaattagatatttgcaactgaagtctacttagtcccctgtttctcgccagcgcaaaaggttggagagtagagttgtggggccaggtcggggaggcgtcgctgggagtttgagctctggaggaaaaataaaccttcagcagccagccttgaggggacatgccctgaaggacaagtgaacagattgttggacgagccagttggacaagaaatccacagatcattccgctgtcactgtaatttacacaggactctgggccctgcagacattttacctgtttccttcaaccacctaagaagcccacggtagcctcaccccaccaccttccacattttctcctcccctgctcctctcagcccactctgagtgaggcagacatggcttgtgcattgggcctgcaaccctggacacatgcacggcagaaactcatgctcagcaccaccctagacagaggaaacccgcctctctagggtgcagtcaggcaggtctcttgaaaagtccactgtggtttgaaatctctgctgtacactgaacctgagcccacaggtggcggctgttcttctcccacagatgcagcatttcagtgaatgtttcctgggtgccaggagtgtctgccagctgcctacccccacccagcctgcagatcagagttgaaagcaaccgtgcatgctgggcccatctgacctgctggtcctcatgtcctgaaggtctggtctccatctggccccatctcctggctccctaactcctgagtccatcctgcctctgcccgtggccgtgttctgggtccatagcttgcccaaagtttgggtcctgaccctctctggtggcccctgacttgcctggtccctgattgcatgttgtgttgtgctgtgcttgagggaagagacttccagcttcagccctggcctgctgtctggccccaggctccaaaatgtgagaaactcctgaaatatggaggtcaagggcttggagttctggagggttctcatggcttatggacgttgcaagcaaagaggactgcacagaagggccattccaaacagctgtcccaggctggtggggcgaagctgggctgtctgcacagggagcagtgagcgccggcagcatggccggttgggggtagatcgggagaacgcacgtgagaaccgcagcaagatgctacttcacctccaccaggatgggtgaaccagagccaggcaaccacagtgccatagaaggcgtggagcagtcaggcctctcccgcaccgccgctgggaatgggggtgcagccgccttggaaaacagtctggtgcttcctgaaaccattagacagagttgccatttgacccagcaagtctgctgtcaggtgtacacccatgagaaatgataacctgtgtccacacaaaatcttctccataaatgtgcacagcagcaccactcatcacagccaaaggtggaaacagcccatgtgtcccttggtggatgctatatgaacaaaatgtgccccatccagacatggagtattgtcccgccatgagaaagaacgcagcactgacccatgctgcagcacgggtgagccttagagacatcatgctctgcgaaggaagccaggcgccggagctcactgccctccgcttctgtttatatgtgagtcagagtagggaaatgtatggtgcgggaaaggagattactgggttgcccagggctgggggtggagtgggtctggggggcagggcagtgatggctaaaagggtacagggtttcttttgaaggtgatggagatgttcgaaaacgggctgtggtcgcacatatctgaatatactacgaaccactgaattgtacactttaaatgggtgaattgtgtggtatgtgacttttatcttgataaagctactggaaaacaacaacaacaaaaacaacaaaaccagaccaagtccagagcccaggaatccagtgggggctcagcacctactgctgttcacctgggaccagctcctgagccactcgccacctcaagagcgtcatctgtcaaatggaacaagggtcagccctcctactggggctgctccaaggactgaattaggggatacctacagagcgctgagccctgggcctggaagacagcgagtgctcaagaagtcaggcattgttgacaaccagaggagcaccaaggaggagtgccacgcccaggggagggggcatcacgcccggggggagcttcacacccagggggagcatcacgcccaatggggagtgtcacgcccaagggggagtgccctgctggggcaggctggaggagggggaggccgtgggtgcaggtagggcaggcctcttcccccacatcctccaccctcctcttggggctcattggggtcacagaaacctctggctggagtcccaagctgtggaatcaaatgggaatggcagctgcccagggctgggcctctgcatctccctggattcacccctcctggtgctgctcctgacacagccagaccacagtggaagcagtgtttggcagagcccagactggaaggcctgcaccagcaccacatctgccttccaggagcctgagtcctgcacgggtcacgacagccggaggtggagaggccgaaggacgggtctgccccaggatggctccagttggggccccgtccccatggagcacctgagctcaccgcccgtgtgggccttatcctgtagaacatcaccactggaactgcctcccctgcctaccactctccaggacagggctcccggacctgcttccgcagggcccgcatggggcccaggcagctcctgtcacctctctacacctcagtgtgcttctgcaaataaagctgcacctgctctctgacctcttaggaggatgtgggcgctgagtgagacacactttaccacctgtgagcctcgaccagcctgcctccccctgcccagcatgcgcacattgcctcgttctcagccccacggtggccccctggccccatgcacaggcgggccaatggcttcctttctctgtgccctgccaagcccctccctggcgggcacagcctttacttatagcccgtgtttctaccagagcctggacgtgctatagcagggacttcaggaggaattctgggccagacacaattatgtccgtaactctggctggtattaaatgtgaaacagaagcagggccagggacaggagggaagagggggccggtgccgatgtgacgccttgaggaaggaggctgattggctcccaggagattccttacaacatgaggttctcctgcataagtcatctgtgggcccagagcggagcatggtagctgggcctagagtcctcattcaggacgcacttctgggacgtggccctggtccctcatgtgccaaatggtgcactaggggtttaaatggggcagggcacagccagtcggtggtggggccagcgttcaaacctgggtacctgaccccaaagcccagtattcactcactcactcatccatctatgtgtccagcagatatgaaatggaacttgtgtctgccatttgcctgcctgtgctgggtattggggacaccacggtgaatgagacggccaagtgccagtgttcctagagcttcctgacgaggaggaacatgggtagttaacaatgaaacaaatcgataaacaaggtcgcttcagatcagatgccagggccatgagaaaatacatgaatgtggccgagtggctggcaggggcaggaagccctctactgtgtgggcagggacaacctttctggcagagccaagtcctgaccgtcaggatggagctggtagggaggccaggatggcaggtgcagaggctctgggacaggaaggatgtgctggagggacaggatggccagggagcagtggcagggaggacacagcccgggagacgggctctgggaggaaactcgtagggccgaggagaccagagttggggtgagaatttcatcaagactttcttttattctgagcataaacagaagccacgggccaggcaggcgaggagcatggaagtgacactacctaccagcgtctcacactagagctgtggtcgtgcagaaaggagagggagccgccagccagggcggggcgggtggaggctgagcagaggcccaactgcatgggcaccggacgtgtcccaggctggggctgggtgtccgggaggagaggacccagcttgagctgctgccggtggtggagccactctactggggaaggcatggggaagaggggcaggaggagaaagtggagggtgagaccccgtggtgcccggtcgagatgtcagggttgcccagaggagcacgggcctgaggctcagggcctctccagtgcttgttagataaatgaatgatgtgatcttagcctggggcgcattgggtttcagaagctgggggcgggcaggagccgacattcctagaacaccttgttctgtctggcacctctcatagaggatctgacactcactccacatccctgagaggaaggtgcgaccattccaaatgaggaaaccgaggctcagagagctgtgcaccctacccagtgccgtctgccccaggaccagctctgcgcccaggctgggtctcccctagtggcctgggaagtggtggccctgaggctgactggggccccttgggggctctgtgtgtgtcctcagacccctacctgtgttgggctcaccagctgctctcacaagtgaccacaaggttagtggcttaaacagcacataaccccgccgtgtggttctggggtccagagtctgatcggtgttgcgggctaccttcctccctgggctggcattctccagctcctggggtgcctgcaccctgtgcgccttcccccgtcttcatagccagcagcgaagtgtgcccctctcctgcctcccttcttgccttgtaaggactctcctgacgccattgggcctactccgatggcccagggtcttctccctttctccaggacctccgtttcatcacatctgctaagctccttctgccatgggagaggacatacaggctcccgggactgggacatgggcaagtggagggggcacattattttgtcaaccacatgaccccttctgttgcgaaggaagtcctggggattcaggaggctttgctaggcatgtttcgacctttagtcattctgtctctcagctcatgacccccctaccacgggctgccgtgggcacaggagccccttcccctccctaggctgctgcttccctgggatagggcattcgaggtccaggcaaaaaggcctaaggggacccaacatccccagaggccctgggtctgcctccctcgtggtcagagtgggctgaaactgcctgcctggcacctggcttgggagaagctggaaggacctgcccctgctgcgtccatcctctcaattgcatccggcacagagcttcatcagtgttcacagccagcccgcgggagaggaagggccctggagaagatgtcgaaatgcaaagcatccccgtcctagttctcctccgctgctcctgcagatcctcccctcctcagggaaggttgggagccatggtggttaggatcaagcggcccctaacaaaaccccacttgacttggtctccttctaccccacctaaagactggggcgtcagagaggtggagattcacagagaagtaactcaaacccaagacagtccgttctccagccaatcaggagcctgggcctgtgctgctaacagctcctcgacaagcagctgtgcaaatcccgccccatcccgcctgggagagggaaggaggagccagtcctgccaagaggcggctcatttggtggaccaggaaatggagggtggcaggaagcccgacgggggccagccccagagaacagtgggagaaaactggaccctacacacccagacaccagactcagggttttccgtggggggggggggagggctgatgacccccgcctgaaggctgtgggaaggtgctctgcggggtggtgaggagcggccgagggaggggacacatgcgctggcatccctgcccacctcctggggaccagccggccgggctgctgcggtcacagaactgggtcccggttctagggctcaccttgtgattgagcagcgggtcccccaggaggcacccactcttcccagctgaagctgacaggcaggctgcgtggcccctgggctgcccgctctgtccctcagggcctgcctggggagcgccgatagaagccgaatgctgggggagccaggagtagagccagcccctgcgcgggccacagacggggtgagctcccagcagcacccgcgctttcacgtgtggttccttcctgtcccccagcggcagtttagaaactgctccaaagcagcttgtctttgagaaatttttcccattatttatcccaggtccgtcctggttggagtcggggaagccatcttgtaatggacggtggccctggcttctcttctctcctcttatatgctccttgcagccctgctcagcagggtggctgtggagagtggggccctgcagaaatgagcccatttcctctgatcccccaggactggacaccgcttgttcgggcccagagtcagagaagcgaattggcaacaatggatgtggccggtgttgcggctgacggggtcacgaatcctacccgggcccagccctgccatgcggtcacatgttctcattgcaaggcagctgcgagcatcgccgccatcatcatcacggtcattagacccgtttccaccacatttcctcagctgtaccctgggggtcccaggggagaccaggacatccttttgaattcaggaagcttaatgctctcggacaaaaacagacctctgctctgccccgtcataggaaggtttgcttttcctctgtgtcatggggaagagtcagcgtcaggggatttggtgcctgtatgcctggatctgagctgccggagctgtaggggctgccccagctgtggagcaaggaaggaaacggctgcttgctgagcacagaaatgcattaatttggtcggcagtcattgtggatgccaggcctcggggtaatgtgacccaccgtcccagtttgcctggcactgagggtttcctgcaatgcaggctaaaagccaaactagccctgggcaaactgggatagttggtcaccctgggagcagggacagagcagagagcaagacaggtgctgcctgccattccagagcactgccctccttctgcaatgctggccacacaggagagcctgtggcaggagtgctcgctctggctgggtcctctctgctcttcacccctgcccccagtctgggaggtcaagatcatcatcccagtttcatagatgagatggagggggcaccagttgtcaaacggcctttcccagggtgaagggaagtcagaggcaaagttgggactgcagcctggcctcctgctccgacagggtgtggctctgcccacaacccctgccaacccctaccaccctggcctcacacctaagtgccacacattccttcccctcttcttagaaagtagcaaagaaaggttccaccagcagtgttcacagggacagctggctccaagccttcatcagctttctcttcccaaggggttgtacagagctggggctaggaagggttaaacaggcaggccagcgtggctctgcccaggagcccacagaccagtcctctgctgccccagcagcccacacagttctctgcaaaaaaacaaaacaaaacaaaaaaaaaaaacagggcagggtggtactgagccaactacccttcactgatttgcacataatcgtatctttcccttaatggaaccagcaaccaggctgccccatctgctctctccatctccccaccttttattcaagaggctcagaccgcgcctggttcggttcactgttcaagaaacatttactgaggcctggcttgggtggcacagaggtagaggagggagaagggctggtgatggattggagcctccctgtgctgggttgcacagcacagacaggtaaccaaggctggagacgaaagccgctgccccaacagcactgggcctcaagacaaagtccctcaaatgctcatgggtactgggacgtgctgtgactgagctcctcacagcaagaatatgaacttgtcacaactgttagcattagaattggctccatgttacagaagaggaaacggaggcccaggaggtgtagtgacataccctggggtcccatagatagaagcgctcaagctcaggtccttctggtcctaccttctggactcagcaggacagaccagctgggagaacaaagagcccgtcttgatgctgtctgctgcacatcaggcactgctggaagtactcaggggcactatacatagcccagtgagcagggcctcaggacccccaggtttatcccagcctggtcagactcagtgcaggtggccctgcacatccagaagtgtaggatgcagcaaaagctgggatttgagggcaaatcatagccttgaaaaacactagaatagagaaaggtgtcctttcctccaggaagccttccctgatgccatccccacagtggcacagagtgaagggctacttccctgggccctatagtgggcacctgttgagtgctgtgtcatgcagaggcttggcatgccccagctcttggctgagcgttccttctcccactggattgtgagcttgctcaacagtgggtcatgctcatcacactggctgcaagggccagcagccagctaataaatcttggaatgaatgaatgggaccaaatggtttctgcagcccctttcagctccagccctgaggatggggaatgggcacaggcctccagccttcctggagggcagtctgacctatcagcctctcttagaaatgtttatttctcttgtgccacccatttcatctgcctcactgttccaggaacataaactcagaattcagacagagctcaatataaaaaggtgtgcatcagtcacttacactggaaaacagtggacacgagccacattcaggtggctccctaatagcacaggccatgtcctcatctccttatcataagccacgcactgacttctctcaaatgagaaaataaggacgcactggacatgaatgtttcagaattgcgtacccttaaacctctctggcacacgggctatggagagcactgatgtcccaggagtccttcttcttgtgccttggccacgagatcctctgctgcctgccaggcccccacagcctccctgtgaacccaggaccctggatggcagaggagacaggcctagaggctctgagccaggactcgctgggaattgggtgtggggactttcaatatcctgtcccctctgcccccatcctcttcaggggtcgaaagagtggcttggggtcttagaaggtgctttcctcctcacctgcgtgtgagggcagtggaacccaggcaggacagcaggaggcccaaccacacctgaagttgcctgctctggcctgaccgtgtgagccaggcaggccagtccttagaggaccttcctctccaggctgcagtgaggacaccccacagggccctccttgcagccacagaacagaggtcaagggcagagggctgtgggtcagggtgtttccaggatcctccgctgcagggtgctggcaccaggcccggcccaggatgcccgtgactgtgttaaggggcagaaggggtgggagtgctcttgtggcccacctgctctccctatgcgtgtcaccatcatgtcatccttattccacctgcctgccttgatagcccacagcacaggatcagccacggcagaccatggggctcaggctggctcccagggccacgcagtttgtacttggatgacatgaagtcaaattgcaggctgcgggacctcccacttccaggacctccacaacagggccacagcaggtggcctttgcccagcaggaagggccccccaccccacatcttagcctgctagggctgccacagcgaacgaccacaaactgggtacttgaacaacagatgtgtgttctcagttctggaggcaggaaggctgagaccaaggtgctgcaggaccatgggaggttctgggggcttattcttccctccttcagttcctaggggctccagccacccagggctccttggctcctgcccgtatcctctagtctcagcctctgtctctgtctgtgcttcctcctcttctgccccatataaggacattgtcactcactacagggctcactctaatccagaatgagctcctatcgggacctttcacttaattacatcttcaaagactccccttccccaatacggtcacattctcacgtatcttttggggatcaccatgaaacctgccaccctgatcatcagctcgcttccctgagagagggcacactctctccgcccccaccccaccctgacctcagcctccttccttgctgctgcccagttaggaggcgtcctccttgtctgcaagctcttggggcatgtaagcaaggaagggaagaggagatgaatccatgctccttcgcccaggaccagctccctgcctggcagggtccacgggtcccagaaccgtgccacttccctgagcacctgttctgtgctgagctgtgtgtcaggcaccctggacaggctgacagaatgaagaaaacacagtgcagccactttatagggagtgctggagcccactgtgcattcctcctggggaacgagatcaagacaccacctcctggggtgtgtggtcttgcagccactggaggagagggacctcgggcctgcctgtgccccaaagctcacctgacccctgacctgcggcactttagggcctgtagggccccttccacgccctcgcctctacggtgtcagactctcacctggacaggagtccctgactcactagagagctcctccccttctaggtgggctgtggcaggaggccctcccagaggcccctccattggggtgcagaccccttgagtcatagctctagccaccacacccgtctttgccaggttcctcttccggagaccaggaactggtcacacatctgtgtccccagtgtccagcctggcagggagtgggtggcagccttgaagagtgaaggagggaagaaatgaatgaatcagcgagtgggtggggtaggccggctgggccgtgcaggccagcccagcccccgacagtctcgtgtcccttacagatgtgctggtggacggacagccatgtgaccgcgaggctgtggcggcctgccaggtgggcgaccccgtgcgcctggaggtgcggctgaccaaccggagcccgcgcagcgtagggcccttcgccctcactgtggtccccttccaggaccaccagaacggcgtgcacaactacgacctgcacgacaccgtctccttcgtgggctccagcaccttctacctcgacgcggtgcgtggtggtgtgcaaggcggtctgggagcctctggccatgtggtcatcatccccccttccctgggtggtgggctttggggtcagcatatgtccagcagacgatagcagcaggggttctgtggtcacgtgtgcacactgagtctgagtctgccccattcactgcaggaacttagacaagctcacctgtctctcagtcctggacagtgaggccctcagggttggtgaagcaggaaaatgtgcagggaatgggagctgtgcccaggacagggggctgctccatgattggaccctgctgtggcatcactgtgatgtcactgtcacccatcccgtgcctgccgctccttccacggaaaggctccagccctacgccctcagcccccacctcccacctcctacctctcaagctgcctctcagcacctcactgtcaggccccagcacaggctaacattccattcccctctgccccaacctctccctcactccctcccacactcctgaccctcccacactcctgaccccctgagcccccaaacaattcaggaatgggaatattggcagctcctttccaagatgaaaactggctcggagaggcgcagtgacctgctggagggggcactggagccaggcctgggcggccctcgcttcccccataacacctatgtccaggcagattcccaggattcctggtggctttgggtggcccctgctgctgaccagactgatgtgtctttctcctccctgctcaggtgcagccgtccggccagtcggcctgcctcggggccctcctcttcctctacacgggagacttcttcctccacatccggttccacgaggacagcaccagcaaggagctgccaccctcttggttctgcctgcccagtgtgcacgtgtgtgccctggaggcgcaggcctgagcccgcctacttccgtccctctttctgcagggccagaggtgaccctgcctggcctcccacaccccctgcaatgagcaaggccttcactgcagccccatctcctcctcctcccccagacccctcccagccctctcctcctgttcctcctgtagcatctttgctgggctacgcagaagccccggacatggcagccccaccccatgccacgccccttcctacactgttccctggaccatacacaggctgaagcagaggaaatcccaaagcgggtgcccatccagcccaggtcccaggatccctgcacccatttctgtgacctggggccccagccgtgctgtgctgctcatcccagcagagggacctccctcgtccagcgacttccctttggccatagaaagaaatggtgagcatgagactgggcacagcctgagggcgtgggcagcttcccaccctccctgggccttggaatcccccaaggctggttttcttcctggagacccccatgggcaacttggcaggagagatggtgccgtaggaggtcgtggatggttgatgccaagagaggccctccacccgtggtgggcaaatgtccaggcctgggctggcagcccagggctgtttctgggtgctccctggccccagggtggcgtctggttaccatggctgtgtgtgtccatgtctgcaagcagttcttcaataaatggcctgcctccccc

SEQ ID NO: 390 - DNA, 4017 bp, Homo sapiens
ggacttcaaaatgagcgtccctgactacatgcagtgtgctgaggaccaccagacgctgctcgtggtggtccagcctgtgggcatcgtctccgaggagaacttcttcaggatctataagaggatttgctctgtgagtcagatcagcgtgcgggactcccagcgagtcctctacatccgctacaggcaccactacccacccgagaacaacgagtggggcgacttccagacccaccgcaaagtcgtgggcctcatcaccatcacagactgcttctcggccaaggactggccacagaccttcgagaagttccacgtgcagaaggagatctacggctccacactgtatgactcccggctctttgtcttcgggctgcagggggagatcgtggagcagccgcgcaccgacgtggctttctaccccaattacgaggactgccagacggtggagaagagaatcgaggacttcatcgagtcactgttcatcgtgctggagtccaagcgtctggacagagccacagacaagtctggggataagatcccccttctctgtgtcccgtttgagaaaaaggactttgtaggactggacacagacagcagacattacaagaagcggtgccaaggccgcatgcggaagcacgtgggggacctgtgcctgcaggcagggatgctgcaggactccctggtgcattaccacatgtcggtggagctgctgcgttctgtgaatgactttctgtggcttggagctgccctggaaggattgtgttcagcttctgtcatctatcactatcctggtggaactggtgggaagagtggagctcggaggttccagggcagcacccttcctgctgaagcagccaatagacaccggccaggtgccctcaccaccaatggcatcaaccctgacaccagtactgagatcggacgtgctaagaactgccttagccctgaagacataattgacaagtataaagaggcgatttcctattacagcaagtataagaatgcgggagtgattgagttggaagcgtgcatcaaggctgtacgtgtccttgcaattcagaaacggagcatggaagcatcagaatttcttcagaatgcagtttacattaaccttcgacagctttctgaggaagagaaaattcagcgctacagcatcctctccgagctctatgagctgatcggcttccatcgcaagtctgcgttcttcaagcgcgtggccgccatgcagtgcgtggccccaagcatcgcggagcctgggtggagggcctgctacaaactcctcctggaaacgctgcccggctacagtctgtcgctggatcccaaagatttcagcagaggcacgcacagaggctgggctgcggtccagatgcgtttgctccatgaattggtctacgcctcccgaaggatggggaaccctgccctctctgtcagacacctgtccttccttctacagaccatgctggacttcttgtcggatcaggaaaagaaagatgtggcccaaagcctagagaactatacgtccaagtgtcctgggaccatggagcccatcgccctccctggcggcctcaccctgccaccggtgcccttcaccaagcttcccatcgtcaggcatgtgaaactattgaaccttcctgctagcctccggccacacaaaatgaaaagcttgctgggtcagaacgtgtcaaccaaaagtcctttcatctattcaccaattatcgcacacaaccgtggagaagagcggaacaagaaaatagatttccagtgggttcaaggagatgtgtgtgaagttcagctgatggtatataacccaatgccgtttgaacttcgagttgaaaacatggggctgctcaccagcggagtggagttcgagtctctccctgcggcgctttctcttccggctgaatctggtctgtacccagtgacgctcgtcggggtcccgcagacgactggaacgattactgtgaacggtagatctgcacattcattgcaaccttcttctggtgatgaaatatctactaatgtatctgtccagctttacaatggagaaagtcagcaactaatcattaaattggaaaatattggaatggaaccattggagaaactggaggtcacctcgaaagttctcaccactaaagaaaaattgtatggcgacttcttgagctggaagctagaggaaacccttgcccagttccctttgcagcctgggaaggtggccacgttcacaatcaacatcaaagtgaagctggatttctcctgccaggagaatctcctgcaggatctcagtgatgatggaatcagtgtgagtggctttcccctgtccagtccttttcggcaggtcgttcggccccgagtggagggcaaacctgtgaacccacccgagagcaacaaagcaggcgactacagccacgtgaagaccctggaagctgtcctgaatttcaaatactctggaggcccgggccacactgaaggatattacaggaatctctccctggggctgcatgtagaagtcgagccgtctgtatttttcacccgagtcagcaccctcccagcaaccagtacccggcagtgtcacctgctcctggatgtcttcaactccaccgagcatgagctgaccgtcagcaccaggagcagcgaggcactcatcctgcacgccggcgagtgccagcgaatggctattcaagtggacaagttcaactttgagagtttcccggagtcccctggggagaaggggcaatttgcaaaccccaagcagctggaggaagagcggcgggaagcccgaggcctggagatccacagcaagctgggcatctgctggagaatcccctccctgaagcgcagtggcgaggcgagtgtggaaggactcctgaaccagctcgtcctggagcacctgcagctggcgcctctgcagtgggatgtgctggtggacggacagccatgtgaccgcgaggctgtggcggcctgccaggtgggcgaccccgtgcgcctggaggtgcggctgaccaaccggagcccgcgcagcgtagggcccttcgccctcactgtggtccccttccaggaccaccagaacggcgtgcacaactacgacctgcacgacaccgtctccttcgtgggctccagcaccttctacctcgacgcggtgcagccgtccggccagtcggcctgcctcggggccctcctcttcctctacacgggagacttcttcctccacatccggttccacgaggacagcaccagcaaggagctgccaccctcttggttctgcctgcccagtgtgcacgtgtgtgccctggaggcgcaggcctgagcccgcctacttccgtccctctttctgcagggccagaggtgaccctgcctggcctcccacaccccctgcaatgagcaaggccttcactgcagccccatctcctcctcctcccccagacccctcccagccctctcctcctgttcctcctgtagcatctttgctgggctacgcagaagccccggacatggcagccccaccccatgccacgccccttcctacactgttccctggaccatacacaggctgaagcagaggaaatcccaaagcgggtgcccatccagcccaggtcccaggatccctgcacccatttctgtgacctggggccccagccgtgctgtgctgctcatcccagcagagggacctccctcgtccagcgacttccctttggccatagaaagaaatggtgagcatgagactgggcacagcctgagggcgtgggcagcttcccaccctccctgggccttggaatcccccaaggctggttttcttcctggagacccccatgggcaacttggcaggagagatggtgccgtaggaggtcgtggatggttgatgccaagagaggccctccacccgtggtgggcaaatgtccaggcctgggctggcagcccagggctgtttctgggtgctccctggccccagggtggcgtctggttaccatggctgtgtgtgtccatgtctgcaagcagttcttcaataaatggcctgcctccccc

SEQ ID NO: 391 - protein, 1088 aa, Homo sapiens
MSVPDYMQCAEDHQTLLVVVQPVGIVSEENFFRIYKRICSVSQISVRDSQRVLYIRYRHHYPPENNEWGDFQTKVVGLITITDCFSAKDWPQTFEKFHVQKEIYGSTLYDSRLFVFGLQGEIVEQPRTDVAFYPNYEDCQTVEKRIEDFIESLFIVLESKRLDRATDKSGDKIPLLCVPFEKKDFVGLDTDSRHYKKRCQGRMRKHVGDLCLQAGMLQDSLVHYHMSVELLRSVNDFLWLGAALEGLCSASVIYHYPGGTGGKSGARRFQGSTLPAEAANRHRPGALTTNGINPDTSTEIGRAKNCLSPEDIIDKYKEAISYYSKYKNAGVIELEACIKAVRVLAIQKRSMEASEFLQNAVYINLRQLSEEEKIQRYSILSELYELIGFHRKSAFFKRVAAMQCVAPSIAEPGWRACYKLLLETLPGYSLSLDPKDFSRGTGWAAVQMRLLHELVYASRRMGNPALSVRHLSFLLQTMLDFLSDQEKKDVAQSLENYTSKCPGTMEPIALPGGLTLPPVPFTKLPIVRHVKLLNLPASLRPHKMKSLLGQNVSTKSPFIYSPIIAHNRGEERNKKIDFQWVQGDVCEVQLMVYNPMPFELRVENMGLLTSGVEFESLPAALSLPAESGPVTLVGVPQTTGTITVNGRSAHSLQPSSGDEISTNVSVQLYNGESQQLIIKLENIGMEPLEKLEVTSKVLTTKEKLYGDFLSWKLEETLAQFPLQPGKVATFTINIKVKLDFSCQENLLQDLSDDGISVSGFPLSSPFRQVVRPRVEGKPVNPPESNKAGDYSHVKTLEAVLNFKYSGGPGHTEGYYRNLSLGLHVEVEPSVFFTRVSTLPATSTRQCHLLLDVFNSTEHELTVSTRSSEALILHAGECQRMAIQVDKFNFESFPESPGEKGQFANPKQLEEERRERLEIHSKLGICWRIPSLKRSGEASVEGLLNQLVLEHLQLAPLQWDVLVDGQPCDREAVAACQVGDPVRLEVRLTNRSPRSVGPFALTVVPFQDHQNGVHNYDLHDTVSFVGSSTFYLDAVQPSGQSACLGALLFLYTGDFFLHIRFHEDSTSKELPPSWFCLPSVHVCALEAQA

SEQ ID NO: 392 - DNA, 4157 bp, Homo sapiens
cagcccagagcctgggaagtggccgcagaggctgctcggccccgctgcccgccaggtcgtgggctcccgctccgggcccggggccaccggctgtggacttcaaaatgagcgtccctgactacatgcagtgtgctgaggaccaccagacgctgctcgtggtggtccagcctgtgggcatcgtctccgaggagaacttcttcaggatctataagaggatttgctctgtgagtcagatcagcgtgcgggactcccagcgagtcctctacatccgctacaggcaccactacccacccgagaacaacgagtggggcgacttccagacccaccgcaaagtcgtgggcctcatcaccatcacagactgcttctcggccaaggactggccacagaccttcgagaagttccacgtgcagaaggagatctacggctccacactgtatgactcccggctctttgtcttcgggctgcagggggagatcgtggagcagccgcgcaccgacgtggctttctaccccaattacgaggactgccagacggtggagaagagaatcgaggacttcatcgagtcactgttcatcgtgctggagtccaagcgtctggacagagccacagacaagtctggggataagatcccccttctctgtgtcccgtttgagaaaaaggactttgtaggactggacacagacagcagacattacaagaagcggtgccaaggccgcatgcggaagcacgtgggggacctgtgcctgcaggcagggatgctgcaggactccctggtgcattaccacatgtcggtggagctgctgcgttctgtgaatgactttctgtggcttggagctgccctggaaggattgtgttcagcttctgtcatctatcactatcctggtggaactggtgggaagagtggagctcggaggttccagggcagcacccttcctgctgaagcagccaatagacaccggccaggggcacaggaagttctcattgatccaggtgccctcaccaccaatggcatcaaccctgacaccagtactgagatcggacgtgctaagaactgccttagccctgaagacataattgacaagtataaagaggcgatttcctattacagcaagtataagaatgcgggagtgattgagttggaagcgtgcatcaaggctgtacgtgtccttgcaattcagaaacggagcatggaagcatcagaatttcttcagaatgcagtttacattaaccttcgacagctttctgaggaagagaaaattcagcgctacagcatcctctccgagctctatgagctgatcggcttccatcgcaagtctgcgttcttcaagcgcgtggccgccatgcagtgcgtggccccaagcatcgcggagcctgggtggagggcctgctacaaactcctcctggaaacgctgcccggctacagtctgtcgctggatcccaaagatttcagcagaggcacgcacagaggctgggctgcggtccagatgcgtttgctccatgaattggtctacgcctcccgaaggatggggaaccctgccctctctgtcagacacctgtccttccttctacagaccatgctggacttcttgtcggatcaggaaaagaaagatgtggcccaaagcctagagaactatacgtccaagtgtcctgggaccatggagcccatcgccctccctggcggcctcaccctgccaccggtgcccttcaccaagcttcccatcgtcaggcatgtgaaactattgaaccttcctgctagcctccggccacacaaaatgaaaagcttgctgggtcagaacgtgtcaaccaaaagtcctttcatctattcaccaattatcgcacacaaccgtggagaagagcggaacaagaaaatagatttccagtgggttcaaggagatgtgtgtgaagttcagctgatggtatataacccaatgccgtttgaacttcgagttgaaaacatggggctgctcaccagcggagtggagttcgagtctctccctgcggcgctttctcttccggctgaatctggtctgtacccagtgacgctcgtcggggtcccgcagacgactggaacgattactgtgaacggtatttcttcttcttattttagatctgcacattcattgcaaccttcttctggtgatgaaatatctactaatgtatctgtccagctttacaatggagaaagtcagcaactaatcattaaattggaaaatattggaatggaaccattggagaaactggaggtcacctcgaaagttctcaccactaaagaaaaattgtatggcgacttcttgagctggaagctagaggaaacccttgcccagttccctttgcagcctgggaaggtggccacgttcacaatcaacatcaaagtgaagctggatttctcctgccaggagaatctcctgcaggatctcagtgatgatggaatcagtgtgagtggctttcccctgtccagtccttttcggcaggtcgttcggccccgagtggagggcaaacctgtgaacccacccgagagcaacaaagcaggcgactacagccacgtgaagaccctggaagctgtcctgaatttcaaatactctggaggcccgggccacactgaaggatattacaggaatctctccctggggctgcatgtagaagtcgagccgtctgtatttttcacccgagtcagcaccctcccagcaaccagtacccggcagtgtcacctgctcctggatgtcttcaactccaccgagcatgagctgaccgtcagcaccaggagcagcgaggcactcatcctgcacgccggcgagtgccagcgaatggctattcaagtggacaagttcaactttgagagtttcccggagtcccctggggagaaggggcaatttgcaaaccccaagcagctggaggaagagcggcgggaagcccgaggcctggagatccacagcaagctgggcatctgctggagctcacccctccctgaagcgcagtggcgaggcgagtgtggaaggactcctgaaccagctcgtcctggagcacctgcagctggcgcctctgcagtgggatgtgctggtggacggacagccatgtgaccgcgaggctgtggcggcctgccaggtgggcgaccccgtgcgcctggaggtgcggctgaccaaccggagcccgcgcagcgtagggcccttcgccctcactgtggtccccttccaggaccaccagaacggcgtgcacaactacgacctgcacgacaccgtctccttcgtgggctccagcaccttctacctcgacgcggtgcagccgtccggccagtcggcctgcctcggggccctcctcttcctctacacgggagacttcttcctccacatccggttccacgaggacagcaccagcaaggagctgccaccctcttggttctgcctgcccagtgtgcacgtgtgtgccctggaggcgcaggcctgagcccgcctacttccgtccctctttctgcagggccagaggtgaccctgcctggcctcccacaccccctgcaatgagcaaggccttcactgcagccccatctcctcctcctcccccagacccctcccagccctctcctcctgttcctcctgtagcatctttgctgggctacgcagaagccccggacatggcagccccaccccatgccacgccccttcctacactgttccctggaccatacacaggctgaagcagaggaaatcccaaagcgggtgcccatccagcccaggtcccaggatccctgcacccatttctgtgacctggggccccagccgtgctgtgctgctcatcccagcagagggacctccctcgtccagcgacttccctttggccatagaaagaaatggtgagcatgagactgggcacagcctgagggcgtgggcagcttcccaccctccctgggccttggaatcccccaaggctggttttcttcctggagacccccatgggcaacttggcaggagagatggtgccgtaggaggtcgtggatggttgatgccaagagaggccctccacccgtggtgggcaaatgtccaggcctgggctggcagcccagggctgtttctgggtgctccctggccccagggtggcgtctggttaccatggctgtgtgtgtccatgtctgcaagcagttcttcaataaatggcctgcctccccc

SEQ ID NO: 393 - protein, 982 aa, Homo sapiens
MSVPDYMQCAEDHQTLLVVVQPVGIVSEENFFRIYKRICSVSQISVRDSQRVLYIRYRHHYPPENNEWGDFQTKVVGLITITDCFSAKDWPQTFEKFHVQKEIYGSTLYDSRLFVFGLQGEIVEQPRTDVAFYPNYEDCQTVEKRIEDFIESLFIVLESKRLDRATDKSGDKIPLLCVPFEKKDFVGLDTDSRHYKKRCQGRMRKHVGDLCLQAGMLQDSLVHYHMSVELLRSVNDFLWLGAALEGLCSASVIYHYPGGTGGKSGARRFQGSTLPAEAANRHRPGAQEVLIDPGALTTNGINPDTSTEIGRAKNCLSPEDIIDKYKEAISYYSKYKNAGVIELEACIKAVRVLAIQKRSMEASEFLQNAVYINLRQLSEEEKIQRYSILSELYELIGFHRKSAFFKRVAAMQCVAPSIAEPGWRACYKLLLETLPGYSLSLDPKDFSRGTGWAAVQMRLLHELVYASRRMGNPALSVRHLSFLLQTMLDFLSDQEKKDVAQSLENYTSKCPGTMEPIALPGGLTLPPVPFTKLPIVRHVKLLNLPASLRPHKMKSLLGQNVSTKSPFIYSPIIAHNRGEERNKKIDFQWVQGDVCEVQLMVYNPMPFELRVENMGLLTSGVEFESLPAALSLPAESGPVTLVGVPQTTGTITVNGISSSYFRSAHSLQPSSGDEISTNVSVQLYNGESQQLIIKLENIGMEPLEKLEVTSKVLTTKEKLYGDFLSWKLEETLAQFPLQPGKVATFTINIKVKLDFSCQENLLQDLSDDGISVSGFPLSSPFRQVVRPRVEGKPVNPPESNKAGDYSHVKTLEAVLNFKYSGGPGHTEGYYRNLSLGLHVEVEPSVFFTRVSTLPATSTRQCHLLLDVFNSTEHELTVSTRSSEALILHAGECQRMAIQVDKFNFESFPESPGEKGQFANPKQLEEERRERLEIHSKLGICWSSPLPEAQWRGECGRTPEPARPGAPAAGASAVGCAGGRTAM

SEQ ID NO: 394 - DNA, 4171 bp, Homo sapiens
gagcagcgccggctcggccgccagtaggaagcgccagcccagagcctgggaagtggccgcagaggctgctcggccccgctgcccgccaggtcgtgggctcccgctccgggcccggggccaccggctgtgtaagtgcaaagcgggggggctcccgggacttcaaaatgagcgtccctgactacatgcagtgtgctgaggaccaccagacgctgctcgtggtggtccagcctgtgggcatcgtctccgaggagaacttcttcaggatctataagaggatttgctctgtgagtcagatcagcgtgcgggactcccagcgagtcctctacatccgctacaggcaccactacccacccgagaacaacgagtggggcgacttccagacccaccgcaaagtcgtgggcctcatcaccatcacagactgcttctcggccaaggactggccacagaccttcgagaagttccacgtgcagaaggagatctacggctccacactgtatgactcccggctctttgtcttcgggctgcagggggagatcgtggagcagccgcgcaccgacgtggctttctaccccaattacgaggactgccagacggtggagaagagaatcgaggacttcatcgagtcactgttcatcgtgctggagtccaagcgtctggacagagccacagacaagtctggggataagatcccccttctctgtgtcccgtttgagaaaaaggactttgtaggactggacacagacagcagacattacaagaagcggtgccaaggccgcatgcggaagcacgtgggggacctgtgcctgcaggcagggatgctgcaggactccctggtgcattaccacatgtcggtggagctgctgcgttctgtgaatgactttctgtggcttggagctgccctggaaggattgtgttcagcttctgtcatctatcactatcctggtggaactggtgggaagagtggagctcggaggttccagggcagcacccttcctgctgaagcagccaatagacaccggccaggtgccctcaccaccaatggcatcaaccctgacaccagtactgagatcggacgtgctaagaactgccttagccctgaagacataattgacaagtataaagaggcgatttcctattacagcaagtataagaatgcgggagtgattgagttggaagcgtgcatcaaggctgtacgtgtccttgcaattcagaaacggagcatggaagcatcagaatttcttcagaatgcagtttacattaaccttcgacagctttctgaggaagagaaaattcagcgctacagcatcctctccgagctctatgagctgatcggcttccatcgcaagtctgcgttcttcaagcgcgtggccgccatgcagtgcgtggccccaagcatcgcggagcctgggtggagggcctgctacaaactcctcctggaaacgctgcccggctacagtctgtcgctggatcccaaagatttcagcagaggcacgcacagaggctgggctgcggtccagatgcgtttgctccatgaattggtctacgcctcccgaaggatggggaaccctgccctctctgtcagacacctgtccttccttctacagaccatgctggacttcttgtcggatcaggaaaagaaagatgtggcccaaagcctagagaactatacgtccaagtgtcctgggaccatggagcccatcgccctccctggcggcctcaccctgccaccggtgcccttcaccaagcttcccatcgtcaggcatgtgaaactattgaaccttcctgctagcctccggccacacaaaatgaaaagcttgctgggtcagaacgtgtcaaccaaaagtcctttcatctattcaccaattatcgcacacaaccgtggagaagagcggaacaagaaaatagatttccagtgggttcaaggagatgtgtgtgaagttcagctgatggtatataacccaatgccgtttgaacttcgagttgaaaacatggggctgctcaccagcggagtggagttcgagtctctccctgcggcgctttctcttccggctgaatctggtctgtacccagtgacgctcgtcggggtcccgcagacgactggaacgattactgtgaacggtagatctgcacattcattgcaaccttcttctggtgatgaaatatctactaatgtatctgtccagctttacaatggagaaagtcagcaactaatcattaaattggaaaatattggaatggaaccattggagaaactggaggtcacctcgaaagttctcaccactaaagaaaaattgtatggcgacttcttgagctggaagctagaggaaacccttgcccagttccctttgcagcctgggaaggtggccacgttcacaatcaacatcaaagtgaagctggatttctcctgccaggagaatctcctgcaggatctcagtgatgatggaatcagtgtgagtggctttcccctgtccagtccttttcggcaggtcgttcggccccgagtggagggcaaacctgtgaacccacccgagagcaacaaagcaggcgactacagccacgtgaagaccctggaagctgtcctgaatttcaaatactctggaggcccgggccacactgaaggatattacaggaatctctccctggggctgcatgtagaagtcgagccgtctgtatttttcacccgagtcagcaccctcccagcaaccagtacccggcagtgtcacctgctcctggatgtcttcaactccaccgagcatgagctgaccgtcagcaccaggagcagcgaggcactcatcctgcacgccggcgagtgccagcgaatggctattcaagtggacaagttcaactttgagagtttcccggagtcccctggggagaaggggcaatttgcaaaccccaagcagctggaggaagagcggcgggaagcccgaggcctggagatccacagcaagctgggcatctgctggagaatcccctccctgaagcgcagtggcgaggcgagtgtggaaggactcctgaaccagctcgtcctggagcacctgcagctggcgcctctgcagtgggatgtgctggtggacggacagccatgtgaccgcgaggctgtggcggcctgccaggtgggcgaccccgtgcgcctggaggtgcggctgaccaaccggagcccgcgcagcgtagggcccttcgccctcactgtggtccccttccaggaccaccagaacggcgtgcacaactacgacctgcacgacaccgtctccttcgtgggctccagcaccttctacctcgacgcggtgcagccgtccggccagtcggcctgcctcggggccctcctcttcctctacacgggagacttcttcctccacatccggttccacgaggacagcaccagcaaggagctgccaccctcttggttctgcctgcccagtgtgcacgtgtgtgccctggaggcgcaggcctgagcccgcctacttccgtccctctttctgcagggccagaggtgaccctgcctggcctcccacaccccctgcaatgagcaaggccttcactgcagccccatctcctcctcctcccccagacccctcccagccctctcctcctgttcctcctgtagcatctttgctgggctacgcagaagccccggacatggcagccccaccccatgccacgccccttcctacactgttccctggaccatacacaggctgaagcagaggaaatcccaaagcgggtgcccatccagcccaggtcccaggatccctgcacccatttctgtgacctggggccccagccgtgctgtgctgctcatcccagcagagggacctccctcgtccagcgacttccctttggccatagaaagaaatggtgagcatgagactgggcacagcctgagggcgtgggcagcttcccaccctccctgggccttggaatcccccaaggctggttttcttcctggagacccccatgggcaacttggcaggagagatggtgccgtaggaggtcgtggatggttgatgccaagagaggccctccacccgtggtgggcaaatgtccaggcctgggctggcagcccagggctgtttctgggtgctccctggccccagggtggcgtctggttaccatggctgtgtgtgtccatgtctgcaagcagttcttcaataaatggcctgcctccccc

SEQ ID NO: 395 - protein, 1088 aa, Homo sapiens; identical to SEQ ID NO: 391

SEQ ID NO: 396 - DNA, 27094 bp, Mus musculus
  misc_feature (1)...(27094): n = A,T,C or G
ctacttctggtatctagagaatgatttggggaagcagatctggaaggctgcagcagctcttgttgcaaacatgagctctggcctcgcacagccttctccaccgcctgagcctagctctccagcctgcagacatccactgggccaccctcctgcccactgctgagcctgccaggcagtgccatctgctctgcagcctgtccctggtggaaaggcaaaatgaccacattgtttctcttccagcttctcgtcaagacatggaagccactgccaagtttgatttcatggcctcaggtgaggacgaactgagctttcgcactggagacattctgaaggtaggtaatgtgggctcccaggggagtagtgaggggctgaggtcccctgggcctggccaccaaggccacctaacaacctatgcctccgttgctaaaaaagagtgcagacttcatttttttcttttttctttcaaaaccagatgtgggcacatgctcataatcctagcactcgagaggtagaggcaggaggatcaagagttccaaggccagccttggctacataatgannnnnnnnnnnnnnnnnnnnnnnnnnnnnnnnnnnnnnnnnnnnnnnnnnnnnnnnnnnnnnnnnnnnnnnnnnnnnnnnnnnnnnnnnnnnnnnnnnnnnnnnnnnnnnnnnnnnnnnnnnnnnnnnnnnnnnnnnnnnnnnnnnnnnnnnnnnnnnnnnnnnnnnnnnnnnnnnnnnnnnnnnnnnnnnnnnnnnnnnnnnnnnnnnnnnnnnnnnnnnnnnnnnnnnnnnnnnnnnnnnnnnnnnnnnnnnnnnnnnnnnnnnnnnnnnnnnnnnnnnnnnnnnnnnnnnnnnnnnnnnnnnnnnnnnnnnnnnnnnnnnnnnnnnnnnnnnnnnnnnnnnnnnnnnnnnnnnnnnnnnnnnnnnnnnnnnnnnnnnnnnnnnnnnnnnnnnnnnnnnnnnnnnnnnnnnnnnnnnnnnnnnnnnnnnnnnnnnnnnnngaaagagagagagagagaaagagagagagagagaggtggggagagggagagggagagggagagaacgccaaagtttatttctagggcaatctactgaccatccatgtgtagagaacttctgtgacttttagccaataccaagcctttatcccattagtactacctggaagacatgcagaggaacaggcctttgctaaagggtggatacaagtgttccatccctcatccctcatcataatagcttcctagttgggcaaacaagagagagagagagagagagagagagagagggagagagtgtgtgtgtgtgtgtgtgtgtgtgtgtgtgtatacatgctcatgtgtttgcagatgtatatgcacatacatatgtgtacatgtgcacatgtgtatgcatgcccatgtacgtgtatgcacataagggtagagtccagaagtttatatcaggcgtcttctgttagcttacaggcaattccactaggcttctctcagggacctagcaacagcttatgtcacctactgtcattacctgctggctaccaccaggtgtgccaagtgtgtgtcaattataaaaaggactgcccaccaccccagctcactttctgttcttggtattgtctctccccagttctctccctctctgccctccactccactcagccccccacccctaccccaccccccaccctcatggctcctttgctgcctctactcctttcctgaagtcatcgctactctcccttcccccagcaagccccctttatatcatatctgttgcatagtgtaattactcaggggcatgtcttggcatgagcccacaatggcgccccctcaccacactatataacattttccaccataattttttgaagcactatctcccactgaacctggagctcactaatttgacttaggcaggctgaccagtgagctccagtgaccagcctgtctctacctcccctgtgcctagactcatgcctccataaccagagatctgaattcaagaccttgtgcttgcatggtgggctgtttactgcctgagccccctcccagccccagaggattcatccttaaaggagcctggctctgagcacagcccagtgtagttccataaaaagagaagcccacatccctccagattgttccttctgagcacctatgtgctggacaccaggttgggcaacagaaattcagagctgccataagtcaccctctttctccaacctgtggcacggagtgagcagcacacgcctctgacgggctatcgtagacactctcagcttggtgctcaggagcatgcatgggggaacatgggatcccaccctgaaaggtgggccaagtgcaagtgtggcagtgggaacatcaggaaacagcaaagtcaaagaaatgcaaggccaggcttcagatggaaaaggtgcaggtggaggccgccagggagaggcagcagacccagggtggctcgatggagctcatgcatccccagccactaaggggctccttaaaacttgtttccgggccccacttgggttgtagtggccactggcggagccgaagtagccttggacttctcccatattccaggtatccatctacatactccaaagttagcccttgtgatttgcaaaggatataacagcccgtccacaggacattcaggagtatgtggtggcagtgtacacctatgtgacctcagggcaccctccgagagcatacctcagctttgtgctcagttgtccaggtggtcctctcacaggtctgagtcaccaaggccactgttgtatcttgccacagagaactgtgggccatacaaaggcccttgttggggtgtcagagggcaacctggaaaagtgtctgcagaacacatgcgtgtagaacagaacggcttcatttaccacataaacacacacacacacacacacacagtgaatagctttctaaccggtttcagcttgaaagacctcatgctatggttgaccccacagtgtcccaagtttgaagttttataagctcaaataggttagaccaccagttgaggaaatggtggccttcgcatcttcagatccttattgaggtcacagagacccttgtcatgtgaaggtaagtctctcctccctcctctctggggcaccgtgaccattcagataccaacacacagaagcaccccctgctcagccgagctcctgccccggtgttcatcacacacagacctaatgccttgcgtaagctcccctgttaccttatgttatccagaagagcgaaaggaaaagcaagcaaatgagtgttccctcagccctgttccccaggctggctccttattgatttcctgtcccttttgctcaaaaggaagcagttctctgcgcccggtgccagagccatccacttcccctcttggctccacggccctttgaagtctgccttttattttgtgtcctggtttgtttcgtgttgctgggatagcaacttggggaggggagggttttgtttgacttacacttgcacatcaaagtccatcactgagggaggtcagggcaggaactcaaggcaggaatctggaggcaggaactgaaacaaagaccacaagaggaactgctttcgctgctttaggactcttggctgactctgctactttagttatagagcccacctgcctagggatggtaccacccacagtgggctgggccctcccactccatcattaatcaagaaactgtctcacagacttgcctaggggccaatctgattccagtttacagtcctcttcctagatgactctagctggtgtcaagttaacaaaaactccccagcacgtgctacaacctccttcatgtgagttgaatgttctaccaagacaactatgtgccttccccatctcctggtctctcaggtgactggctggcagccccttgactgaagtcattgcctcttgtcttttcctccttcaatcgttccacacactggtcccagaaggacttttctagaagacaaatcggagactctattggctgcccctcgctggggctctttccccttgctcgatggcacccctgtcttgttctctctcccctcaacctctcctccaggtcttgtttgtgagtgtgcctgtcctctctctaatctgatatatccactcccctgaagctatgtccttggccttcttctgattctctttgctctgaatcacctcaccctcttctctgactctgtgctaaagatagcccactctgtacctttctccctcactaacccctgccttgaaccccagaaccagttgtctgccggatgttatctcctgccatcaggctcannnnnnnnnnnnnnnnnnnnccggatgttatctcctgccatcaggctcacacatccccctagacccacccaacccaacttccatccaagttattcttctgtctgtaatagatgtaccatcaaagttcagttgctagatacctctcttgccaaatcctggtggtcaggactgccaccagctgagtttctattgcgagccaagactggcacaggggatacaggtactattgtggcatctcagcaaacctaggaggttgagagtgaaacggaggctgagggattaaacaacctgtcaaaatcacgcagagacagtgactgggccagggcctgcatggagcgctctctgttccttatgtactatctctgttctatatatatttctttccctaagtcccccaagggaagacattctccattagaaaaagaaaaagtgtgatgctagaacaaaggaacacaggctttgtcaccccatgaatatggattcagttcccagcctgtgagctgtgtagcctgggcctaggcacctgccagtgtgaacctcagtgccagcctcagtgtgagcctcagtgtgagcctcatcagtgccagactcagtgtgagcctcagtgtgagcctcagtgtgagcctcatcagtgccagtctcagtgccagcctcagtgtgagcctcagtgtgagcctcagtgtgagcctcatcagtgccagtctcagtgccagcctcagtgtgagcctcagtgtgagcctcagtgtgagcttcagtgtgagcctcatcagtgtgagcctcagtgtgagcctaaatgtgagcatcagtgtgagcctcagtgtgagcctcagtatgagcctcatcagtgccagtctcagtgccaacctcagtgtgagcctcagtgtgagcctcagtgtgagcctcagtgtgagcctcagtgtgagcatcagtgtgagcctcatcagtgtgagcatcagtgtgagcatcatcagtgtgagcctcatcagtgtgagcatcagtgtgagcatcatcagtgtgaacatcagtgtgagcatcagtgtgagcatcatcagtgtgagcatcatcagtgtgagcatcggtgtgagcctcagtgtgaacctcagtgtttgcctctgtgaaaggatggcctatcctgcagagtctaggaaaggagttaaaggtcatggtccaaagcagaccctgagcaagcagcggccatattatcacgactacatgccttcttgctctctcggccaatggtcatcggaagccgttgtctcctctctcttcctccccaatcagtcgacacactggtgccagaaggactcttcccgaagacaaagcagatcagatcatctccttcctcaaaatcactcccattaccattaccaactcgttgaaatctaacccattatctagtctcatcaccctcacgggcaggcccatgtgtacacacgtactcacagcacacatctttgaggtaacccctctccattatctgtttcccagcatctcacacacttacaatgttgcctcagacaagctgtcctttcagggccatctctcaccaccacagttccttaccacatgtgattttttttttaaaggttttatttattttatgtatgtggatacaccatcactatcctcagacacaccagaagagggcaccagatcccattgctgtggttgtgagctaccatgtggctgctgggaattgaactcaggacttctgaaagagcagtgagtgcttaaccgctgagacgtctctccagccccaccacatgtgatcttaattgcccatttccttgttggctacctcactggccaaagttttgtagttttgtttgagggttacacatacttcagcatctctagaagctgaatgatgcttagcattaagtgagatgagtgaatgaatgaatgaatgaatgaatagtgggttcttccattgagaaactccatgagagcagagagactccagttcaacactgtgccttcccagcatctttcacaagccacatccccaagcatatgtcttgacctggggaatgtcatctatgtggccacttagagtcccatcagcaagtcaactctgcccacctttcccaggtctgcacgttgcagccagggctgcaaaagtaaaccacagagagcctgcgccagagctcttatgtctgaatggtggccattaatgatcgcgtcagtcatcgcaagcctgcgaaaacatgcccagggacctctgcagaccatttcaaggacagctcttaagtgccctagaaagtcacttggaggtgctcgggttgattggccttcagctcgaacgattagacagacttttttattagagaagtacaaagatgcgattggctagctttccagcgatcctctcccactccttctctggcttcccagctaaaacagcaggtgggacagcagacaagatggtggacaaggagcctctaccaaaggggcttgctccttgttctccagggaaataaacagttggaaaggaattgggggaatcacacttttcgtgttcatacctgtggctatacagggtacccatctacactgggatccgcctgcagctttggaaaagggcttttgacccagtttgttcctccctgtttctataatgtgtccaagtcgaccccatttctccctactaagagaggcctaaaagcactgacttaatcccacacaattaacttctgcgatgccctggctttccgctgtgcctctaagagctgtacttccatccaattttacatttcttcccagctgtacttccggcctttcttcccacatctagcttattctcaggccatgtaacccagaaaattattctcttggggaacatttgaagaaagacggcacagcaatttaagtgtagaacttcgtgtgtctgggccgtactctttgcccgggcttacatgaggggtacaaagagataggggaactgaatcgatggagagatgagaacaggaagctctggggctcggggcccacaacagcaggaggaagccaccacccctcaaaagaaaaaaacaaaacaaaacaaaacacttttctttgcagaaaatgagagattaaaaaaaaaaaaaacccaaccttctatatactataaaatgcctgtgaattcacccctctagaaacataatctcaggcagatcaagccccaggtggtagagacaatagctggctgtccgttcccggacaatctttagtttctggaggaagtagatgactgctggccgtgattacttgaattgcgctggtttctggtcagagagcaagctatggagggtgattcgtactgtgataagccaatttccaaatggcatctctctccctcacctctgctccattaggatttgacgttggttaccctggccaacccccacctcccccagggtcgactgtgacaggacaaactaattccaaagctgtcaattccggagcggtgcacggtgcaccgagggaaacgttctcatgctttttaagtggatacaagatgccgcagctgagtttcctcgccttcccttgacctagtttgtgcctccctgccccctcggtccccccagcacacacagacccacacccatcctcagcaaagctgagagacacatttgatgttagaaagtttctgttctcagcatttctcgagctcaaatatgggacatgcttttactgcttcagagacgaatgatcacagcccgaacattcatgaacagtgcttgcaagaattacaagcccttccatgtccaatagaactggagtcctccctaataaagatacagtattaaacgtgtgtgtgtgtgtgtgtgtgtgtgtgtgtgtgctgtgtgtgtgtgtgtgttatgcgtgtgtgtgtgttatgtgtgtgtgtgtgttatgtgtgtgtgtgtgtgttatgtgtgtgtgtatgaatgtttgccagtttggtgacccaggtatttgatcccagcaattgggaggcagacacaggcagatctgagtttgaggccagcctgatctatggagcaagttttaggacagacagggctacctaaaggagcccagtctggaagggggaaaaaaaaaaagatacccatacatattcctgtgccagaggtctgtctgtccttacctaagctctttaaggctccagtgagctgctacatttcagatggctgattgatttgtcctgtgtcacacagctaatgacagagctcaagctagaaaccacattttcctgttccaaacttgatggcacttttcttccatctcagcagtgatatcagaggcaatgcggggcataatggtgccactttttttttttttttttttttggttttttgagacagggtttctctgtatagccctggctgtcctggaactcactctgtagaccaggnnnnnnnnnnnnnnnnnnnnctacatagtgagttccagggcagccagggggtttacatagtgaggccctgtctcatgagacaaattcatcagtggagcctaggcctgggggtgaagctcagctgcagagagctcacctggtattcagggagccctggagacttttcccaacacagcataaaatagatggggtggtgtctgcctgtaatctcagcactcagaagatggaggcaggaggatcagaaattcaagaccactctcagctgcttagagattccgtggctatatgaaaccctgtggcaggaaggagaggaaggagagacagagggagagagggagggaggcattagcttttgatgtggaagacagaaatccaagggttccagggcttccactgggcgagtcttggaaaccccaagttaccagccctggaaaccccaagttaccagcccccagctctctcctacgtccaacactcagatccacagcacccaccgctcactgaggatttctccgcagttgaaggggtgcagccggaactcacccgctacaagctgaagcccacgggtccctcctgctcctgctcctctctatttcagcgagacatcaccacccactcagtctcccaagctagaaacccaaagttttcccagaatccccttctccctcagcaaccctaaatggttacaaaaccctgctcctcttttccttcctcgaatcctctgaaataggtcttcgcctctccttagcgcagaccccatggtcccttacacagtgggctacgcccatcgccctctgtccttcctctggttttaccccacccccagctcctcctcaaggctcctcctcaactctcattcttactgtcatttcctgacttaaaaatctttttatcaatctgaagagaaaaatccagaattttcaaccatgggctgcaaggccccttgcttctaacctcctctagctagagtgaagacaccaaactccaagaatgtacctcagaccctgttcttgggtcatcacaattggcccaattagcattcgttgcctagggaggtctccaggctatctttcccatctgctctctgctcttccttctgccctagcatctccacccatgaaaacattttcagctacaagaaagagaagcaaagagttaatatttcctccaagcccagaaaccagagggggagaggaaccgaaaagtgggggtgggagggaagggaaggggaggagagggggagggggctgttggaaagtgactccagaggtttggtggtaccatcaaaggtttcccagtctctaatgctgccacccttgggtagagtcactgttctagtctaagcccacatactttagaagctttctgagtggagatggcaaatattttcaaggtcgtctcgttttttttttctgaaatcaatgaagatacgtacagccatgtctcctgagtaagtgagtagccaaggcaggcaaccacatgtgggtatccgtcaaggagggccctatagtaagaagacagaagaattcttcgttttgtctatgatctggtgctaagtttataaaggacctggcaagtgtctctgtagagagcccccctccctctcaagttctcactctattgccctggagctcactgctatgtagctcgggcttgcctccaactgacagaaatcctcctgcctcaccttcctgagtgttgagatgacagccatgagacaccatacccgaactgtcatcccaaatatccggaatcccattcccaccattttcaaaattcaaaatgggaatatgaaatatgaagcgttgacagtttagaaagctggtctcccttagacatttaagttttaatcttcttgtttaaaaaataaatttttggtcagacatgatttttatacttctataaccctaatacttggaaggtagaagcaggaagatcaagagttcaaagccatccttcatagttccaggccagcttgggctacacatggacttctctcaaaaaaaaaaaaaattaacaaatgaattaatgcattggtggctgataagacagctcagtgggtaactttgatccctgggagccacaaagcagaaagagaggactaccagaagttgccctccggcctccttagatgcgctctgagcacttgtgcacacacacaggggcaagcacacacacacatacagacatgtgaagaactaaacttgtaagaagagatgcagggcagtctctgagcgccaggtctgagctctggtgggtgacatgagtggcagcataagtggagagaaataatggtgtaaagaggagccagattctagagaagtaagcggtggtgttccctccttccccactaagccctggagctgatgtcccatccaatcccttagactctgcagccccttcctgctgcttggggtcctctcttcagaatcctttgttcttttccatctagatactaagcaaccaggaggagtggctcaaggcggagctcggaagccaagaaggatatgtgcctaagaattttatagatatcgagtttcctgagtaagtattcccagcctgccaagatggctctacccacacacgctccccttacttttttcagttgtcactaaaattatctatgcatacccaaggaactgtcagaaatggctgcctttggagatctccctccccagcctccagaaccccgcagcggaaggccagagtgggaggaaggtttatttgcatggcatcacattcccttttgaagtttacaccatgtgcatgaatcgcctatttaattatatatatgtatatatgtacacatagagagaggggcagggaggaggaagcttgttaaaatcacctataacgaatgcagttgcaggatctctaagaatcccaaagggggcgctgttggacatcacttgtcaaaagccattcctgcnnnnnnnnnnnnnnnnnnnnnnnnnnnnnnnnnnnnnnnnnnnnnnnnnnnnnnnnnnnnnnnnnnnnnnnnnnnnnnnnnnnnnnnnnnnnnnnnnnnnnnnnnnnnnnnnnnnnnnnnnnnnnnnnnnnnnnnnnnnnnnnnnnnnnnnnnnnnnnnnnnnnnnnnnnnnnnnnnnnnnnnnnnnnnnnnnnnnnnnnnnnnnnnnnnnnnnnnnnnnnnnnnnnnnnnnnnnnnnnnnnnnnnnnnnnnnnnnnnnnnnnnnnnnnnnnnnnnnnnnnnnnnnnnnnnnnnnnnnnnnnnnnnnnnnnnnnnnnnnnnnnnnnnnnnnnnnnnnnnnnnnnnnnnnnnnnnnnnnnnnnnnnnnnnnnnnnnnnnnnnnnnnnnnnnnnnnnnnnnnnnnnnnnnnnnnnnnnnnnnnnnnnnnnnnnnnnnnnnnnnnnnnnnnnnnnnnnnnnnnnnnnnnnnnnnnnnnnnnnnnnnnnnnnnnnnnnnnnnnnnnnnnnnnnnnnnnnnnnnnnnnnnnnnnnnnnnnnnnnnnnnnnnnnnnnnnnnnnnnnnnnnnnnnnnnnnnnnnnnnnnnnnnnnnnnnnnnnnnnnnnnnnnnnnnnnnnnnnnnnnnnnnnnnnnnnnnnnnnnnnnnnnnnnnnnnnnnnnnnnnnnnnnnnnnnnnnnnnnnnnnnnnnnnnnnnnnnnnnnnnnnnnnnnnnnnnnnnnnnnnnnnnnnnnnnnnnnnnnnnnnnnnnnnnnnnnnnnnnnnnnnnnnnnnnnnnnnnnnnnnnnnnnnnnnnnnnnnnnnnnnnnnnnnnnnnnnnnnnnnnnnnnnnnnnnnnnnnnnnnnnnnnnnnnnnnnnnnnnnnnnnnnnnnnnnnnnnnnnnnnnnnnnnnnnnnnnnnnnnnnnnnnnnnnnnnnnnnnnnnnnnnnctctgtgacctccaaaagcctcttcttccgcctcctccccttggggcctccagcgccctggcttctcctcaggctcctttgctaggtcctccttcaccctgccatcccccacacccttctccagtaaacctttcttattaccattttattttccccagtggttggtgttacatgagtatagcaaatgtggaggccagaggataccttcatgtgtcacctataggctatcattcacctctcgtgacagggtctctgtctggtctattacttgccagccagtgaaccttggggctctgcctgtgttagtctccccagtcctggttacaggcacccgtccctatggcaggcttttgtgtgggtgctggggattgtgacagttcaggttgtcatgctttcaaagccatctcctgtggccattttaaatgactttccatccccagcatcctgtccaccctgtttccattttctcccccggctcataatcccctggcacgccatttttgattattctgttgttattgtgcatctcccgggccacctagaatgtcagtttgctgagagtgaagtcacttgtccgctctgctcaccactattttcctagcaccaagaaaatggtcccaggtgttcaaagatgatcaataaaagccatcagacctggccaaggttggggaaaaaggttatcccagcacgtacagttataggaagtggagtcagaagttcaaagccagcctctaacatataacaagcttaaagtcagccagggctacatgagaccctgtcccctcaaaacaaaagtaataggttgggtgtggtggtgcacaccattgattccaggtgcttgggaagcagaggcagccagatctctgtgagttcgaagccagcctggtctatatagggagggagttccaggatatccagggttgtatagagatatcctatttcaaagtaattaattaactaatacaaacaaaagtataaataaatcacatcaaataaagtgaaaaataagctttagaataataaggaagattgaaaccctggcctcctgtgtctgacacaaaatgtacggaaaattttggaagtcttaaaaaaaaaaacaaagattccatactctaatctagttagagaacgtagcttttctagatgcctctgcctttctaaaggtctctgcctgttgcctctgctgcaaacttccctttgagctatagctgtggtagcacacgccacccgcctactcctgtcactactgtgccttctccgtgtggcaatcagctgctcagccctgcagaggtgtgggacaccagaaaccccaggctccagcctactgctgtggcccaggtctggaggaagtgtccctcctgttatctgagtctggagtcaagggtctcagatcctgtgaagcacagaggcctgccgtgcatttgtcctaaagggactcgagcgttaattagccttccgacagcagcaattagagcagccatctagaagcaatgtgacagggtccaacctctaccggctgtgatggaaactctcattctagagcagagaggagtttgtgctctcctggcagaagctgcagccaccggtcacctaacccagtgtgcttgacttttttggaacattccagccactgccgccctgaccgtatggtgtctcttctacatctctgtttcctctgtaaaggttcatcaaacctagatccactttttttttttttttaggtaaatgacctcgaagtgcagggaatagctcacaaaagagttaaggaagttggctgcagatgttgctgttagagctgctgagctccaagtgtttgcaacatcatttcctgggctcttggcagtctctgctggacataactgtcaagcccctgaggcttctgtgttagtccaaagagcctgagcccctggatgctcctggggaaaagtgcccagccactggcatctcaggaagggaatgggtgcccaggccttgtctcccagcctagcctgatgccctgcctccatgcctccgtgcctgcagcagctcttcttaccccatgcattctcttctcctggtggcaggcgacttcatcccaccgggagccaatcccacacagccccacatggtacagcagcaaacttccatgattcaagtttcccaagctagagagaaacttctggagggacaagaacaaagagagcaattacagagcagtggacattgcttccctggaagcagttagccaccattgctaggttttagaatgcatgccagggctggtaggatggctcagcaggtaagagcattgactgctcttccgaaggtcctgagttcaaatcccaggaaccacatggtggctcacaaccatccataatgagatctgacaccctcttctggtgcatctgaagacagtgatagtgtacttatttattataataaataaatctttgggctggagcaagaagggactaagtgaacggggccaagactggagtaagtggggttgtccggagcaagcagaggtcctaaattcaattcccaacaaccagatgaaggctcacaaccatctatactgctatggtgtgtactcttatacattaaataaataaataaataaataaatctttagaatgcatgccccaaaccctgactcaccgtccctggcctcctccctcaagtcacctcttttccatgtcccttctccctccgcaccaccatcacgtgtctcaaagaactctttttaccctgtcttgcaataggtggttccatgaaggcctctctcgacatcaagcagaaaacttactcatgggcaaggacattggattcttcatcatcagggccagccagagttccccaggagacttctccatctctgtcaggtactgacaactaaacccgccttgatccttctcagcctgctgaagccagatcagccactggtcagaaacatggtggcatctctttaactactggactatttcttccccagaacatgtctcctcagctcctccacatcctgatttctgttcaaaatgacctgtgtagtggtcatacatatctttaattccagcattcaagaggcagagccaaggctgatctctgtaagttcaaggctggcctggtttacatagtgaattccaggatagccaaggctacatattaagaacaagttgaagagaaaaaaagaaacaagtgtgtatttatctgtttccctgtcctgcccaaatattttcagaaagcaagttgatatgttttgtatgtgtgctctggacagcgccagacacaagaagcatctatggaagtaggagaggaagaaggaaaggacctcccacttggctatctcttaaccttgtctgtttctgtcagtagatggctgaagaaaggccagaggagagcagaaatcccacgctgctgctggacccagagcgaggctgctttcccccagcagggtcacggcaaagccaaagccaaatcgaaaagagcagaacagagatgagggaggcccccggtgagggggatcagagagaactttgacaccgtaacccttgcaccgctgcaccttacaggaagtgactcagtccaggcaaggatgtgacacagacctaagctgagaaaccccagctctgcgggcagtgtgtgtggtcagcatgtcaaagactgcaagtcagagacttgaccacgtaatgcaagaaatgcagctcttagcagaggaggccagagcctacacagaactcacacccctgcccggtgaattgacaggcaatgctaccccgccttagttgataggtttctaaaggtgtgaggctttattgcttctattgagaatctaatctctggtgataaactggctgctttgtttagagagagagaggaacttttaaagcataggcaggaaggactaatgggccagttgtctctaggcttgttcacctcagagtgtacttaatgtcacaaccttgtcacattgtctccttaatgtcatcaactttgacatcttgctaaaacaaaaagaatatatatatatatatatatatatatatatatatatatatatatatattgtatgtgtgtaagtgaatgtgtgtgtgtgtgtgtgtgtgtgtgtgtgtgtgtgtgacatatgtggtagctggggcacatatttgcacatgtggaggtcagaagatatatttaaggaattgaggctctccttctaccacatgggtccccgagactgaacttggggaatcaagcttggtggacgacacctttacccactgtctcagtcactgatctgttgttgtgaaaagataccacaaccaggcaactctcattaacaaaagcatgtcattggggggtggcttccagtttcagagtgagtccattatcatgacaggaagcctggcagcgagcaggcagacatggtgctggagaagtagttgagagctacatcctgctctgtgggccaagagagagaaagaggtggagaagaaggaaggagaggcaccccaagtggcacacttcctccaacaagaccacacctcttaatcctttcaagtagtgccattcactggtgactaagcatttaaatacatgagcctatggggaccattcttattcaaaccatcacacccacagagacttgtcactaggtctatgctcctaattctccttaactaaaatttcatatgtcgggcagtcctaaatattagctcaagccaatattaatatcccaaagtctaaactccttggatcttcattagagaaaatttggtctataaataagccaaccaaccctatttttttttggtaaaattttgtgtgtatggattttgcatgtatgtctgcataccgtgtatatgaagtgcatgtggaaggcagaagggggcgattgatttcctgaaactggatgctgggaatccaaccccaggtctctggaagagcatcctgtactcttaaccaccaaaccaactctccagccccaatcaaacttgtttttaagggccttggtctcaagctgcaccaagcaatttgttgggctgaagtgcatcttttggtgcctttgagtttaagaaacttgatcttgactttttcagctaggaattatgggtcatattccttgactgacatgaattatatacaatgcttagcctagacttctcccagagtcttgcctggtattgagacaaggcaacttctcgtgatcattagagtactttccacactatcttttgaaaacatgcactatacatcccaaagcaaaaccacttctatttattctttcaaatactgtatggcatggacataaagggctaagaacccatgatggttcttttgctaagatgcgagtcttttatatctggagacttgagtcacatccttttctttactctcctcaataccagtaggtcatccaacattatagacacagatgtcaagcagcaacgtgatattcattgtgattgctgagagggactgggtgaataattattatacacaagaaatacttcctctcctatgagttaagatgctgtatcttgaagaaaagccagttagtgtccaaactcctagggaagactagcagtgatggccacgtgtcagtttctaccccaaatcagctgggcaagaagtgactaacctttggcttctcttgactatgaacagaacccagcttaaagatgagaataaaggccagaatccctgttccccccaaacacaacccccctaaaactatccctgggaatcccctacttaccttcagaggaatttctactccccaaagccctttacctcttgaccttcctgctggaaccagccattgacagcaccaatactcatgcagctataacatgtgaacatacgtctgtttggaaaatcaaaacaaaacttgatagccaggacagagtgacttagctgtggagaaagaccagagctgagagtaaaatctatccccttattttcagatggttcatccaattactgcagacccagtacagattgtgcctgaccacctgagatcctgactggtagcaaaaggcacgtatctaaaagcagtcagcataatttcccagcccagctggaatcagacagtgttcttcttcaggttggctacctactgacctagactaagcccttggtcctctctcagtcttggaatcctttcctgtaaaccaggaaaggccaagctctcctcaaggtcttttccggttaaaatctacaactctgtgtaatgtgtttcctcccaaagtacaaagtacaaagttcctccttacagtcttatttatacaaaacataaactaagaccagatcaccatgatctcattgcttagagggaaaaaaaaagtgattaactccttaggggaaagaatagcttcttgccagtcagctcagctctacatttaaatgagatgggtcaagccatttctaatagcagggtctttttttttttttaatcctcttctgccagtctctagcagaggacagaactctgatgttgccctctttcaaataaacagtatgaaaggtctctgattacttactcttaactgggaacagatctggagagatgactcagtggttaagaacatagagccctggcaaaagatcccaacacccacaccagggagcttacaacctatcagtccaactccaagaggtccaacttctgacttccacaggcacctgcactcgcatggcatatatctgcacagacatatacataatttaaaataaaattaaattgtaaaggtatctggaacattttccttttcttgacctacctttttctacatttgtttgtttgtttgatggggggtggggcagtcagaggacaacttgagggaatttgttctttccttctgcctcgtgggttctgtggatcaaactgaggttattaggtttaacaaatgccttctgccagctaagtcacttcaccagcccccctttgtttctttcaaacgtcagtctggcatccaagacaaagtccagcttgtctgatcaccttctgttgatggaccctcccatgaacctgctcctagagcctggttcagcttgttgtgtttataaaaagataaagggagagaaggaatatgttttggtggatgcgtagtcaggtatgggggaggggtgactcagtgggcccatgctgaggcatcccttctgcctgagggaccagccacaggatggtttagtatggaatagagtttattcagggcattgggaggggagttaagagggtagtagagacagagagagggagggagggagagagagagaaaaagagagagagagagagagagagagagagagagagagagagagagagagatagagaagtagagaacagccatgagaagcacatggagagaggagggaggaagagtcgagaaaacagagcaggatcaacaaggcaggagcaagagacagtggaggggaaaagcagccccttaatagtgagtcaggcacacctggctgttgccaggtaactgtggggcagagcttagaccaaatgctaacaccggttgccctatctagatcagctgctgctgtagaatgggcagctcttcctgaactcttagcagcagtgaatgccgacctgagatggtgcaatcctgttatgtcaggaaatggggaaaaaaatcataaggctatgaaggcagttagtagaggatgggggaaagaaacattctcttcagggacatagctgcttgtctgctgtccgcggtaccacaaggatctctaattaaaccttggttgacaaagacagacagagtggaatcgttacttcattctgtcattggtgccctatctgtgtgaaacagatgtttgtttatgtcaccccctggccccaagaaatgttcatacaatgcctatccaaacagaacctcctcattcctgggtgcaaacagcacccccagcagggtcatggtcaccatgtaacatacgacttgagtttgcttgatctccaggcacgaggacgacgttcagcacttcaaagtcatgcgtgacaccaagggcaattacttcctgtggaccgagaagttcccatccttaaataagctggtggactactaccggacaacgtccatctccaaacagaagcaggtcttccttcgggatggaacccaagatcaggtatgccttaggttcagataaactccaggccagagattttaggtagcctgaattccagtgtaagacacacacacacacacacacacacacacacacacacacggaaaaagaaacgaaatgaaaagaaaagaaaagaaaagaaaagaaaagaaggcattctgatccagccgagggctgagccaagcagtcagatctcaggtttaatcccagctgaacacttcctaacacttcctagctgtgtggctttagaaagctctcagatcctgtttcctcaacctttaagaaagcataaacagggaaggggaggggggctcagggaggtgtgagcataggaatctgatgtctcccaatctcttacattataagtaagagattacattacattacccatcactcccaaacacattacaaaggactgcaaatgttagctcacattggggctgctgtcatttagttctctgtggatcttacatgagtgttctcagcccaggcctggagctgctcaagggtcaggccaacagtagtattagagcgtggcctagggggcaggactaaagcaccaggcagtttcctgatggccttgaggaggacagggaccacataggtttaatcctgacttcattccagactacccacgtcacctaatcaagttcagaacactttccaaggcctgcagaggtgactcaagaacacttgctgctcttccagaggacctgggtttaattccaagcctcatgtcacatgattcacaaccaccaggagctctgggtccagtggatccaatgcccgcttcaggtctcctttgggcatctgcacacacatagtatacatatacacagacatgtaccacaaataaactaactttctgaagctgggtatggtggtacatgactgtagccagcacttgggaggtggaagcaggaggactgcaagttcaagaccagcctgggctacatatcaggctacggcaagctagacactgcccttaaacaaacagcatacaaacaaacaacaaaagatgcattctgagtatatgttttctcatcttagcgtgggaagcccaatagcagcattctcagtgggcccttggaaacactgaggatggtgtagttaaaagctctgccccagaatctggtccagagcaggcaggtaataaagaagttacggctttgcacagaagaatccatacacatgcgtgcatgtgtgcacacatacaaagtaccaactatttttcaaagaaaagaccacaggtgtaatcaaggaaggagcattgagtggccgagctggaatcccagggagaggcggtttgaaaaggccatgtgtgctttggggaagcgagcccgcccttccaagacaccagctgttctcaaggctggggtgctagagtcatcagaaaagagggtgttcccaagcagagcacacagaagttcaggaaagaaaagaaaggtcaacggagatcttgtgggttattctaaccaggaaacagacagaagtattaacttggtaggatgcagcacgctcagagataagaaaggcggtataaagttttcgttaaactggatttaaatgagttaatatttgtatagtgctagcatttacggagcctgaggctctgtgtagttgtttgttaaataaaaataacagtaaagtatttctgatcatgagctgttacagtatgaagcagagaggccttgctcctttctggcacatggggcaccaggcctggttttcacagctctgccagactgttgctatctagggtcgctaggacaggccgtaaaggacagctccggatgatgccaagtcaagagtagagatatctggagggtaggatgtccagcagtttggcaacaggtgacgacatgtggattatttgtcacgcatgatcttggctgacctttgctttctcttctgaacgactgtgtgccctggatggggaaccctctcctcccataattgtaacatgccagtctcgaaaacagctgatggcctgggagacagggtttacttccccaaagcacacgtgtccttttcaaaccacctatccctgtctgtcacatagaatagttaagcctgattacagacagaaacaaaccagtaggaatggattgagcagagaccgcatggaaacggatagattgtcaaccagagacctgaactcctgagctaggaaagacttgagtattcgcaggccacttttgataacgtggaggtctaaaccttcgattttctttaagccctaccaccaccaccacacagttactgccagaagagagacaggatctagggaaaggatgaatctggatctcttgttttctcttccagggtcaccggggcaacagcctggacaggaggtcccagggcggccctcacccgagtggaaccgtaggagaagaaatccgaccttcagtgaaccggaagctgtcagaccaccttcctctgggtccccagcagttccacccgcaccagcagccgtcaccccagttcacaccagggccgcagccccctcaacagcagcgttatctgcagcatttccaccaggtatttgaggagacggaagggacaaggacaaagagcgaaggctgaaatagtgaactccaaggtggtgaagagacgctgtctcaagacataaggcaaatggagagagagaaagatactgacttccggtgcccaactccccaccacaccacaccacacacacacacacacacacacacacacacacacacacacacacacacacgaagactaattctcctgtcatcagactttcaatccctgccccttaacctgtaaaaagaaaaccggattaacacctaccgctgccctgattgtttatctacccctgcctgctccagaagggaattgctagaggcttacagagagggacaatacaataagacaacattggtctacatccctccacggggcacacagtcctttgtgagctgcctgtatctactttcccaggcccatatcctgctaccagcccccactaccgtgcaaacacgcaacccagcaaacggcaccacactggcgtggctcagagcattttctctctttctggctttttataaactgttctgtctgcctgatgagtctgtcctggcccaaaccgcttctccttcaaactgaagcccaggcaccacctcttccaggatgccctccatgatctacccaggcacacctgggctttcccatttgctcatttagcacatcactgtatatggtccttcctctaaaccagcaaatgttcctgattttttttttatttgtaaataggaaaagaaccacacaagctaggtatgacaatgcatgcctataatcccaacatttaggagcctgaggcaggaggattaagagcccaactctatcctgggctacacagtgagtgcaaggtcagcctgagctatacagtgggaccctgtcttaagattaaaagggaaaaaaatagggctagagagatggcttaacggataaagtgtttgctaggcagataagagggccggaaatcaggttcacagcacccacgtacaaactagcatcaggaacacatccttaacctcactgctgaggcagatcccaggagctcattggccaatcagtctagctgaatcagtgagttccaggttcagaaacatccgttcaagtggatagaagagtgacagaggataccccatatcaccttcaggactctacactaacacatgaatatacacatacacagatggtgatgatgatgatggtggtggtggtggtggtggtgggttggttgcaatcctgaggctcggggtacacaagactccccaaattactgtgatttcattgaataaatggaggccatcatctttgacttcagaatctaagatcccttcagattccctcctgtgtgttttccaagatgaagggtgatgatggccagcaagtcttcttgggtgttatctcagtagacagcacccccaagcaaggcacagggttggggcagtctgtgagagtcaccactactgatcctgcagcggccctctccttcatgtctctaggaccgtcgtgggggcagcctggacataaacgatggacactgcggccttggaagtgaggtgaacgccacgctgatgcaccggagacacaccgaccccgtacaactccaggcagcaggggtgagtgagcagagagggcgaggaggtctcaccagagagggctcagcctggctcatccaggctgctattttcagactattgggctttcacgctcttctccatctcctggcagcaggggatgcgtgaggtttatccttgcgatccagtacacgtggccttgggacctacccagtggtagggcacttacataacatatatgaggtcctagcttccatcccctgtaccacagtagcagaacaagaccatatcaagagcaaaggtagtacggcccagtagcttggtgcccagggctgtgcatatcaggtctgctttagattgctgcaaagtcagcctttgggaagggctcggaggactcagaatagatctagaagctcacggctcctctgtgtgatagtcgtaccaaagaccagcctaccgagctcattcccatctcttgtctctcctacagcgggtgcgttgggccagggcactgtatgactttgaggctctggaagaggacgagctgggattccgaagcggagaagtggttgaagtcctggacagctccaacccatcttggtggaccggccgtctgcacaacaaactgggtctcttccctgccaactatgtggcccccatgatgcgatgagtcgtactgcaaggcttaggggcttttcgtccaaagccgcctgcaagacagagaggggcgagggggtaaagctgaactttataatgacacatacatgcatacatgtgcatgtgtgcccgagtacacaaaacatgtatatgtatgccgatggctacacacgacattttataatagtaatttattggcaggcaggttggctcgttgatcagcatgagaaggaacttgggtggcgagggggccgttttgccagctcttctctgcctgagagggcagtggggagctgggagcagggcggggaaatgaccttttccaaccctcaaactttcaccgtttccttcctggcttgggaattttccaagagagcaggcagctcagcagagatcacaccccagggatggatgaacagggcaaggctgggcttggcgaggcacgttaggtagttcacctggctctgtccacttacagggtagctcccctcttttgcatagagcaggcgctgcgccctgagaattaaggtgtagcagatgcagggcttcaggcaccaggcaagtctgagcaggtcgccagcaagggtgtggtcgggaggctcctcttggtgtgggagagacacgcaggctcaggcctagccgatgtctggctaggacttttactttccaccagagactgtcccttgggcaatcctcttcccctacggctgacaggagagttagaacggagcgatgccacagaggttctccacaggcccttgtggcttacttgaatgtaacttgtttcctcggctgcagagaaagctgcagcctagattcttggaagtgcttggagaagccctggcggagaatgtgggatgtgtcagcagcctcactctgtggttacaagagtgtctctgtggagctcaattgggttttgctcctgattttctgtggttgaggacatctttgccagtggacgaaagggaagccaagagtgctgactgtggatcgactgataaattgacagactgactctaaccctgacaggagctttcacggaaatgggtttcctcttctgtttgagcgctaggccttcccctatcctccctccacctgggaagaggaagcccactgccactgtccctctgtcaccttaaactagaattgtgtgtcctggggaatggagcacagagaagcctggctgggtggggagggggactctggagaggaagcccagtgcttttgggcagcctgggagtaaagatgtcagaacagaaggtacttacaagggtgttggtgtagtcgtgtgtgtgtgtgtgtgtgtgtgtgtgttctaagataggaaaggaagagctgggtgaaaggggtggtaagcatatgtgatgggaggggggctgtctccttgtcccctcctgctttagggagggactggagggcatctgttagtgagggagacaaaagaacagtctgtgactcaggagtcactgcagtgtggcacatactctgtcccttgtgactctgattcaacaatcttctgatccctaggttccctttagagagaaagagagggaccaggagggaagagatcatagcctggaggctcagggatgcagctgcagccctgggacaggaaagcagagacagtgtcagaagatgggtggcaggtgggagacagggagactgtggggggtgggggtggggtagtatca

SEQ ID NO: 397 - DNA, 2901 bp, Mus musculus
ctacttctggtatctagagaatgatttggggaagcagatctggaaggctgcagcagctcttgttgcaaacatgagctctggcctcgcacagccttctccaccgcctgagcctagctctccagcctgcagacatccactgggccaccctcctgcccactgctgagcctgccaggcagtgccatctgctctgcagcctgtccctggtggaaaggcaaaatgaccacattgtttctcttccagcttctcgtcaagacatggaagccactgccaagtttgatttcatggcctcaggtgaggacgaactgagctttcgcactggagacattctgaagatactaagcaaccaggaggagtggctcaaggcggagctcggaagccaagaaggatatgtgcctaagaattttatagatatcgagtttcctgagtggttccatgaaggcctctctcgacatcaagcagaaaacttactcatgggcaaggacattggattcttcatcatcagggccagccagagttccccaggagacttctccatctctgtcaggcacgaggacgacgttcagcacttcaaagtcatgcgtgacaccaagggcaattacttcctgtggaccgagaagttcccatccttaaataagctggtggactactaccggacaacgtccatctccaaacagaagcaggtcttccttcgggatggaacccaagatcagggtcaccggggcaacagcctggacaggaggtcccagggcggccctcacccgagtggaaccgtaggagaagaaatccgaccttcagtgaaccggaagctgtcagaccaccttcctctgggtccccagcagttccacccgcaccagcagccgtcaccccagttcacaccagggccgcagccccctcaacagcagcgttatctgcagcatttccaccaggaccgtcgtgggggcagcctggacataaacgatggacactgcggccttggaagtgaggtgaacgccacgctgatgcaccggagacacaccgaccccgtacaactccaggcagcagggcgggtgcgttgggccagggcactgtatgactttgaggctctggaagaggacgagctgggattccgaagcggagaagtggttgaagtcctggacagctccaacccatcttggtggaccggccgtctgcacaacaaactgggtctcttccctgccaactatgtggcccccatgatgcgatgagtcgtactgcaaggcttaggggcttttcgtccaaagccgcctgcaagacagagaggggcgagggggtaaagctgaactttataatgacacatacatgcatacatgtgcatgtgtgcccgagtacacaaaacatgtatatgtatgccgatggctacacacgacattttataatagtaatttattggcaggcaggttggctcgttgatcagcatgagaaggaacttgggtggcgagggggccgttttgccagctcttctctgcctgagagggcagtggggagctgggagcagggcggggaaatgaccttttccaaccctcaaactttcaccgtttccttcctggcttgggaattttccaagagagcaggcagctcagcagagatcacaccccagggatggatgaacagggcaaggctgggcttggcgaggcacgttaggtagttcacctggctctgtccacttacagggtagctcccctcttttgcatagagcaggcgctgcgccctgagaattaaggtgtagcagatgcagggcttcaggcaccaggcaagtctgagcaggtcgccagcaagggtgtggtcgggaggctcctcttggtgtgggagagacacgcaggctcaggcctagccgatgtctggctaggacttttactttccaccagagactgtcccttgggcaatcctcttcccctacggctgacaggagagttagaacggagcgatgccacagaggttctccacaggcccttgtggcttacttgaatgtaacttgtttcctcggctgcagagaaagctgcagcctagattcttggaagtgcttggagaagccctggcggagaatgtgggatgtgtcagcagcctcactctgtggttacaagagtgtctctgtggagctcaattgggttttgctcctgattttctgtggttgaggacatctttgccagtggacgaaagggaagccaagagtgctgactgtggatcgactgataaattgacagactgactctaaccctgacaggagctttcacggaaatgggtttcctcttctgtttgagcgctaggccttcccctatcctccctccacctgggaagaggaagcccactgccactgtccctctgtcaccttaaactagaattgtgtgtcctggggaatggagcacagagaagcctggctgggtggggagggggactctggagaggaagcccagtgcttttgggcagcctgggagtaaagatgtcagaacagaaggtacttacaagggtgttggtgtagtcgtgtgtgtgtgtgtgtgtgtgtgtgtgttctaagataggaaaggaagagctgggtgaaaggggtggtaagcatatgtgatgggaggggggctgtctccttgtcccctcctgctttagggagggactggagggcatctgttagtgagggagacaaaagaacagtctgtgactcaggagtcactgcagtgtggcacatactctgtcccttgtgactctgattcaacaatcttctgatccctaggttccctttagagagaaagagagggaccaggagggaagagatcatagcctggaggctcagggatgcagctgcagccctgggacaggaaagcagagacagtgtcagaagatgggtggcaggtgggagacagggagactgtggggggtgggggtggggtagtatca

SEQ ID NO: 398 - protein, 380 aa, Mus musculus
ASHSLLHRLSLALQPADIHWATLLPTAEPARQCHLLCSLSLVERQNDHIVSLPASRQDMEATAKFDFMASGEDELSFRTGDILKILSNQEEWLKAELGSQEGYVPKNFIDIEFPEWFHEGLSRHQAENLLMGKDIGFFIIRASQSSPGDFSISVRHEDDVQHFKVMRDTKGNYFLWTEKFPSLNKLVDYYRTTSISKQKQVFLRDGTQDQGHRGNSLDRRSQGGPHPSGTVGEEIRPSVNRKLSDHLPLGPQQFHPHQQPSPQFTPGPQPPQQQRYLQHFHQDRRGGSLDINDGHCGLGSEVNATLMHRRHTDPVQLQAAGRVRWARALYDFEALEEDELGFRSGEVVEVLDSSNPSWWTGRLHNKLGLFPANYVAPMMR

SEQ ID NO: 399 - DNA, 70786 bp, Homo sapiens
acagactgcagggctgactagggttagtttggaggagggagtaagaggtggggaggaggaggcacagttaatggatctgtaaacttgcaccctctttcagagtggtacatggaagacagcacaaagtggatccatactctgaaatgcagtaactctgatgcttgaatttgtctcccttcttgccagaaaggattctaataactcggtgtcaaagccaagacataaactcaaccccttctcttccaaaaggtatgtcattatacaacatctgtacatatactctagaaactttgaacagttttataatttgcagaatgttctgtatgagttaattaaaatgaatctcactagttctctaaatattgcttttaagtcccatcagctaaggtctctaaaccttttgctgtgacaatgtttgtggtgatgggatttgacttctatcaaatgaactgggagaacacttgttccttacccagtccataacacaaaaatctccacaaactggcttcagaagcatctcagggaaagattttcgaccttgggatcatggaggtaaaattccacttcaccatggtcagaatttaatccaaattggaagggattggagggggtggtagagggctgagcagtgatgaatgaacactagcactctgaggtcaggatttctctctttgcttgaatttctagttctgttcgcatttttgttacctgtacaaaggacaccagttttcattcctttacgaaaagaaaactttatgttgaagtgtattttggaagggtattgtctctcttcgtactagccgttaggctccatccctatgactgtctctggtttaggcgtccagtctgaagatagctgctttgtgttctttgtcccaactcttcctgaacgtgaggattgaacataccaaccaaaggtttcactaatttaaaatgtactgtattgccctgacaggtatactgtcaaaaaaaatttaccgtatttatctacctggaattaggccttcttaataaagtgtatgcagcataatttgcacactattgaacatacacatccctagataaactaggagtgggaagtgttttagatctaaacatccaatgggaaaaatttcgtgtgttctcgttatgttatctgaggatgggaaacttcaggtcgcagaatcttttgttctatgcagcaatgtttgtcataaacggtttagttctttagtggctcctttttgtttcttatttttggtttcggaaagagtatttagcagaagttactctcctttaacaatccagtattttatgtaaaactttatagaataattttatagtgattctctttacaaaaccatctgctattaaataaggaacactgtgtaaatagaggaccacctaagtatatttaattttcaaatacgaaaaaaatctgactcatacccttttttgtttttttgtaaaagagaggtggccctatattattgaataaaactgcttttttagattgaacttggagtgtctcccatgtggtaaactgaaatcttattctccccaaattgtaatagattttatctttttaaaaatgactttactgaagcagaggagaaggagatgatcaatctattcaatatgaagaaatatctctgttgctaatacaatatccttttgaatatctcccacatcttaggccctggtgaaaatccctttcaattgttctgtctacctcgtagggatgttgtaagaataaatgagttaacatagatatgaagtgccttaggaaaaaggctctataaaaatgcaaggcgatatcatgattagttgtttctttgactcttgatcattttcttcccacttcttatacaaaatgtctctcacttatttcctgaagccatctcttttagaactattgcttcctagaagagctgaaaatgatcctagttccaacatatttattgattcccagataataacacccactggtgttgatgactgacagggttcatgcctaagcttgagtagaacttgcccttttttcctgggtcaagaaaagtctgcaattgttcgaaaatgtgtcagtaagtgtgattccatcacgatttcttaaataagtaacagttgctgctggataatcctgggggcagatgattcatttttgtgcccctatcaaacaaactcaaaacttgttaaagaatctttataagttgtttgaatcaaacaatagggtcgctaggtccccattttgtccatttgaggtatttgcccagcataccttggtctgtaaagaaatagcacagccttggctgggcgcggtggctcatgcttataatcctagcactttgggaggccgaggtgggcagatctccaaaaataaataataataatgataataacacagcctcatgagtcttttttttttttttttttttgagacagggtctcactctgtcactcaggctggagtacagtggcacaatcacagctcactgcagcctcaactaccctgggtttagtgatcctcccacctcagcctctcaagtagctgagactacaggtacacaccaccacacctggctaatattgtatttttagtagagacagggttttgccatgtttcccaggctggtcttgaactcctgaactcaagcgattcgcctgcctcagcctcccaaagtgttgggattacaggtgtgaaccactacacctggcctgccctttcttttctcttaaaaattcttaagaaagcatggtcctgtttaacaaataagcattttacaaacatttatcgatcaattactatatgccaggcctggcactaggcaccaagtcctcttcaacagtgttaacattaagtttcaataaacttgagtcagtaggaattcagtaaataatttttaaagattgttttctttttaaatatgtatttataaacaaaaattttagagaattaaaagaaactatcacgaagtgcatgatgataaaagtcttatatactctccaaagaaaatgttaagacataccttaaggagatagtgaagaacagccgggcacagtggctcacacctgtaatcccagcacttgggcggccaaagcaggcagatcatctgaggtcaggagttggagacaagcctggccaacatgttgaaaccctgtctctaccaaaatacaaaaattagccgggcatgatggcaggcgcctgtaatcccagctacttgggagactgaggcacgagaattgcttgaacccgggaggcagatgtttcagcgagctgagatcgtgccactgcactccagcctggtcgacagagcaagatcctgtctcaaaaagaggaaaaaagaaaagaaaagaaaagatagtgagaaaataactgaacataaaacataaagaaaagttgaaatattagtactcactacctaggttcaacaattgctaactctttgccgtatttgctccatctatacctatttctttctgaattacttgtaagttgcagataaaataatacttcactcctaaataattcagtactcatctaagaataaaggcattcctctatctaaccacaattccatcattaggcctaagaggataaacagtaagtccttaatatcatctgatagctagtgcagatttaaccttccccatttgtcccccaaatgtcttctataccattttttaaaaaaagaatctaatttttaaaaataagaacatattttgcagttgggtctcatgcttctttcttcaacattggatgtttttaaagattacgccagttctcttgtaccaggtcccactttctgaattcgttgttgcctcatggttaatttgttcctctacccactttatttctcataagctccaagttaggactaaaagcatgatttgattttgattgaacgttttttgcaaggtgccactgggtgctccatattgcatcttatcaggaggtacagaatgccaggttgttccactgtgcatgatgccaagtttgatcagggcttgaggtagtgatcttgctcagaggatctcttgttgtacaggcactttttcaccctttgcaattagcgagtactctcagggggtatctcaaagtgtatctcataaacactttggcatggtggcaatatcctatttcccaacaaactctcacccggtgactttaggtaataatctttgcctaaattgattatttcattggagttcatatatatttttaatacgctttgaagatggactcgacatgcaaattcatcattatcagcagcaatagtggctggaaatatttattgagtgcataagttcaggtaataataataatagtaggtaatgtttattgagtgcttgctgtggagccaagacagcctcggtgtgagcccagtctttcacttactaagcgaatgaactgggacgagttattctttttgtgcttcagtttcttaagctataaaatgggattactaatggtgcctatctcgtgggattgttctgaagagtaaacgatttatacatttaaggttcctaaaacagtgcctgttattattgttatttgccaagcattgttctaatactttgtaggtactaactcgtctacttcttctaatggtgcaatgaagaaagtgctaataatacccttttttcacaatgaggaaactgaggtacggagaggtctagtacgttgcacaaggtcacttaactagtacctggtggagccaggatttgaacccaggctgtctggttcctgagcactctctctgatgatgggcacatgcagtgaggagtgatacaagtggagctgagtggaagtagccctcacacacactcagacttgaagttattgaaaatccgggaggttgccacccaaacacatttaaggtttaattcatctgaataagaacagcattccactaagcccagataagtactcttattacatttacatagcttaaggctctgtacaagaaaccttgaacataaaatacttggaacagaaaagagtaggagaactatgaagtaatggggggaaaaaatccctgaaaggaacaatacaagcggggagttatgagacctgggacctcagagcctcggggtggaagatgatattttgatataatcaggagggagaaatttcctctcatttttcacatttctgtactatataagattttaccataaaacgcaagagtataagccattgtcagatttataaaaggccatggtggatttccttaagagacgatggatgactgttgttagtaggtaaattccctggttggttatctcatacactcagatattccataagtcagcctgtggcttctgaaactgtattgagaaaaagctgtataaactaggtgttggtccatgctccttcattagcattacaaaagggttcgactgctgagttgaatcttatccactccttcagtggccattacagaaagctctcaagtgtaattttctaaagagaactaaaaataaataagaaaaaaaaaatccagcattaataatggttctttttgcatttccaacacagtcattgccaaattggttctgcctttttatgttttttaatgaaaagcagcctaattgatcaattggtcatgaataatacttcttcgtttgtttttctccacaccccccagccttctagaaccacgggcttaatgtgtcggcctacaaatggttcatgatttgtgttttttgtctagtgctttatgggaaaatattagaaacaaactgctgagaactcagtaggaactcagtaaataataagtagatagttctcttgttaaatatgattttaaagaaactctttctaaataactaggaaatattacaagggaagtacaaagtggggtggaaagcctggctgacttgtaatttgaaatttctcttcatcattttataggtcacacagtttaaccctttataaaacaaaatgtaaagtctgatagctgaaaaggctctcctccgctaaatagatttgtttgaaaatatagatcattaaatcggtaagaataacaggagaatctcaaccaaacattgagacaactaagaaaattgtctaaatctaataccttatatcagtactttaagttgaccataaatacgctgatatccatagcacataggttcttactggcagtggtggggtgggtgggggaaggggagtgtcacagacacattcaagatgtcaacgaaaactatgaaaactctccccaatggggaaaaaaaaccaacgatgcctagcacttatcctacgcaactttgtacagaatttccgtgggaaattctggtgtccatccatcataaatcacctggtgtccacccatatatcctgaataggaaaaattgtctttctctagagttattgtacactgatcctgatggagctttaaaaagagttgtcgtacaggctcattgactttgggaggacaaggtgggaggattgcttgagcgcaggagattgagaccagcctgggcaacatggtgaggccccatctctacaagatattcttttaaaaaattagccaggcccagtggcccgcacctgtagtccaagttactccagaggctgaggcaggaggatcccttgagcccaagagatcaaggctgcagtaagccgtgttcacaccgctacactccagcctgggcaacagagtgagatcctgtctcaaaaaataaataagtaaataaaaagagttgccattatcttgtttgatctggctatgatctttgaggtagacagaccacagattttacctctcattctgcagagtgggaaaagcaaggcttggagagtttccgggacttgctcaaggtaatttgctaatgtctgccgggacgtagcaccaagcctgtcacgctgtaggctgggccccttccacaacactggtccaaacacaggattctggagatgcaggagccctcgatgggcttctggaaagctgaattctggctctaccagagctacccacgtgatcttaaacaagtcacctaacttccctgagcttcagtttcttccttagtcaagtgagaggttagactgtgtgttctctgaagccctttgattttctgcagaaaaccacctaatcccactgggtctgggaacagagggaaatgaccttttctgccatagatggcaagacccttcacccttccctgtagggcataagagctggcatccaattcttaacggattcccttgcaatgtccaaatcccattagaaactacaaacatctcaatagtgcctttgtgggctgcttgggtgtcatgccgctggctgcctcacttgctgcagggctgactgtccacatcaattatactccaaccctgtgctctgcaatgggcagacatcccatgagattttattacccctcttgggtagttcagggagtcatatggaagtaaataatgctgatgggcttattttgggctgatagatccttatccttctaaagaggttatgcctttcaaagggtacaaaaccttctccttgattttttattacgaacagttatatcctttaatgtcccagaattgttcttggaagttggagactcacaagagggcctgcagctgtgaatgcagaagtcctgagactaggggaggacatcaccactctcccttggcctttggagtcatccaagctaagtgctaatatttgtgattaacaggtgttgataggaaattgggcccctgtgtctcagtctttttgtgcttcaaattttctaagtgaacttcaggctggcaagtggagttagatcaacttgttgcagacagtatcatctgctcggtaccgtgtcaggtcactggactgtgggaggttatactgaccagtgatgagagtgacagagcatgagcttggctcccgtatcctgtgttctgtgctcagcctcacagatgactcactgtgcctcatcgactcctctgtcctcgagtgaaattatgccattctttaacccactatacaagagacttttgaagattcatgtgtggctacccccaacaatatctcatttgtacaatgcagaacatggtgctttcttgtgtaaacaaactcattttgtggaatttttattttctagatcaatatttttaaatagactactaattcattttataaaccgggtactataagattttatgagttgacacttggtaccctgtaagtatccaaataatcaaagaaggagaaagtgtgaagtcaaggaatcccctagctgaaaagaaattcccaatacctggaacaaaaaagatggagcttttagagagcagactttttctccagcaaagatccacaacttccatttttaaatgtaagacgtaagggagatttatgatacagcctactttgtcagatcatattatttcataaagtgaagggtcaattaggtgttattattatcaagaaagcatgctgtaatgcttcgtcttgtagatgctgtaaaaattacctgtctgattactttaattcatcttttggctactgtctgcagaaattcactcagtccctagctcacaggtatgcagacgtactgagaacactttgggaaataaaagcaaaaaaaacattgggtcctttcccctaaggaatgaacagtgtatttgggaaactaggaaaaacaaacaaacaaaaaaatggtaccacaatgcaaaactgatgaggagattaaaaaacagctcaagatggagatttttagaaagaacttcttgaaggaggtgcatctgtaggctgagagagatggtttagcaagcaggcatcaatgcatccacaaagctttacacttcaaggaaatcataggagaaacagggtcttctttgctgaagatctgtttattttgcaaacaacaaagagtcagaagagccatgtgaagtttccatggggaatccagaaactaaacttctgccactggaaattacctcaagatcttttcccagatagcctgctcttcccctgcttccaatcatgtccctcaaagtcttctttttcaagcataaatatccttagttcttgtaaccactcctcctatgaggcagttttgcgtgctgccattattttaagcacccgcctctgattggactctagcttagggcctcccctaagtcacgggactcagaacggagcaacgctctccaggagtgatctgaggatgcagaacaccatggggtagttgcctcccttgatctgtagcctatacttctattaatatggcccatgattgcatgagcccttttggcacccatgtcacactgctgactcatatcgaaattgtggtcaactaaaacccatgagttcccatgcactactactaagccagatctttctttctttttcttttctttttttctttttttttgagaccaagtctcgctctgtcgcccaggctggagtgcagtggcgcaatctcggctcactgcaacctctgcctcgtgagttcaagtgattctcctgcctcagcctcccgagtagctgggattacaggcgcccgccaccacgcccggctaatttttgtatttttagtagagacggggtttcaccatgttggtcaggctggtcttgaactcctgacattgtgatccgcctgcctcggcctcgcaaagtgctgggattacaggcatgagccaccatgcccagccagatctttcttattctgtacttacactgttgatttaaaaaaaaaaaaaaaccctaggacagaggtttaaatgtaaagacatttatttctatttcactcgatcattttgataacaacttgtccaaatctttcagagctagggtattagcttcccctccctgcaggtgagtacttacctgctggtgcagctaatctcatgatggatctctggcctctaaagggccagaacttcattgtctctttcctatccataaattctctgcaaccgtggatgaatctgcatccttagacaaactagtgggcctcaatcttcctaagtaagataggaataagtgtgaatggccatttcctccttgcggtgaggatatgcgacaatgagttcgatgtctgcaaaaccctaaggaaatgtcactcagaggcagcattagatgaggagagaaaaagtttatttcaggctctcagcagctttcagaagacttgattatcctgatcactacgtgtgaaagttaatgacttcatttttgcagttattttaaaaatataactggtttatctgatttttggttgtagtaacatcacgtgatggtcagtatcattttacacattatttgtaatgtgagcaagtgccataaagcatatctgcaagactcatttaaaatgactctcttccctccatcacctcccccagccccatcctcaactctaccctcttctgtttgtaatacgggactacaaagatcttatagtttaggtttccgtcagacttttggaaacctttaaaagacttaccaagctagcttagaagttcatagattttcatccctggccagcgcagagagctcacaggtaacttgtataatatttatcatttcaagctcatagaaatgtcatatttcaaaacacatccctgagagcagtttttttgttccttatagacaggtgcagggaacatccaaatttttctagtctgccattctaatgcacattgtgatgttgctcttgtgaccctataattattaattttccagtagcccctccccaacctttcacgtgatttttaatccagggcctgggcactcgtagcagagtgtgatcctaggaccagcagcaacggcaccgccggggagcctgttagaagtgaggatctcagaccctgcctcaaacctattgaatcagaatctaaactgtgaaaaaattcccctggtgattcttatgcacagtaaaatctgagaagaacagatctagagtgaagggattttcactcccattttacccgctgtagaccttatgttgtaatacaaaacttacaaacttccatttggtgtttattaaaaggttagagtccttagttaaaatgttaccagattcaaatgttctgtttatatattcagctatttctcagtgtatgtaactggctttaaaatactcttgttgaccaggcatggtggctcacgcctgtaatcccaaccctttgggaggccagggtgggaggattgcttgagctcaggagtttgaggccagcctgggcaacatagcgagatcacatctctacaaaaaattaaaaattagccagggatggtgatgcatgcctgtagtcctagctacaggaggctgaggcaggaggatcacttgagcccaggagtttgaagttgtaatgagatatgactgagatactgtactccatccagcctgggtgacatagtgagaccttgtctctggaaaaaaagtactcttgcctttctgggttcttgtggagcaggggttctcccccactcccaccagggacatttggcaatgccaggaaacattttttgtcacagtttgcagggagaggtcctactggtgggtagaagctagggatgctgctgagaatcctacaatgcacaggatgggcccccacaacaaggacttaactggccccaaatgtcaatagtgacaaggttggaaaacaccagtatatgatttataaagactcagatgtgcgaccataaaccatagaatgccacaggaaaatagagtcacgtggcatgtcactatatgaccaggcaaagaacaaatagaccagcagtggccggagtgatggtggtggggttgtgagtggcagggaatggaaaatccagccacagatgaaaggagacatctaggaccaatgctaactggtactccgtgcacaaaggcagtgagctctagaggacagggctaaaaggccggtcacggtggctcacacctgtaatcccagcactttgggtgtccgaggcgggtggatcatctgaggtcaggagttcgagaccagcctggccaacatggtgaaaccccgtctctactaaaaatacaaaaattagctaggcatggtggcgggcgcctgtaatcccagctactcgggtggctgaggtgggagaatcgcttatacctaggagctggaggttgcagtgagcagagattgcaccactgcactacagcctgggtgacagagcaagactccatctcaaaaaaaaaaaaaaaaaaagaggacagggctgatgttcagggactggacaccaggtatgagccccaggaggggtggaaggaggtgtgggagaaatagagagagagaaggcttcagttctagagtggataccaggtatgatctcaaaatcgtgttagacatggaaaacaagaaaggatttcaagtattagcataggagtacacaggcagatttcaggtaaatccagtaagatgaagactcaggaacaaggcagaatcctgcttgctagaactggggcgcctcagagccaggccagcagcaggcatgaccgatgctgagtcagccaagtgttcaactagagtgagcttcttaaatccctcccaactgagaaggggcttagtgctgagtctacagcatggttgacttgcaagaaggggtcaagggctcccagctatggagaaaggtagaccagaagtaagccagaagtaggccagtgacagtggccactgaaaaatcacgggataagaaatggaacagaactcgagaggtcctctgggtcattcccctactgcagcgtgcacctaaatcatttcagaaagattatctacgcttcaactttaacattttcagagaaagatttcttaaagaccagtgggtgccttataatccatcgaagtcacaacttcttccccatttctaaccctaaacacctcttcctgggatgtaaagcgagtgtctttcatcccaccctgcacacagtgtgatttctatcattcagtaatgataaagaacacaaactgccgtctgcaactgccaagcacagccaccccttttccaggctaaagcatctcaattccattagtctgttgccctgagagtctctccctgaccttttaatcccctcattatcctctggacctgctccaagccttgcctgcttgaaatagttaccaccaagtatgtatttgttaaataaaagctgtgtgcagactgcccttttgccatggaacacaaaggaggaggaatataaaagaatatacacagttttgttggtttttattagtctctctcctctctctccaaggagttgtcaatcttctctgcacttatagtctagttggagcactagtccttaggctaaattccaccaaaacattttggttgttcagcaaacgctttcactgtgaccctcacctaagaacaatagagtacaccatcaaatgggatagctctaatgtgaatttagctctaaataaaactaggataaatgcatttgttcagttctagagaaggcatcatactgtcctgtggatttttcatttcgaatgagctgcaaaacaaagttcttttccatggaaaggatttactcaactgaattcactcactttgctgtagctggattaatctcatttcacatcatgtctctaagtagaaaagtaaactgatttacagcaggctaagtggatatgttgatgcatccaacatcagtgagatttattccaactagattgcaaccagaaaatggtgtcctggttgtttttgcttctataaagtagtcgcaaaagtgcaccactttcgtactcgatctgaaaaacagtttatcaaagttacaacagatgaggtattgtgggatgcgacagaacgtacgtacgtcaaatgaaatgagcatttctgccttcccagatcttgaaatggtcttttgccccacaaccttataaaaaaaaatattcattttaggccaggcacggtggctcacacctgtaatcccagcactctgggaggctgaggcaggtggatcactcgaagtctggagttgaagaccagcctggccaacatggtgaaaccccatctctactaaaaatacaaaaattagctggatgtggtggtgggtgcctgtaatcccagctactcaggaggccgaggtgggagaatcacttgaacccgggaggcagaggctgcagtgagccaagatcacaccactacactccagcctgggcgacagagtcagactccatctcaaaaaaaaaaaaaaaaagaaaagaaaaaaaagaaataaataaataaaatcattttattctatccccatgttctgaaagccacccttttttatttttgagttgtgtttcacggggcactgctcaaggtaaacacccagccccacttgtggttgagcaggcattgaccccacactggctccctgccctggagccagccaccaccctgttccttgctccaccttctgctttctgcagcacactctttcttctttttcttctgcatcactctgcatttccaaagccacaatcgtgtcatcctctcgggactctcagtctctgtctatgctggtgccctctcctttgtctctcccagattgctgactttattccagcttctgcttctaacacaataagactgctattggaaatgtttttctgacttctatagctggcagtttctataagcagaagttactttcaaaggaaagaacttgtggagatgagcctggggtgtcacagggctgttacatgggtcaaatgtaataacgtgtatcaaaaagcaatttgtaaactgtaacatgctcttcaaaagtaaattattactgtattatatgactttagggtttaaaaagcagctggatgatatgtaaaaattcaaggctcagtagcatcattggaaaagaaaattagaaaatggggaggggcacggacgcttccatcaacaagctaggggcctctcaacattttttccagccaaagcacacccatttagctgagagcatacactctcttctgaggactgcctgctcaccattctggacctaaggccttccctcttgcttaagctcccccatccctctcatcgccaccttcccaaatcctagctgaccccaagggctaacccccaatccaccctcccttcccagctctgccccagattaagtgaatctctttctctccagcactcagtcttatgttagaattatttatgtgggcattgatcttcctggattgactgtgacctgctgaaggcagcggtggtcctggcatctgccacagccccctcccccaacagcacttcatcacctccgtgaacggaagtgaatggaaggaacagctcaattaggatggcagaggatcaaggagagaattccacggacccaaaacatcctgcaaaaaggctttgtccccagaggttggtcttcaatttggaaaaattcctacctgagcaactgtaggacccctctgaaatggaacagggtctattagactcataaaaagcctcagtgatgagttggttattattattctctttacttttctgtacatttaaagtgttttatattttaaattgaatgtaaaaagatcccatcctatttaaaagttagtgagttgaataagtttcattataacttgattttcttcctaaaggttttcctatagttcaaattataaaagtcattcttagattcccagcttagttcccccatgaaatcacgagttcttagactgtgtttcacacaatgccaggtcacattgcacccttactgaaaggaacttcttgtgcagagtgcggggctcttggagaaagaaaagtaccacttttttagcacattaaaaacaaatccttgagctgttttattattttaatactttacctttagtggagcagaaatgatttatttgatggttttggcaggtgattttttttttcggaatcttctttaacactattagccatgtaactattgccaagtacataataagtactcaataattattattatcttttaattaaaatgtgatgcacttctaaactaaaggtaacttcagtcatgtagaatagaaagcaatgggtggagcttccaattgcttctctttggtattcattagaaatcatttttgaaactgagaagttgggggaaagatcagacatttttatggaaactgcattgatgacagcagagtgtaattttgttggtagtgatttgatacacaattatttgagggatttactgtgctcatggattagcgctgtgttgttactgtaacagaggattggcgcagagccctggcccagtgcaaagctctctaacatcgtttctcttccttcatcagcagcccaaagcccccctctctacaactccatgcagcacagtcctggcacaaacccctaacctgaaattccagccaatttccctaacaacacgcctctccccttcacctgccagatgcttctcgttctcagacactgcaccctgaaattgggagctttcactgagttaaaaaggcaaatatagaattacctagctgtatcagtattttaagtgcacttgtagacttaaatgagagctcttgtacaaaaccacttgtattctttcttaagatatgctaatttttttctctctttgattgaactgttgaccttctggatatatgactagttattacttcaagtatgtttggaactattcttgccctaactgttctaaaatgtaattagcattgagacattattgtagaagcacagcacctggggctgggatctcattagatggcaaaaattgagcagaattgtgcatgctccatgctcaaaatatctctaagaaaaattaatggcattagggggaaagttaaaattggtgatttcgtaggccctttcttgctcacatatttgattcgtataaggatccaaacagaaaggagattgtggttcttctgtttaaaaaatgaagacaactctgctttcttagaactcttcttatgtaatgtggctgctgtcacatctctgggtcaaccaaaaccaaaataatacattttctggctctagctttttcccccctcaagaaatgcatagcatttttaggcattatctgatttttccttgcaacaacagatgttacagagaatgaatattctgtaagaggtagttaacaaagtgtggaaaaactgaggcccaaagaggtactataactcacgggtttttcacgctcctccctgaacattcccgcatctcttctactggggagggagctctttattttctgaattgaaaaccatttcatgcctcctgctcagctatttcagtactggctcctaagtttggcaccaatcccaactgttatgaaatcgcagacgaataataacgaagttcttcattgctgggatcccaaaaggttatcatttcgagttcattgcagggcactttagacgtccatattgggccctaaatgattggaaccatcaggagagggcttgcctgactctgccattcacctcatttgtaagtctctgccgtgtttcgacactgagttgtgtcttgttgtttaaaaataacttctcattataataacattttcccttaattgaaaaaatatttctgacctgaatttattattgtcatagctgtgtgagcaagcagagtcttgtttgcctctacaatatattaataatgtattaattagcttcccagtgctgcccaaacaaggaacaaaaaggatttatctaaatcatgaaaactgaagtgaagcgaacactttggtaattatattttaagggcagtctcagcatttgatagtgtggcaaatttttgtcctgccttttgagagaagataaccaaaaacaccactcaattaacaaaacgttgtttagtacctactatgcacaaagtctgagaggtaaaagaggttaagacaaataaaattgtccaatttatttttatggccatagttaaaaggcaataaaggcaagacactgtgagtattttgatttagctacaattagctgaaatatactacatcaaatcatatgaaattgacaatatctgggggctggctgccgtgactcatgcctgtaatcccagcacttttggggcccaggataatcacttgaggccaggagttcaaggctacagtgagccagggttgtaccacggcactccagcctgggccacagtgtgaccctgtctctaaagaaataaaaataaaaataaatagaagatattgacaatagctgaccctattttttaccccaaaagtggtgattttatataatttaatctaatattaaggtattcttgtcatactgtaccagctcctaaacattatacttttcattttacttctatttctaagctatcattattacaacaaccaagagaaggtaaatacaggtcagagatttgactcctgttttttgtatgtatttatttttgtagattcacaaataacttatattttgcagttttaaggtttctaattatattagaccctgttttttattttatttagagtcattgtccttgctgcctgtccttcacatgtgacaagtcaattcttcatgccatttccttcacaatcttcatgcaaactcatcatctccatttccatctattcttcagagatgtatgattgcagaaaactccccttttttgaaatattgctcaatagagattaaatctaacacccagttttacctgtctatccttgaattacaggttactgagaagtcagaacagatagccatagaagtaccccactaaatccattcttctatctccttcaatatttgacaaatatttactaagcatctatcttgagcaagcattggagtaagtcctcccataaatatgaagttgtgtaaataaggatgcatgcattcatgtaaatacaagtttaatgctggatatatattgttttaagtgcctgatatgtattagtctatttattcctatctaaggggataagtgccattgttgtttccatcttaaagatgaggaaactgaggccagagagattatacgaactcctaaaaccctaactcttaaccacagcattcagaatctatctggttgtagtggaggacccaatgtcaaaaaagcaagtgcttttcccagaccatgaacacaatgtgtgacaaattagcagttcttccccttgccctaagatagtaaatatccacccaggccaacttgtgtctgtcagagaacaaagagtgggcttgtcacactgttttctcccaagagggtccatctgcctccgctcctttggtacacgctaggggacacacactgtccagcatattcttgcagagtcatatcttaccccacatcttatcacaaccctgctgaatgtcaggcactatcaagaaaatgttcactcatcttcttcccgttatgcccaatgtgtgaactgataacacatctaaattcaaagaaaatcaacagacatcacctcaatcaacctgaaaagtctggtgactcattcccacccttctcacggggctcctgctgggctgcctggttctccggaaccagcctccaggcctcctgcagccggggtgcagctcagtgttcgagccccctctctgctgcccatcagatgagtgttgactttctttggcacaggcatttgagttgcatttgaattgcagaacatgctgcccccattctgtgctgactgtgaccccacttcatgtgccccagaggcaggctaaacaagcttgccttggaaaaaataacagggaagaagatgctgactctccaacccccagagtaagttccgtcactctggaggtaaagtcataatatctaaatatggctcgattcatgtcaggtcttataaatacacacacacacgtggatgctgaaaccgtgcatgccctgacagccaaaaaaaaagtcaaaacgacttactgtctcattagcaggacaagacctgataggccagctcaccagaataaagaatacaaaaaatgggtatttaacttctctacacagacacacacacacacacacacacacacacacacacacacacacacaatctgatgtaacgacctcaagagagctggttgccctggcaatgaagaatcgtttgtatattcaaggattttcttgtttaaatttaagctagccacttgaacttctcgagctttcttgagcttagcttcaggactccatccccagacagaggtctgacatctatgtcagcctctagcaaggcaggaagcttagaagtcggaccaaaacctcacaagccagccagcctggatttgaatttcagctctatggtttctcagctgtgtgacctgggttagctgcttaaccaccttgaacctctatttcctcacctgtacaatgggaataataaaattaaaacaaacttgcatgggttcattatgaaaattagattgattgatgacataatacatagcaagcatttagagctgtgcctgattccgaatgtgagttatctgtaatagtgacttgaaatgggtttacactgcctggcaggaaaccattcaattcctttttgtttttgactttaatctttgaagcgctttcatctcatttcttcttattttgtgtttgtggagaaggaggatgtttagccatccttggagtacaatcttttattaaaaaccattattaagtctcttcaagtttctcttttgtagtaaatgatctagattacttaatggttctgttttacatgttttaatcatttatttgaaccatctccagatgtagtacacacagaaatattgtctaggaaaatgtgttactgaaattccttatcatctgtggtccattagctcaaatgtttaaaacccattgtttttatttttattatttatttatttagttatttttgcaagacagggtctcactcttttgcccaggctagagtgcagtggcacaattatagttcattgcaggctcgaactcctgggctcaagcaatcctccagcctaagcctccccaaaacttcttattcttaagagcaaagttgagttccatcatattgtcagttggtttcactccatcatattgccaaaaccacctaattctcagatgcatagtttagcacaagccaaaccagaagagaccataggtcattcattcattattcattcaacatttactaagtgactgctgtatgccagaggctgggctatgctgtaaagtcacaaagaagatacttctcagttgggagagcttacagcttgagagagaagacacacaagcaaacaaatcattacaaatgcctttccattgggtgccatacttgaaatgagaagatgaggccagggtacccttggggcagaagggagggaggattaagctcagggaacagctttacagagaaggtaacatttgcaccatattaaaggatggcaagaattgaggagtacaaaaaggagaatagtccaagaagaaacactcagggatgatttgcacattgtaaatttaggtaaccttacatgccttacatggggctgctgtgactgaggcacagggtcaaggaagggagcagagtcataaagctacccaggtcagccaaggccaggctaggaggcctgagctttatcctgcaggtgtgcagagccagaggagagtgcaagaagagacatggcacagtctgatctgttttgcacaaatcactctggaagcaatgaggaggggagaatggaggtatttgagcctagagtcaggaaggagaagtaggatgccagggttgtggggaaagacgataaagcccacacaaaggagggctgatggaaagatggaaatcaatttcaggtatatttaggccaggtgcggtggctcgcgcctgtaatccccacactttgggacgccgaggcaggtggattgcctgagctcaggagctcacaaccagcctgggcaacatggtgaaaccccgttctactaaaatacaaaaaattagctgggcatggcggcatgcgcctgtagtcccagctattcgggaggctgaggcaggagaattgcttgaacctaggaggcggaggttgcagtgagccgagattgctccactgtactccagcctgggcgacagagtgagattcagttaaaaaaaaaaaaaaaaattcaggtatatttaaaatatagtgtttagagacccattagtggaagataccagatttgagaaaggggaggaaaagacacggaggagtccagaagaaatttccagatttctggcctggataactgtgagggcagtggtgccagatagtgccagaatgaaatatatagattggcacaaatccatctctcagaaatgcacctctgagacatctgttctgctgaaggtcagtagggaaggccaacttcatgtgcaaagagcaatatgtgtgtatttcttactagctattctttttaaaatacttcttaatatatgggacatacatgagctaagatagtattcatgcaggaggtttcatttttcattttctggcaattgtgttttcaaatatgagatgctagcattatttcagttatctatgcctagcatagtatatatctacggttcaagattattaattgtctcccctgcctccccactagaaggtaagctttctgaagccagggattttgtctcttttgtcctcatctccattcctagcccttaaaactaagtttgactcccaattatcgagtaaatgattgaatttccatctgagtaaaaagaaacagtcatttcctttactaatgaggaaagaaaaggaaaacaacaaacaaatctggacttaaaacagtttttacaaaaagatccaatttgcaaaaatggaactgaagtttaaaagctacttttctccctgcagctctacttctgggaaagtcacagctgccagcttagatggtggttttcactgcccggttacaaattctgcacagttgtacatattggcagggctcagcttccttaaatgccattggatcagtagggaaatggtgattttccttattgatttaatgccagttcctcttttatgaaaaatcccacgtgctgctcactggcgtatgtaccataaaaactgaacgtagggggccagaaattaagtaagtcactcatgttcttctccagccatgtgacgttaaaccatctctactttcaggctggagtgttcaatcattctccctttaaatttagcagagtgattattcctcctggtggattgcacatatgctcctttgatctatgaaatactcattctggatgaactttaagctcccaggaaatgcatgtaaaatactgtttataaatcgcgggagaaatgtttcacattcttattactcccaagtaatcataccaagcctctctctccaagattcgctttttttcctagaagagggaaaaagaacttcgggcagtagcactgtgacaatcatcaccacggtcgtactttccatgagttttacgcagtaggctcacggaagtgacaatgcatggtcgggcgcggtggctcatgcctgtaatcccaacacttcgggaggccgaagtgggtggatcaactgaggtcaggagttcaagaccaccctggccaacatagtgaaaccctatctctactaaaaatacaaaagattagccggacgtggtggtgggcgcctgcaatcctagctactcgggaggctgaggcaggataatcacttcaacccgggcggcggaggttgcagtgagccaagattataccactacactctagcctgggtgacaaaacgagactccgtctcaaaaaaaaaaagaagtgacaatgtaggatacccattcatcagcaaatatttaatgtgagcaggacaatgtgctaagtccatagactgcaaagaggagtgaggctgggttcccatcctctggggcttacaaggtagctggagaagtaaaactcaaaccacaaagtgaagttaatagtcaccaatgaacaacatagtaagctctgcactggttcagaagaggacaggagtaacaagacagtaatcctaaaggagatggacttgaatttgagctggacctgaagagtcaggagctagagtgagtaaaggcagagtggtgggaacatttgtgaatcaaagctcaggtgggggttacggcaggcagggtggggatagactgaggatgactttgaatgccatgccactctaaggactttggacttgactctacaagcaaggtggaattattaagagattttgagtagaaatgatgtgagctgaacagtgcttttgagaaactaaatctagcagggatcagtgctccaaattaattggacatgtttcagacttgagatcatgagaccctgacccaggctggggacaatgggatgtctccatcatacattacattcctgtgaatacttcttacagattcatatgaaattctgcctcaatgtgcctactgtctctgcactgtaagacagtgatattgtgatcctgtgtgctgcttggaaccagcctcattcctttagcaccccagtttggacttggagtgggcccaagtgcagcctgtacacaaacctcaaagaatccaggcagcatagatgtaaaagcttggagccctccaagtccacctcctcaacttaccaagaaataagctaactcttgctcatctccctaatgacggattcagcatgtggcctcagatcttcctgtgctccagcagtgcttctgaggccagtccaaattctgctttgaggtgtgcgtgtgccaattgtggtgcaatccagaagcattttggacgaatgaaggagctgtttgtgttttcttgccctaattgagatagttgaagctcctctcccttactctacaccaagccccccagatccggtacctccctgagtccccgacttcatctctgccttgcttcttttccacaacaccctatcagttcttgcatcctgccattggttgtgctgtcctcattatctgaagcctttacctcccctcttaggcctcatcacctccaggagactctccatggcctcagcccctcccttaggtggaccaagcttcctccttggagctccatgctaccctgcatagggctcagtcactttgcctccatgatgtcttgcaattgtctatttatatgtctgcctcctgtccttcaactgtgagctccctgaggaaaggaactgtgggtatgcatcattgaatactcagcatctagcacggtgcctggtacacactaggtattgaaatgtctgataaatgaatgacagttgcatatttgtctttttggtatattcattcatttggtaaatatttattgagtaattacttataattgaattggcgctgtgtagttacacttaaacatcaaaatgagcctatcctctcaagctccaaattatgcatgcataaattatacatgtgaagtgttaacatgcacacgcagcagagagtgtgcgtatctacaaataccagagctagcaaatgaaataaactgtgtgccagatgtccctgaaatttacaaagaaccaagaaccaaaaatgacagttagctccgtaagcccaacaaaagaaaaaaaaaaaaaaaaggaaaagagcaaaaaagcaaaagaacaaaagaaccttgagcataaggaagtggctatggttttttctacatgctctagctgggggtggggaaaagtcataaaagcattctatgctggaccggttcgtgttaagtctgagttcctcaatcgctggctctcaggagctgtttggaaaattcgttgccatgcatgagtcgggggattggttttttttccactggaaattgttaatggggactgcattagcggccccttatcgctttgcctgatagagagacagcaggttcgcccaaacaattctggaaccctgatcactgccaattaggggagtattgtctggctgacataatcaagtaagtataaatatatttatcgtgattggaatggggaagggagactgcagaaagattgaggcagaagctgccacccactgcctggctccagcctggatccagcccagtttgtcaccctgtgctcagcagaggcggtcactggctttctgaggtggaatgcacagttgagaattcaggactagaattgcttctcccagagagaaacttgtctcttctcatttttcctcccctcttcttctctttttttcatgctcacttctgtgagagctgaaaagagaagaaaaagcagatgccacgttgatcacgttttaattctgcccccccggccatgctatccccacttaccttctctgtagtggaaagtgatggtgaggcacagtgccctgactggacctcccatcctctcggcccgccggcatgtgcaagttggtctggcattgggtttatttcattgttgatttgtggagctttttgggaatacctgtgatgtgaatcagccctgggattgaaagaccctgaaaaaacagtcccttgcagtgggctagtgacgggaggaattgctcacatttaaacagctgaaaagcagacatgtttaagtcacatctggtggcattcctgttgtctgaatggagagcaaggtctttttaagcatctgcccagatttcaaaatgcaggctgcatcttttcttcctcaaacaaatggtcaggatcggatatgaatggcctaatcgcatcgggagaggtaaacaaaactgatctcatggctggatttcaaccttggtccatccaggcccaatcgatctaaggcatgacttttttttttcctctcacccatgactacttgataatggccatttccggggccaagttcatttcggctcttttccaccatcccccgtgtgctgccctgtctcaccacttgagggctgaggccccttcccaatggctacaacagggtaaggggaccctgtccttctgtctccttcatcctatagtttgtcttcacagctgcaaattgctctcaggcctgccttcctggatttgacaaaaactattttcttactggtactatggataccacaagtggagatgtaagtaggaaggtgcaggtccacaaataaatagggagcccagatgggagaaatgtcattagagagatcactgtccctaaaggcatctgaccacccatgttcctgcctctttctgcgaccattttcctccttcggctgctcagaaattgtcgaggccaaactcctttcacccagattccagaaatacacttatttcctttgctttccaaatcttaatggatgaaacacctctttttttttgtcttctatctcttgccagaaatattgttttttgagaaccagagctcatttatctccaagggagaaagaaattcattccatgtttacccattaacaaattaccacttacatgaaaatactgggacttctctcattctttgctaataaatgggttattcaccttggttgaaccatggcagaggcagatggatagccactattcccttcaagttggcttaatattctctcgttggcttttgtctccttgaagcacagagatttctcagagctttctttgcttgattctgcttttaaggaacgtgcccaacttatttgagtctgtttgtttagtaagctgaattgattaaatccctggcatttatggaggagcctactgtgttgggtgctatgggttcctccccacttgaaagttgaattggagtcacccatctgaatactaactccctcctaatccattggttttcctgctgtgtagacaggggtatgaagtagccatttaccaagagatagtgcgatgtcataaaccgaacatgagttctaaagttagcaagacctggtttgtacagtagtgcaggcttgggcacgttgctgctctcttttgagtcacacattcctcattatagatgctgatgggaacaacagagctgtctgttcatctttgctcttctccataatgagataaagccaaacagacagtgaagagcctggtctaaccacataacgttggtgcaaattatatatggtcataagaaggtaatttttacctgagcatttaggtggcatttggtgtggtatttgatgcatgtcatttagttacagagataaaacctcctgaacacacataaagctcttggcctggttgaacattacatctcacagatttttatgttttttactaaggatacttcctgctaggaagttgtaaaagagaagatggaagtctttttaatggtattgtagcaatatcagtttcctagctttgatactgtactatggtgatgtaagatgtccccattaggggaagtggggtgaagagtacaggggacctctgtactatttttgcaatttcctgagagacagagggaaagagagaaagagagagagagaggagggaatgagtggagtgacatgaaaaaggagtgttcatcttggcttatgtccctggctggacaaatatttacattttgtttgcctctttgtatagattttgtgaatagtcatggttaaaagctagcattcccttttctgtggaagagaagaaagataatagaatgagctgagaatccctgccaacattatattagaaagccacctacttcctgcctctcctcaccctccttacctatacaaacttaccttctgcatctttgtcctccttctttcccattcaaaggggagatgcgtctcctgctgaacaaatgaactcctccgcatgaccaaggtgtcccatccctccctgctgtctccaaaggttcagtcctgctacataatctctctaggtgaattccttcttactcagggttttcacaatcatctatattggaatagcacccaaattaatagctctacccagacttttttattgagttctatacctgcatagccaatccttgactgggagtctctacatagatcattcacaagcatttcaaacacccctttaattatctcctctttctgtattcccttatctcagaaaatgctaccaacatctaccctaatgcccccagcaggaactcaagagtcgttctagacctatgctgtcccaagtacttcaatgtggcttgtccaaattgaaatgtgctgtaagtgtaaaatacacaccagatttcaaagacttagtttggaaaaaataatgcaaagtatctcaataatattttatattgatttcaaattgaaatgataatattttggacatattgggttaaataagttattaaaaataattttcttttactttttaaagtgccaccaaaatatttaaaatggcataatggctggcatttgtgacttgcattctatttctattggataacaccattctagactcttttctgtcttttagcccccttccaactggtcataattcacagtgattcccttgagttaagacaagggagaatactgtttaagtgcacaggctgagtttgaatcctggctccaccattttttgatacatatgaacttgggtgattatttaacccctttgagcttcactttcctcatctgtcagctggatacaatagcagttcttattttgagattcttgcatgctttaaatgagataatgtgtaaagtacttactatggagataaaaacatgtggaaagacccagtgtcaaaagaaagagcatgatctgtcactgttgtagttcaggccctcatcattactagccaagactactgcgatgctttctccatcttcggttcaccctgccctccattccttcatactgccatctgattaaacattcctgaatgcaaatgttttcaaatgtccaatgacttcccatcatccttggtatgaagtcctaagtccctggcatgctttcaatgtcctccatgatctgcccccagtccaatcactgatcccatctcctgccagtccatgattgaaccagttgggtccccaactcctatttgcacacaccattctctctgtgtgtcatatatgagctctctactctgcctagctacttgtctgcaagactcagttcaattgtcacctcatttgggaagcttccactaatccctcctgcacctgtctccgtcctaggctagattaggagcctgccctttgggttcctgaaccacttgaggtgtggttcctttatcatgctgatctcactggtttggctgacttgtttttcctacaagactgaactgtctgaggtcttaagatgggctgtctagtccacactggatcttcatgctctacacagggcttgacacagagtggggcacaggaaatgtttgttgaacgaatacacaaagcatatggatactcctgagagagagaaggtgggcaagacagccttgtgaagttaagcagcagaaaatctgaaaacgaacctggatagaaatcaccaattcctggaagtacagagagaggaaggagagagaagaatctgtgcaaggagtcagtaatggaggacttgaaatgaaaggctattaaagagagaagatcattcaaacaacagaaccacatttggtactgttggtggttttgtaacttcctctgaaatggttccaggaagagacaaggttctaggatggtgcaaatcatataaagaaaggatggggtattataagccaattcaaggattatttgtcatcaggactagatacatgggtggtacaagtaaatgtcaacctgatgactacacgatgggactagtaataatttactggggctggtgcccaggaaattttttgctgtggtgcagatgccaagcatggaaaaatttgacgagttataggcatgagaaagtagatggcgaatttgagagtaacaatgtaaaatgccagagtaatcacaagagaaatgtctgaatatgtaagagagtttagaagatttctgctttaccacaaatacggacttcaagaaaaattcccttataagaacagaaattccaatatataaaacttatttatcaaaacacacagtattccataatatataatggtaaaagcatgccttttgacccacacaatattaaaagcagcaaataacacaagaaaggtagagaaaacagaaggtacaacattttgtggctcacaggatatatgagtgagattatatacttctattccaaaccacaaccttcactagaacatctaaaggcttcattctagaaccttcatactgcttatcccaaaggctagcccactccccggttttcatgtaagaaatcttgtgggacaggcgttgcatgaggtgaggggcagcagggaaattcgagatgaaagggtgaaaagatcaaacgagtccttgctattcttcttaacaatgcttcagtccaccactttgagatttctgtggagaaagtaaagatttgggatatacatatactaaaacaactattggttgcttatctgaaaattaactttagctgggcattctgtattttatctgacaaccctacttggtgaggtgtacattttcttattcatacttcctgcgagccacaacatgtcttaatagttgttagctattaaggactatgcataaaagtgacaatagctggctgggcacagtggctcatgcctttaatcccagcactttgggaggctgaggcaggaggatcacttgaggccaggagttcaagatcagcctgagcaacatagggagacccctgtctctacaaaaaaaaaaaaaaaaaaaaaaagctggatgtggtggcatgcacctgtagtcccagctatttgggaggctgagacaggagaatcacttgaacctgggagttggaggctgcagtgagccctgattgcctcactgcactccagcctgggccacagaatgatacctgtctcaaaaaaaaaaaaaaaaagtagcaatagctaacaactattgaattattgagtgcctactatgtgccagacaccatactaagtggattagatggatattccacatattcttcccaagaacattatgaggcaggcactattatcatccctgtttttaaaatgaggaaactgaggctcagagatgttaaataacttgctaagggtcactcagaaaactagtagtagagaagggtttgaatgctggcagcctgactccaaggctcatgtgcttgcctaccttacccagatggcggcagcactgagcaaggggtagataacttcaagtcccctggaagaataagagaaagtgagaccatggggtatgaggggggcaggccctgagtaaagctttaaaggagcagttgaaattagacccggtgcctttgtttaagtaagaagaatgtgctagttctaaacagatgcagccccatactgggactcacagcttgatgagaagcgcactggatgcatttcagcccttactgcaacctcagcctgaggcctttatgcagtgagcaacctgcacaaccatacatagcaatgtgagtttgatgggagaaggaagaccagtgcagagacaaggatgtcgatggagtgcttagagaacaaagggaagctatttactaaagcatgtttgcatggtgcaggtgattttctaaagttaattttgacagacaggatggggaaagattgttgaaggcctgaaatgacaagagagacttgagtggatctgggaggtcatgtgacaaacatgacattaacaaattctaaatggaaaaaatgaccctcagaaagttgtgtgtcaaggccgggtatggtggctcacgtctgtaattccagcactttcggaggccaaggcaggtggatcattagaggtcaggaattcaagatgagcctggccaacatggtgaaactccatctctagtaaaaatacaaaaattagccaggcgtggtggcgggcacctgtaatcccagctcctcaggaggctgaggcaggagaatctcttgagcctgggaggcgaatgtttcagtgagccaagattgcgccactgcactccaacctgagcaacagagcgagaccctgtctcgaaaaaaaaaaaaagaaaagaaagaaagttgtgtgtcaaaagcttcaacacacaggggcctttgctctgtcaagcaaggagaatagggtggaggaggaacaggaacacagtagctaaggtgacagctgcctcacaaaaggaaagtctatggcttgcaaaagaggtcgaggaaagcggaaaagcaattgccgaagagggacagtaagtgaaaagatgagtttcttccacttggcatctccccaaatatggccctgaaggaagagttgaccctgttacggtttctttctttttcctgtggggttattagagtgacatataagaaaagggccacaggcacggcacagcttgatttcagccaggctttgcatgacaccctacagagcagaatgaggacagataggctgaaggataactacttaactgggtaggtttcaagttgatactcagagtgttgattaaagggtggtcaatgacaacctggaggaggtctttaggtaaagaaactgagttcaaagataaccaacttgcatgaatgaaggagccaggatttgaacccagccctacctgattcaaaagtccattttccatttattataaaacaaaaaccaaaaaggcatgaagttcacttatgaaagaagagttgaaagatataaccagagggttaggagtacaaatccatgcccgaatgaattgtgataggctgagaaattggccaaagggggagaacaaaaacacagtgaaagtcagaaaggttaaatgtgaagccctgcattttggtttcaagaaacccgttgcagaggtggagaggtccagcttgaccatcttcatgttgggaagcacccgggcttttgttgtagttattgttgcttaattcccaaacagcagcggggtgtgggggcacacgattgtagccccagctactcgggaagctgaggcaggaggatgcctaaagccccggaggtcaaggctacagtgacccatgatcacgccactgcactccagcctgggcaacagaacaagaccctatctaaaaaaaaacaaaagaaaacaaaaaaccagccaacagtgtaacacaattacaaaatcttcatgtacaaatgaagtgattaaatcatcctattctactcagcccagctcagaccatatcttgaatactgggttcaagtctagataatgtattttgtattttgagaaaaatattgaataactgacaggagacctgaggaaaatgaccaggagatcaagagttggaaccttgtcacatgaagggtggtcaaggactctggggttatttcagcttagaaatgggaatttgggatttgtgattctcattttctgtttcttttgttcgttcattctttctttcattctttctttttctttcttgttgtggttcttagcacagaattcagatgaaagagcttttgattcaacgtaaacaattcaccaagctgtcagctcactccaatcccagccgtccccgatgcccattgtctatcatctcaatgaattagggaaaaagactgactttctgggccacttccaactttgagaatctaggataggggcactatttaatcaaaactggcaagtaaaaagaaagagaactattttaaacaagacaaatacaagaggtgttgaaccaaactcaaattagaaagaacaaaatttcccaaaaataagaatattataattcatttgatgaaaggaatttgccatattatcccttttactggcatttttttagtacctttacttgtaaaaatgtcaggccctcccacttttctgggatagacttatcgaatgaagcaaggggagcttctctatggatagatgatcacttttgcaagctttgagatcagtgagctgaaaaaatgaccagcattccaacaacaaatgagggcttgggagcgtaagtaaaagtgacagcaagattaaagtaattgtggtcatgccgtcctctgctgacacttttgtgttttgcccagatgagaattaaggtagcccagggcacaggcagtgaggaaaaggagaggggcgctgagcgtatttgcagcatttgtgaaccatgtcacagccctggcgaaaacagagcaagaagatggaggctttcaaatccatgataaataagccatgctttcagagcccaaatcagtaaaaacaaacattaagtgaacagaagggaagagggaaaaaaagagaacatgaggccaccataaaatcctggtgatatattccaggggaaatcatgatgtgaatagaaaatgagaagtaaaagaaaatgaagcctggagatttgtaaaatgtctgtctgtctgtctgtctctctcgactgtcattcccatctacccctgccacccccaccccgccctccacccttctgatggggttcattagatgatttctgattcaggggtggggggcggtatttttaatgcttcacttatgtttgggttttgccagcaggatccgaggtgtttctgtagacaattgttattgctttaggaaacaataagaataaaatgaggaaacatcaagtgatacatcagtctagcagcagagtgaggctcgaagtagcatttccagcgaggttggtggtctctttttgccttatttttgttgttttggattgatgttttcatggtgtcattttaataagaaaagtgtcagagaattaaaagtggaagtatgcgagatacactttctctaactggattcatggtaagttattaatgtttcaaggagaaagaaaagaacttggaaaaagcagaatatattgtggggaaagttgatgaagggaaaggtaagagaactgtgacaaatgagacacagacagaaggagagagagagaaagaggaagagagagagacagggtggtgggggggaccggcagaagaaaaggaaaagagcgacagtttgtaagtctattagctgagattgtttccatttctgcaattgccttaaagcgcatgattgcttggtctgaggtctgccaggtcgattgcagtctttacctctttgaccaagaagtaatgggcttgaatttcctgggtatgtgaaaattgctcttgaatgttttggctaaaggacagccacccaggaaggttgagagggcctaagctagtgagcagtcatcctgaccaagtaggagggatttggttatgttgctcgtagcaggagaggcagagcagcaaagtgaagagaacacacagccttaggtgccaacagacatgtactgaaatctcttgcctccatttcccacctctaaaatgcaaaggatgatagtaacaataataaatgttgcaacgggtgaccgattataaagttcttgtcacctgatagaccatatcaatccatggtaacttattcttagctggttcacgtttctaggcattggcacagtctgggtggtgtgtgtcccctcaaaggtagcatcacagtgactgagctctgcatagatggcaaagtgtagaagcctggtcagttttctgtttctccatccaccatttctccccacttccccttggttagtgctgtcttctctctttcctcactgaattgtcttgattagtgtcatactttctgataacactgcagctaggactccacaggcaatagggagaagctagcgcctgcccagggaaagtgaggaaaaataggtgcttgagaggctgaaaagtagtatacgcttggtggccttacactttgtagaaacagttttggatttgtctctacaagaaaggattgtagataaccagaatgcaaaaatgctttgaagaaagagacattgagcattggaaccaagtattctacgtcctcttccctgcaacactggggactaaggattattatctgcatttctggtgaagaaactgaggcacagagaagataaactatggttctccggctacaaagtaagcagcagagcctagagtttgaagccaggtctgacacctaagtcccgtagtaaacctcccactgaggtaggcaagcctcgccttgcagagagtggcaaattagggaaaaaagaatcaaatgtgcttgagtttaacagaacatatacattatacttaaagagaaagatacttttcttacaaaaagtttgaggacaaatgagacttcatgtgatgcgtcttgcactaaaaaaaaaaagttagattatataagccagactggcgttgattaaagaagagcaaggtaataaatacgcataagaagaaggaagtggctggctctaccttgggcatcacccaagttacaggcaggggaggggataggccctgcatggggacagtctcctgacttgtcttcttccttctctacttccctcccttcactacccctccctccaaaacccaaaaaaccttaagcaggaaaaaagggagctaattaaaaaagagaaaaacatccttgagaccaatgaagtctccataatccacagtgacagacagggacctgcagaacagcaatttgattaaataaggatataagggatttaaaaggactctccagttgtgtaaagtgtgtccatacgtctgaaaaataccgtatttatttggctcccaaacctgaaaaccttctgacgggggagattgttcccatttggaaactaggaagaaatcacaaggcaaggccatggggttctggcagggctggggatcccatgttgggtggaaaccccaagaagccagccaagggtctgcaggaggggccctggcagagagaagcattagaatgcaagggcaggtaaagccaccctcacagaaggtgactgtgggctgagcctgaggcccttcccagatggggaagagagaacagcacacctctcctgcccacgcctcggtatctcactcaagaatcagctgcccgttagtcacctgtcatcggagacagctctgttggcggctttcagaaaaagcgaagcagccagaggatgaatcgttattcggggaacacacctgcacacaggacaggaatggatgggagtggggagcgccctggggctactgttcaaacgccatcctcatggtctccaagacttgcatcagcagctcagccgctgatgaattataattctcggacaagctgcagaggcccccctcgttccatgtgttcacccctgccgctcatactgggggatttatgcttcctggggctaggaggagaaaataatgagtcactggggacaagagaaaaacaaaaatgccctgtatgtgcaaaaccacctaaaatggaggcttttagaggacactcaaatcccagccaactagccagaaagggttttgctgggggtatattttatgtgtctttgctatctttggatgcagtaaagccagaaatgtttatatctcttggagggatcacctgtgcaaacaggacaggtcctcttgagaaggctgtttgttctcctgggatctcgaacctgagaagaaatggtcctggcctggcgcggtggctcgcgcctgtaatcccagcactttgggaggccgaggcaggcagatcacaaggtcaggagatcgagaccatcctggccaacacggtgaaaccccatctctactaaaaatacaaaaaattagccgggcgtggtggcaggcgcctgtagtcccagctactcaggaggctgaggcaggagaatagcatgaacccgggagctggagcttgcagtgagtggagatcttgccactgcactccagcctgggggacagagtgagactccgtctcaaaaaaaaaaaaaaaaaaaaagaaatggtcctgcatctctgacttgggaggtccaattaagcagaggaactgttggctgtaaaccttctaaagcagaggatcctttgggaggctgaggcaggtgatcatctgaggtcaggagttcaagaccagcctggccagcatggcgaaaccccatctctactaaaaatataaaaattagcggaccgtggtgggctgtacctgtaatctcagctactcgggaagctgaggcatgagaattgcttgagcctgggaggtggaggttgcagtgagctgagattgtgccactgccctccagcctgggtgacagggcaactccatctcaaagtaaataagtaaagcagaggaccctgatggccacccccaagttcatagctacctgcacactttatgtggtgaagcactggtggggggcccaggaagccctgcatgagttggttgtagctgccatgattccaactcccacgccaccctctgcacctagccacagagccgcatctccagagaaaaccagaagcaagaccccaccaaaaaagaatgtgagagtctattttaaaggctccggaagatgagttagaagtgattcaagagcaggcacagtaaaggaatatgtaagccttggtagacattcagtaagaagggtaacatttccaacatgaccagctgattaacaggtattctctaagcagggtgtctgctggtttagaatagagcaaaaatattgtcatctgagagcccaaaatggggaaaggctactccttggtctcttggtgaggcccagcctgttttgttttttgtttgttttttttttttttttcactttcccactttattttcagaatagattgatttgggtctctagaagaatatttaagcagtggcttacaggcgagccataaggtagttgtccgttctatgcttacaaattttcaagaagggccatctgtaacctttctcagtttcctgttcctatgtccaatgcccaataagaggtaataaactaaggcagaaaggccccaaacacagatgtaagatgcagagcaaagaataacacacagtaggggtttcaatacaggatcattaacccagaatccaagcaggagtgagggaagtccactcaggaggaatgggaaccacctctccaggctgctcaggaggaatttaagcatcagacagtgtgtaggagaagatgaccacgaattctttgacatctaagcaattctgtattttaaaggtttgagtctttgaaatgttaaaattgatgcgccttaaaactcatgagagacaatgaagacaatcaccgaacctgtctagttaaaggttaccgggactcaagatgcaaagaaaagttacgagatggaattgatggtttggggtgcaccattgccctctattggattttaaataaatcagacctcttagtgtaggtatgttgcactatctctggctgagtttgctgagaagtcagggcacctctgagtgggaagttaattgatccttttaaatggctccttctgtctcctgctccttccctgaggaaatcaaccagagtaatgctgagggcaggtcatttgcatgtcttcattcatccaacaaacatttcctggctgcctgctaagcccgggctaggcattgtagagaatctaagaaaaaataacaactgccattcgttggacacctactgtgtatcagagtctacgcattaatacagaacaaccccacggagtaactctggtgactcccatcccacggatgtggaaataggacactcaggaagtggcacattttggattcaaatccaggttcgtctactactaggcctatattctgtccactaaactacaacttttccccttaagaagtttataaactattagggggagataggatatagatataaatgtatatatcagggtttgacaaactacagccagtgggccaaattcagcccatcatgtgtttttgaccttgagctaatttacatttttacatggttgaaaaaaatatcaaaagaataataatacttcctgtcatgtaaaaatgctatgaaattcaaatctcagggtccacaaataaagttttatgggaaccctgctatgcccattcatttaccatcatctaaggccaccttcctggctacaaaaacacggcgagtcattgtgacagagactagatggccaacaaagccaaaatatttactctctggctctgcacagaaaaggtctgacaattccacatctgtactccaaggtgaaatgttctatatcaacaggagaggtgttttttttttttgtctgtttgttttgttaagtgcttgaggagttcagaggaggggaaacaaatgtttatttggcccacagtgtgcagagctggaggggataggcaggtgtgctctgttttaagactcaatgcatgaaaaccctgactttaaaacagataaattaaaaggtagttatttgcataacaaattttcctttcattttataaagcgattcaccacagggttcctttatagagtgagcctccataatacatgctaatatgattccatttacaaatactctattcattataacttttcaagaatatacctattgtgtacagtgaggcttaactgtaatcatttttcctggcagtataaggtttcctacttctgaaaagtgattaagctgaccttgtcaattcgactgggggaggaggcactctcctctactgtctccgagaggggctttacctgtcgaacaacaaggctgtggattctgtctctgcattgtgtgatgttgagtagctggtataattttacattttcactaagctcctctcagtagtagcagcagccaaagtcctaaagtgtaaactactctcactattctcttacttcatttcgtatacaagatacactaataaaaattatttgttggctggaccacggtggctcatgcctctaatcccagaactccaggaagctgaggcaggtggatcacttgagcccaggagttcgagaccagcctgggcaacatagtgagaccccgatctctaccaaaaaaaaaaaaaaaaattagccggatgtgatgacacacatctgtggtcccagctactcaggaggctgaagtgggagaatcctgtgagctaaagagttcaaagcggcagtgagctatgatcacaccactgcacatcagcctggtcaacagaggaaaactttgtctctaaattaatgaactaattaattaattttgttgctgatgtcctgacaaatatgtgacaagcaattcttgtaaaaagcaatgtttccctctctttttaaaaaatttcaagacattatcttatctgaattacaacataaactggggcaagtattcagattagagctctccccagcaaaataggaagtgatagcaatttaggacctgtctccttctctcactgggtcctgagcctgaatcttcacatagctttgtggtgttatgcaattgccctttgtaagagatacataaaatggaaaccttagctattcatagccaacttaggaggagctgaatttgatcaagaagtttcttgccgggtgccattttgatggtaactacgtgtttctgaacaaatccacttataatctgggtttccaatggaggttattttaaagagctgtagcatggcttttgttttcatcctctgtggtggctatattttagaagtagacaagcattcctggtatatagcctgaatattttttaagatttttttggtagtaaaagaagctcacatggaaaggcaagggtagaaaaaatcatgttcagggcagtcctgtgtggcattaccctctggtgaagcagatccacactgcatgctgctaatggctattgcgtgacagctcttaaaggggtaagcgagagaggtgcagagggctggtgagaagcagagctagcactgaggccctacaaatggcatcaccatctatcaggttggcggggtgggggttgggggctgctgctggaggtggtttggctgcccctagaggctgcagcgtctcacactgtatgggcaggtagcatttcagccatttctaaagcccatcactggcagggaaagcacatttaatccgtctgtgaggttctctaaaaaggggcctctcttttctttcttttttttttttttttttaagatggagtctcactctgtcgctagactggagtgcagtggtgcaatctcggctcactgcaacctccacctcccgggttcaagtgattctcctgcctcagcctcccaagtagctgggactacaggcacacaccaccatgcccagctaatttctgtatttttagtagagatggggttttcaccatgttggccaggatggtctccatctcttgacctcatgatccgcccgcctcctgggattacaggcgtgagccactgtgcctggccgaggggtctctcttttcagaagtcagaagcgctgaaattgaaaacagcagcaagaaggcttcattgcattcttgaattcaggctgttgcactccgccccccacaactctgtctaaattgttgctacccagtttatatctgcatcatattttttgttgttgtttctccaatgcagtatgtagtggtggcaggtacagatcataaaacaaatggataatcagattcctttttccctggtggtaatttttaaacttttcaaaattaatgctaatggatatagaggaatgggatatacatttccatgcatttttatgaccaaacagaaaaccgacccctgagggtgacatatttactattctctactactaggggtgcttcaagggaagagtttttgaagccctgtggtttaaacaaaaagagaacataccccaccccaccctgaacaaacagcagctgggcagatttcatctcacaaatggaaatgggagcaaacaaattttttcaaagcgattttataaagagtgggcctgtttagttgggttttttgagccaggattaatattacaagctggggagctctgtgacatggctgtgtcgttggctttgccataccgcctacctcctgggggaaggcagaggaaagtgctgctattcagaagcaattttacttctgcctcggccttctcacttctcactgaagtgatttacagccagcctggacccagtgcccaagcctgagctgagttacatgtcatgttggaaagatcttccccaaatcaaggtcttatctagagcttgcctgggatattttttcatttctaatttatgtaactttctaatatgtttagcatttgcccttcccttgtctccatcctgcttattaaggtgaatttgcatacaaatgggaccttggtcttcaggaccattcacctgacacttgatcccacgaggcgaccactgtctactgttgataccatgaggatgacccacagaagtcatgtctctctgcaaactagaggcaaggccttaattagaagaagccttgtgtgttaaaatgatggggtgaatcaaatcagcaaaggcatttagcattaacttaggagggcagaatactccttcctgttgagtgggtcgtcctaggtcacaacaattttaatttgccttcgatagatggatcttgaagaaagtgtacaaaaagtatatttgtgatggtgttgtttgggagtacgttttgactcaaagagttaactgtgacattttactttggctcctggtctattttttgcttaacatctacctttgaatgggtaatagtcatctctataaattaccttcgaaagattgaacaattgtggagaatcagagaaatgagccccttgctatcaccctgttgcagtcggctttaatcctctgatctcctggcgtttcaccctctcactggcagccaccttccttatttacccaaatcttgttaacttgggtaggaattcccactgagaggacaaatgtggtcccagttgactggtcgctgaaagtctattaggttggagagtatttattttctaccctaaagggtttgaaacttagggaaattttgatcaacaagaaaataacagctttcaagattgtcctgacagttaagctgtcttagcagagaatcacaggatttgatagtcatggagattagttctcaaatttcaatgagaaaagttcataggagatggagtgaggaaagaaaacttgtgctgattttggtcaggctacctttgctggggaaaaattcattccataaaattattttaaaacgtaaatactatttagctttatctggtgtaatactttgcatctataatttttttgttttgttttgtttttgagacagagtcttgctctgtcacccaggctggagtacagtggcatgatcttggctcactgcaacctctgcctcccaggttcaagcgattatcctgcctcagcctcccaagtagctgggattacaggcacgtgccacggcacccagctaatttttgtatttttagtagagacagggttttgccatgttggccaggatggtcttgaactcctgacctcaggtgatctgcccgcctcgacctcccaaagtgctgggattacaggcatgagccacagcgcccggcctgcatctataatttgatttaaccttgcaactttattaattgaatattatgatcaccattttatagatgaggaaatggagactccaagggtttaattacttgcccaagagtctacagctatctaccaacaaaactgggattggagccagctgtcttaccattacatccccgctgcctcctaaagcacagctctagttcatactaaatgtattacataggccgactcatttatctttacatgggtctcatgcattacaagaagggggccactattttaactcaattcaaaaatgttaaaatcaaaattcccaaaatgtacttggtttataatatatcataaaataagtaatctgaccaattgagcctcccaactcgaagaccaagaacttctttctactcccaaaccatgcagaaggaagctgagttccccactggccaatgctgtctaattctcttaaatgattcagatgtaaaagaggaaatggcatccgtctaattaacactgcctggttaaatatagctgccaagggacagccttgggacagtgtttacagaatagtctttccagcccctcaggcctcaagttacagatgatagcaagccttccctccttatcagctgcaaacagagatgcccccaaaagtggtgtcaggccaggatgatgaaaggagaagggaaaggctgcggatggccttcatttcctgctcctggcatctggggattccgagaatgatcccaggacctagatcctatagattccggcagctcttcctgcaaacacaagcccttgttgtgtgcctgagccttgctctccggcctggagacatccatctgcccactctcctaggaactgctgattaccaggaagcaccatcggctctgctgccctccccctggcagagaggcacaatgaccacattatttctcttccagcttcacgttacagcatggaagctgttgccaagtttgatttcactgcttcaggtgaggatgaactgagctttcacactggagatgttttgaaggtaggtgacctggggccccaggggagcagtagggagtttcagttactcagtaatctgacagtccctgcctttgtctcttaagaactgcatgtggttccttttaaaaagagaagttcaccttgattccctttgtgcacccttataccagacaccaaccaggccgggtgatggaaatacagtcggcataagccaccatccttgtcctgggaggttcgtagtctggagaggggaacacatccacccaaagggctgttacagatgttcttggctaagttctcagggagcacaggtgagggaacaagtgattccatcttgaaagatgggggttgtaggagtgtgtgcaatgtgaacgtcaggaatgcactgaaggtgacttgggcttttagctaaagctcagagatgtgcaagcccatgctgaatgcagggagcagcgccaggctcagcagagctggaactcaggaggagaggttgtgggtggagacagcttgggaaaggcagccacagaggacatggctcaacaaaggccatgcacacctggccactcaggggctttttaaagcttgtcctcatcctgcacttgagttgtagtggccacttgctgagctgaagtggccttggacttctcccacattcatgcaccatactttcagactctgcatcttagcccttgggtttttgttttgttttgtttgtttgcaaaagagcataagcccttcaaaagggcatttgggagtgtgtggagccagaccccctctgcctgacctcagagcaccctcagatagcctgatccctggtcctcagatagcctgatccctggtcctcagatagcctgatccctggtcctcagcagtcccaatgagccttctcggacgcccagcaacactgaggccattagtgtctcaccaccgagaattaggtttgttatacaaagaaccttgtcagcatgtgagagggtgacattgaaagtgtctgaggagcacaaaacaccacagaatggcttcttttggaatatgaacatgcccattaggtagccttctaactgctctcaactttcaagatctagtaacatagtggcaaagcataggccttcacaaacttaaaatatgagttgggcctcctgacccaggaaaacctgtctgtcactgctttggggtcttacgaagctcctggagggacttgccaagcagcgagaagttcctgccttctctgtggggcactgtgatcatgtgactgtcatccactggagaccatccttgtaccaacttccaccctcgtcttccattacaaagagaacctggtatcttaagttttctctattcctcagaaaaggaaaaaggaaagaaaaaaaaaaaaaactttgctcaactctgcttcccaatccagctcctgatttctttcctcccctttgttgctaatactgggaagaattctctacactgggcgtgcttcacttcctcacttcccactcattccacaactctctggaatctgccttttaccctccctgcaacattctcttgaagttcaccagtgatctccttaatgtgtagtataatgaccctatggaaatgtctgtgggattgacactgctaactggccctctcctggaagcccctttctccctggctttggcagcaccaccctctccgggttcttctcctcccttcctgaccactcctacaggtctcatttccaagcattctttttcctctcttgatcctgaaatatacacttccctgaaggtgctgcctttggctttctgatttttcttctcactctgagccacctcatccacttcttcagctgcaactatcacctctgtgccaaagaccctcaagtctgtggctcgtgttctagctctggccttgctcttgaactccagacccagacttccaattgtctgctggatgtccccacatgaactccagcccctaactcaggatgccgagaatcactcaaacccccatgcccatctcacccccatttccacccaagccactcttctttccatgttctaattattatcctaggtcagtcacaagctagaagccccaattatcatcaatgcctcctttaccaaatcctggtgaccagtaaccaacgtctcctgagctcctgttcagggccaggatctagctaagtggtttgcaggcatgatttcatcatctcagcaaacctgtgaggtaggcattcatttcccctccatttcatagatgagaaactgaggctagggattaaatcacatgtccacagtcacacagctagcatgtgaccaatccaggacctggacagaactctgtctgactcctaagcactaaactctgctctgaatgtatttttttcctcatatctctcaagcaagtctcttcttcaccagaaaggagtgtgaggcagtaaaaaggagcatagactttgagtcagatggatctgagtttgaatcccagcttactaaccatggagactggggcccagtcatctgccccctttgagctttagtgtcttcctcagcaagtggaggtagtatccatcttgccgggttgtggagaggattcgaggtgatgaccctgtcccaacgtagacgcccaataaatggtggcccgcattatcgggatcatccatccccgctgcttctgactgctcagatcattgccacagctccttgactgacctcattacctcttgtctttttcctccttcactcattcttcttactagtcccagagggatctttccagacaaatcagatcatatcatttccttgctcaaaagcattcaggggtttccaattaccaattgattgagactgaaaacatctggccccaaaccactgtccagtgtcattatgcacatgtacacatgtgtgcacacacccacacagagacatctttgtagatgtaacgcccccaggttgcactgcaatgtatacaccgccctttctcagcctctcccctatatactctgattgcccctctcctacacacacatacttgacctcctctaccatggaaacctcgctggtcctctccactccctaccatcccagggaaacaaatcactccctcttcagctcctccccaacatttcacataaacttcactcatttccaggcacttatgactttgcctcacatggcagctatttataggcaggccatgaccctgtggtctcatgcaccctctatttctacctctcattgctgcctttgccccgtgggatcctaattgctcgtttatgtgttgtctactccactagcaaaagctgtgcaagggcaggggctgtttctgcctcaatgtctagaagagctgtgcctagaactccctgacacttgacgaatgaatgaactttcaattcctctccattccctgagagcaatgtcatgcacgtgtgcacacaatgccaggttcgtctttgtgtcttcacagcatctaacacaagtcatggcccaaaatagatgcccagtacatatttcttgaattgctaaattgcatttcttcctgttcatttagaattccattggaaagccaaccccctccctcttttcaaattctgtccattgcaggtaaagagcaaaatggggagggcttgttgactgagccccacagaatgtctacaggatggtgattggttcccatggctgggactccccacatgtgattgcaatgtctgccccccaccttcctcaatgggtaacacacccaggatcctcacaaatactttcaaagccagctcctgactaccccagcaattcgcttctgggattctctgacttgtttggccttttgtgctaaagactaaacagaggttttcattagaaaggtacaaaaaagtctgagcagccacccaccctcaacagaccatcagtttcctggggcagaggccccagcttatttatctccatatttcatgcacctaagtgcaatcagcaggtgctcactagatggtgatctacacggcatgtagatcaagatggtggacaggaaaacgctgccaaatgacttgatcctgcttctcctatgacggaaacatttggaaactcaggaatcagatttttttcctattcatgccacaaaccaccatacctgcagctacacacagcaccagcctcacatttgaatttgccattaaatttgccagtagctttgaaaaatatctcttgacccagtccatttctgtctccttctgtaatgcagctaatgcgacctcatttcttcctgctaaaatagcaacctaaaagcactaagagttaattccacataattcatttcttcaatacttcagatttttgctatgtttctaaaagctacaatttcatccaatttaaaaattcttccagccgtaatttggcccttctcttcccacgtctaacttattcacaggccatgtaacccaaaaaatcatctcttagggaacattataagaattaagaaacagtcaagagtaaaacttcaagtgttcaggctgaacgccttgctcaggtttacacgatgggtacacgagatagggggaaccgaacagatggagagatgagaagaacaggaagtgtggggccctgggcccacaacggcaggaggaaaccatctcccctcccctcaaatacttttctttgcagaaaatgagaattttttttaaaaaaaaacctcaccttctatacatggtaaagagcctgcaaattcacctctctagaaacacagtgttaggcagaccaagcaccaggtggcggagagaaatggctggcattgtgggataatctttcagtttctagaggaggtctgaggcatgataactaaaattacagagctgctttcaggtcagaaaatgaagtacaaagtgtgtggtttttttttttttttttttctttttgagacagagtcttgctctgttgcccaggctggagtgcaatggcgcaatctcggctcactgcaacctccgcctcctgggttcaagcaattctcgtggctcagcctcccaagtagctgagattacaggcatgcaccaccatgcctggctaatttttgtctttatggtagagatcaggttttgccatgttggccaggctggtctcaaactcctgaccttaggtgatccacccgcctcagcctcccaaagtgctgggattataagcgtgagccatggcacccggcctcaacgtgtggttcttacggtgacaaggtagtttccaaatggcctcttttacccctttctgtgtgacatttgctaccctggccaaacaccacattcccatgtgacgggagaaaggaattccaatgccatgaattcagaagcgatggatggagtgcagtgtgctcttgtgtttttacgtggctacgaggcgctgctgctgggtttcctagttcttttgacctagattttctgcttcctcccttgccccctcagcacacacatacccacatgtccttagtgacaccagcagtcacatttgatgttagaaactataaagttttctgttctcagcaatctcaaactcaaatatgggacacacttttattccttcagaataaatgactaaattcaaaacatacacacataatgctttaaagaacgtataaacccttccatgtcctattcagagctggaggcctccctcataagaataccacatttgatggaattgtattttttgaaaagagtctacactttctgaaggactttcaggtaccagggctcatttgatcctcacatcagctctgtgaggtgctaggtggctattattatctccatttttcaaatggctgattgacttggccaagatcacatatctagtgatggagccaagctagaaaccaggtcttctcgttcccaactcacaacactgtccccttccttccaccttggagtgatgttagaaataggtcatcatctccactcaagcacttagttctttccattatcttcccatcttcttttctgggagaaagaagcccaagggccctgtgacttcaactccacccactttctgatgactctgaaaccccaagccccaaccttagcctctctcctgggtccagactgacatatccagctgctccctgagcttttcttcttagttgaagaattcaactcacagtcacccgcatgcaatctgaagcccatgagccctttctcagccctgcctcctctcatgtatcttctatttctgtaaagccgtcaccacctactcagtctcccaagccagaaatccagtggcatcccagagtcctcctctcccttagcttccaagattggtcaagaaatcctgcctgtttgcttcctgaatttctctaaaatatatcctcacctcttcttagcctaggccctatcatctcttgactggaggcctgcgctcatcttcctgcagtttttctgccgactttagccttgcaatctatcttcacattctgatctctgatacagagctctgtcgctctctcgctctctcttaattagagacagagtctctctctgttgtccaggctgtagtacagtggtacaatcagagctcactacagcctttaactcctgggctcacaccctcctcccgcttcagcctcctgagtagctgggactacaggtgcgcttccaccacgccttgctaagttttatttttattttcatagagacaaggtctcgctttgttgcccaggctggtctcaaactcctgggctcaagcgatcgtccacttgggcctcccaaagtgctgggattacaggcatgagccatcgcacccagccagagctctttctgaactctaattcttactgttacttccctgctcaaaatcctttaagggctccccctacatttcaagatattcacagtctacattccagccacctggaggcatttcattcccagaacacaccacacctcctcagagctgaaggaggaagtccattgccatctgacttggcctcagtaactcctttcgttgccaaggcaagtggtctctcctctacatatggatgccttttctatctatttctgctttcttctttatcatcacacttctatcagttaagatattttcaggagcaagaaacataaactaaaaatggcttaaacaataacaaagacttgtaatttctcaaagtccagaagtaggaaggctcctgggtatcatctaattcagcggttcagtgacattatcagagttctttccatcttttgctctgctatccttatttagaattattgttctagtctatatcaaagacttaaaaaaaattttttttttgagagaggcttgctctgttgcccaggctggagtccagtggcaagatcacggttcactgcaaccttgcctcctgggttcaagcaattctcctgcctcagcctcccgagtagctgggattacaggcatgtgccaccaggcccggctcctttttgtatttttagtagagatggcatttcaccatgatggacaggctggtctcgaactcctggcctcaagtgatctatgtgccttggcctctcaaagtgctgggattacaggcgcgagccaccacacctggcctcagactttcaaaacattctcagtggcggtgtcaaatattttgtcttttaatggtgaatctcattttttgagaaaccagaagccacatacagtcaagtctggtgagtaatatgagtaactgaggtagacaataacatttggggtcacagtcaaagtcaggccacagagtaacaagacagaacttttggttttgtttgggatctggctttaaaagcaagtttagaaaaggcatcccaagtatcttgggttccagccaaatatctgtgaaatacacagcatgtgaacacaaagagttactgtttccaaagctggccccactgggatgtttaagttttaatctgcctgtttaaaaaacaataacaaattgaatttttgaaaagtttcctgggcctggtggctcacgcctgtaatcccagcactttgggaggccaaggcaggtggatcactaggtcaaaggatcaagacagtcccggccaatatggtaaaaccccgtctctcctaaaaatatgaaaaattagccaggtgtagtggcgcatgcctgtaatcccagctactcaggaggctgaggcagggggatcgcttgaacccaggaggtggaggttgcagtgagctgagatcccgccactgcactccagcctggcgacagagcaagactctgtctcaaaaaaacgaaaaacaacaacaaaaaaaagagaaaagtttcctggttacctggaagagaaaaaaaaaaatacaccgtggagtaaccattcttccttcccaccatctgctgagatgaggaacttaaggtgctaactgggacaaatgaatttccaaaatagaaaaagggattcagggaagtccttgagtgctgaatttgggaggccaagccacagtggggtgacatgagtggacggcacaagtggacagaaataacctggggtcaggagaagctgactccaaaggtaaacccacggctcctccacaggcctggggtaaatcctagaacagctgttgagttctttcaacttattaacatattttcctctaagtccaaaagggccttctttgcctggcagcccctttctcttgtttttttggtgtcctccctccaatgtctttgtctttccttttcttccatgtagattttaagtaaccaagaggagtggtttaaggcggagcttgggagccaggaaggatatgtgcccaagaatttcatagacatccagtttcccaagtaagtatctgcagcctgctgagatgggcctagccacacacactcctcttacatttccagcagtcactacagttatccatgggaacccaagacattgtcaaaaatggctgcctctggagctctctccggagagcctccagagcatgcagctgaaggccagggcaggagggagactttgcatttcatttcattcccttttgatgtttacaccatgtgcatgtattgctattttaagttgttcttaactttttttttttttttttgggagttggggtctccctctgtcacccaggctggagtgcggtgactccatcaccactcactgcagcctaaaactcctgggctcaagccatcctctcacctcagcctcccaagtagctgggattacaggcacatgccaccacgccaggctagtttttgtatttttagtagagacagggttttaccatgttggccaggctggtcccaaactcctgacctcaagtgatctgccgcctcagcctcccaaagtgctgggattacaggcgtgaaccaccatgcctggcctattttaagttttgggtttttttgggtttttttattcatgtgtttatttgttttgagacagagccttgctctgttgcccaggctggagtgcagtggcatgatctcggctcattgcaattctcctgcctcagcctccctagtagctgggattacaggtgcatgccaccacacccagctaacttttgtatttttagtagagatggggtttcaccatgatggacaggctggtctcaaactcttgacctcaggtgatccacccgcctcggcctcccaaagtgctgggattacaggtgtgagccactgcacccggcctattttaagtttttataaaatgagtttgtaaactcaaattatctatagtgatttcaatcacggcgttccccagaattccaaaggggacgctattggccaccccacttcgggagctgctctcctaagcgcttctctgtgacctcctaatcctaaccatcctcaccaggctctcacccttcactcggtgggtggacagacactccctgccttcagtaaagcatgctcaccccaatgagagaagtcagcggggggaaggggaaattctcttcctaaagaggaaatgaaaaattgagattgggcttcgtttgtctcaagaattgaccacaagggttagatagaaatctaatcttgcctcagaaccagggtctagctcaaagagcaaaagcttgttagaaaaccacagtagtattggtgactccagcaaggtgcaagagcaccagtcttggtaaacctgaactgaccaccaaaccaagagaatgaccactgaccttgacggaacccttgatgctgcccaggaatctgctaggtgacctctgcataccccacctgctcctcaaaccttcagcccctccgtgcatcactcttagcccgtgaccttgattccaggttctctggaacaatgaaagccaccagaagtgaagctcccagacccccctcccccaccgcatccacctgcctcctgcaagtgtgctcaaacagtcggcctttcctgcagctggctggaaggaactgtcactgcttctagcagaaattctcctctctctctcttccacgtcaacctcctttccctctctgctggatcattcctgtcagcaaacacacacgctgcaatttctcccaacttaccaaaacacaaacaaataaaaccaaacccagaggccaggtgggttttgttgtggctgatgcctgtaatcccagtcctttgagaggctgagggaggaggatcacttgtggctaggagtttgagaccagcctgggcaacatagcgagccccatctctacaaaaaatttttaaaaattagctggtcgtggtggcatgcgcctatagtcccagctgcttgggaggctgaggcaggaggatcgcttgagcctgggagttcaaggctgtggtggaccatgattatatcactgcactccagcctgggcagcagagagagactctgtttcaaagaaaaaaaaaatttaaataaataaataaatcaagaaaattcttaatcccaaatccccttccacttgccactccatctcttcaaaaggagtgtgtgcatttgctacttccaactcctcatctcccgacccttcccaccaggctccccatgggctgtagctcccaggggtcatctcagcatgacctgccctggggatcccccctcccactggaacacctctttcattttggctccaggacgtccttcctccggttgtcctcccactgccctggcttctcctcctcagtctcttgtgttggttcctcccactccccagtcccctataggtttagaatgtctccttttcagtgaggtctttctcatcaccataccttacattaatctcccacccacagcgccccatctctcctctcagttttcatgttctccacagcacttaccatcatctggcacgcttcagatcttaattattttgttcttttgtgtgtgtccccctcgactagaatgtaagctccctgagggcaggggtgtgtgtctgttctgcccactactgtgtccccagtgcccaggaggggcccagcacagtactagatgttcagtaaagctgttgaatgaatgaatgaatgaatgaacgaacgaatatgtattattgaaaccatgaccactcatgtctaatatgcaatgtgtggtgatttttacaaatctttaaagaagccccctatcagattgcagtcagaggacaaatgtgtatttcctaaatccccttcacttctgaaatgtttcctttgcgatatggctgctgtggtgcatactccattcctcttcccatccccattacatttcccacacgtggcagtggtgtgtgtggtggcctcttgtttagccctgtagaattgtgtggcaaatactcaggcagaatctccaggccaccagaaactgctgctttcagccctctcagagcacagccaaacttccccctcagtcccagtgggggactcagtctccagtaagtacatccttcctgctacctatgtctcagtttcccaaattctagaaagcacagagaattgctcacaaaggaatccaaagccaaggcctgacgggcttttatcttaaaggaacatgcgtatgagccttctggtgacagcaattagagcagccaccttgaagcaatgtgacacagtcccacctttggccgctgagtgattgcagacactcattttgcttgtctgtggtggagagaggtctctggcctcctgctttgaggctgcagccacagcttgcctggccctgtgtaagtgtttgacctatttcatacatgccacgctgtatgcagctgtacctccaggggctgccaccctgaccattctgctaaaagagtaatttctcctgtttcttcttttccacagtaaagattatttcccagcctggatttttggggcaggcccaggatctggttgtatagacgccgctctctggcggctgccagcctcgctgatttccaagcatgtacactggactccctaggaacactgcagcctctgctaggcacactgagcaaagcccccttgtgctccatgccagcctaggtaacgtgacgccctgggctgtaactttcctttaatacccagggaggaacctctaggccactgagacctcagggcaggcatgagcaccccaggccctgctcagccggctgcacctggttggctccagtgcctgaagccttcccttccctccccagtgcatcctctgtcctcgcagctctggtctatctcttccgcagctgccggcaggcggctgcttcctgcagtgagtcactcccacactgccccattttggtgcagcgacacatttccatgattcgtttcccaggctggagagagacttctcctggagagaaggaacaaagagggtgaatcaaggggaatgctccctcgcctttcctgaaagctgcctggagcactggtttgatttcaaacagcacctggtctctctctgctccctactgtacagagtccccagcctctttccctctgggtcacctcttctccacgtctccctcttgtcactcctgtgtctcatcctgatccttttgtttgatctcgcccccacagatggtttcacgaaggcctctctcgacaccaggcagagaacttactcatgggcaaggaggttggcttcttcatcatccgggccagccagagctccccaggggacttctccatctctgtcaggtactgaccattcctgacactgccttggcccttctcggcctgttaacctcacagaatgctgaagccatgaagggacctctggaatatgacccaatggtcagaagcatggtggcctaggggccaagcatggcagcagcttcacaacctgctgctcccagtgccttcccaaaacatgcacacaccactctttagaacactggtgtgtgtttgaaattatttctacgcccatctgcctccccttctagcccaggtgcttctggaagggcaggattttcctctacttcatctttatgcctttaacagtgtcttgcataaaagagagacactcagtgagtatttgtggaaggaaggagggataggaggaggagaactcccacttgtccagatccatctgggggtttaaatcttaaccttttcttttatgattgatgcatatctgaagaagagtcagagaaaaatagaaatctcaagtcactgctgtaggatatacaggggcggaaaagttgtggcacctttctttgcccatcagaggagtcacagctgacactcctacaagacaggttaacaagaggagagtggacacatttatttaatcaaagacttgtgtgacacagaagccttcagaaatgaagacccaagacccagggaaagccgtctatttttatgcttaggtttgtcaaaggacagacagccctgtagaaatgggattggacaaagggggtttgatctaaggtaacagactgaggtaggaaactgaacaaggcctgtcccaagtcttctttttttttttttttttttggagacagctgttgcccaggctggagtgcagtgacgcaatcattgctcaccacagcctctgtgtcccaggctcaagccatcttcccacctcagcctctcaagtagctggggatacaggtgcacaccaccacacctggctaatatttttttaacttatttctttgtagagactaggtcttactgtgttgcctgggctgatctcaaactcctggcctcgagtaatcctcctgccttggcctcccccatagtgacccttctagtctctctgacccactgtggggaagaggaattctaatttctatgactcactcagggggagaaagaggagcgggagacaggagggcaggagaaggccaaaggaagactttgcttccaaggctgcttctgaaaccttcccatctcctttggttcgaagcactcagcatgccaaggggtgtcgttttctgagccccaacaaatacatgtatagttgtaggcagctgaacaaaaagaaaggctacttcaacacagtacagtacagcaagaccgaaaaccacagaacagagggccaggagtgggggaggactgtaacagcgaaatctcactaaggtgcagcaacccataggaagtgactcagtccacgcgtagacattacacagccccaaactcagaagcccagttcggaacacactgtgtgtggtcagcatgttgaggatcgcaagtcacgtatcagacttcaccacatgtgaaactgcaagaatataatgctgttagcagatcaggagaagtacagcaaaaccttactgtcaagttattggcaggaaataccgatctggtttattcaatatattttgaaaggcataaagctttgttttaaggacagaaatccaatctcaagtaataaactgtggccactttgctgtttagaaagaatggatatttgaaaggataggtaggaaggacttaaaaataacaggtcaacaatttgtatgcatacatacctttaaagtggtctctttagcattgcccttgcaatcttgcttaaactcttttcttcagtaaaaactttattttcatagcttggagaatggttaactttagttcaggccaatattgatgtatcacaaattctaatcttgttaggtcttaattaatgaaatttcgctccattaacatatattacaagtcagggttgggcgccgtggctcatgcctctaatcccagcactctgggaggctgagttgggaggaatgctttaagccaaggagttggagaccagccggggcaactagtgagacctcatctctactaaaaataaaaaattaacccagtgcagtggcgcatgcctgtggtcccaactacttgggaggctgaagttaaaggattgttggagctgggcggttgaggttgcagtgagccaagatcgatcgcaccactgcactctagcctgggtgacagagcaagaccctgtctcaagagaaaaaaattatttacatatattatatacatatattattagaaaaaacaattatacatatatttaacatgcgtgtatatatattacaagtcaaatctatttcttaagcctcccctctttaccccatcataaacttgaccaagtaatttgttagactgaggggtatctcttgggcctttggtttgcatgaagatgactctggctttttcagctagaaactatggtttttgtggtttcgttggttttttgagacagactctcgctctgtcgcccaggctggagtgcagtggcgcaatctcggctccctgcaacctccgcctcccaggttcaaagcaattctcgtgccttggcctcctgagtagctgggaccatgggttcgcaccaccacgcctggctaatttgtgtgtgtgtggtttttttcagtagagacggggtttcgtcatgttggccaggctggtcttgaactcctggcctcatgtaatccacccgcctcagcctcccaaagtgctaggattacaggcgcgacccactgtgcccggacccagaactatggtttatatttccttaattaaagtgagttctacaaaacagtaggccttgacttctaccgaagtcttcccctgatattcaggcgatgaagcttctagttatggtgacaattaccgtaatccttatcacgtctttgcagaaatgtagtataatattttccaaagcaaaatcattattaattatttttacatctgtcatgggcacagataattaagagctaattgtagttctatcactcagcatttgttaagggcctgaaacaccagattttggagtccagcgccctgagtcgcatcctttcctttgttcctcttcaggcttgagacaatggtcaggccatcctctccttgtagacccagataaccagctgcaaccctcacacccatccttacagcttatgagagtaaaagggtcaatgtttcacactctgagttctttgaggtggtggatgaaaaattataatatcacaagaatattttctcctcctcacctggatgtgaaggataatgactttgagttgatccatgttgtcttagaatgaagaaagtatctgttggtggccaaaaccaaggggaagaccacaaagtgattgcaatatgttgattaccacccgaaatcagtcaagcaagaggccacttgtacaacctgtggcttcacccagctatgagcaaatcccagcacataagatgagattgagggtcagaatttccatctccttcttaacacaggtccctaaatccatccctaagaaacctccatggtcaggcgcagtggctcacgcctgtaatcccagcactttgggaggctgaggtgggcggatcatgaggtcaggagatcgagaccatcctgtctaacacgatgaaaccccgtctctactaaaaatacaaaacttagccgggcgtggtggcgggcgcctgtagtcccagctacttgggaggctgaggcaggagaatggcatgaacctgggaggtggcgcttgcagtgagcagagatcacgccactgcactccagcctgggcgacagagcgagactctgactcaaaaagaaacctccacttactctcagaggtatctttactctccgagaccctttaaaattcttgacctttcttttacatcaggcaattggcatcactagtgccagtttatttttagatataaatgtatgtctgtttgaaaaataaactttacatccaaaagagaatgacttggcaatgaagtaaaactggatctaatggtaaaggctcagcccacccttcctagatggataaaatccattttctctagccctggttcgaatgtgtcccatcacttgtgagtccagactggcaacaaaaggtgctgatctaaaagaagttatcgtccagtggcagggtctggggaaggggcggcaggcgccatgtccagccacgaaggtggcaagaagaaggcactgaaacagcccaagaagcaggccaaggagatggacgaggaagagaaggctttcaagcagaaacaaaaagaggagcagaagaaactcgaggtgctaaaagcgaaggtcgtggggaaggggcctctggccacaggtggaattaagaaatctggcaaaaaataagctgttccttgtgcctaaggagacggtgaccctttatttcatccgtatttaaacctctctattccctcctataatatcttttgccacctatagttggaattaagtgtcgtcttggagctgttgtacatttaagaataaacttttgtaaaaaaaaaaaaaaaaaaatcttccagtggctcatcatctctttagttgttttcactaagtcattcctaccataactgtgaatttaaagtaaaaccagctcagaatcttgccagaatctgctctttggtcgttgttctaccctaaactttgtatcacctgaaattaaaccaactcatttgaaagaaaaaagaagttatcatgtttaggtggcgtgacaggccaagctcactagactggagtcagagactcagggttctggcctcagcccttactcagcagtgaccttgaccaagcccctgcacctctgtgagcctcagtgtcctcatctgtaaaatggagaagtaaggctaaacaatctccaacatccttgccaattaaaactctatcatttcacagggcgcagtgcctcacacctgtaatcccagcactttgggaggccaaggcaggtggatcaccggaggtctggacttcaagaccagcctgaccaacatggcgaaaccccgtctttactaaagacttggtggtgggtgcctgtaatcccagctcctcaggaggctgagacaggagaatcgcttgaacctgggaggcggaggttgcagtgagcagagatcacaccactgcactccagcctgggcgacagagtgagactccatctcaaaaaaacaaaacaaacaaacaaacaaaaactctgtatttcatacaaagctatttcaccaaaagctgaaaacactttgtaaccttatttatgcaaaacataaaccaagatcaagagatccttattacatagagaaaaaatgtgacatatttcttaggaaagagagtagcttcttacctgccagtgctagcttatgggcttaaaggagatggttcaaagaatttctggtaacagaaagataataggagcttgaaatacccctgttgacatcttgcgaataaacattgtgaaaaggtctttgatctctttgtcgttaagtcacttggaacatgcttttcttgtaaaaggttagttccagtgtccaaaacaaattttagctcatctgattaccttctgctgatgtaaatcccgtctagcatagcctgtatcctaagtggtccatcctacaaagttcctgccgaagcctgactgggctggcccacctgcccagtgatgagtgagtcatccatatctacatctcctgctcaaagagaactccaccatcccagatgtgagcagcctggaggtggtgacattatcaccgtgtaacatacaattttgttttgccttgatctccaggcatgaggatgacgttcaacacttcaaggtcatgcgagacaacaagggtaattactttctgtggactgagaagtttccatccctaaataagctggtagactactacaggacaaattccatctccagacagaagcagatcttccttagagacagaacccgagaagaccaggtatgctccagatccagtcgaccccaatctagagattttaggcagcctgagttctcacatgaaccaccaggaaaaatgcataggatgggtagatcctctgagtatactgaaagacagagctcagagctctgaggtcagatctcaacttaacacttcctagtcgtgtgactttggaaagttctctgcgcctcagtttcctcatccataaagtagggacaatggtaatatctacctcccagaatggctgtgaaggttggagaagataatgtatcccacgcctcatgtcattcctcatcacactgcgctcagcaagcatcagctcttaccacaggtgctgtttttttgttattcatagacattgctacaccaaagttttcaacctagctcaagagttgcccaaggatgaaggagttgggggtgctacagacagggacattagggaacagcctagagttcaggagttaaatcagcatgtggagttttatgatgggattgggggtagggaggacatgggaggagaaaactgcacttggaattattgctgttgcaactgtttgcaatacagactattgctttaaaaggaaatgcgtcagacagacctggtatgaaatcctgctttaatcgcttagctacctgtattacctagccaagttaagaaaccatctgagtatcagttttctcatctgtagaatggagagagcaataaaacctccctcactgggctgttgtgaggattaaatgacttaatacagctaagcactaccagagtctggtccatattaagcactaagaacatgttaacttgcctcccataagtaaattcacacatgcacacactcacacacacacacacaccaatttatgaactatttttcaaaggaaataacatggttataagagacaggtatcataggaagaagcattcactagaatagctgaaatcctagggacaggttatttgaaaagatattgagactgtgaaagcaatgtgtgctttggggaagtcaagaaaatcctcctttttcgagtccctagttgcttttaagcctgagaagttactgccaaaggagaaaagaagttaccaccaaatgcacacagaagttcagaaaggaaaacaaaggctagccaagaccttgtgaatcactctaaccaggaaacggacagaggtattaactcactaggatgggcattcagagaagcaatataaaattgcattaaatgggattaaatgagttgatatttgtaaagcgcttagaacagtgcctggtatatgctgccctcagggtcctacataattgtttgttaaatgaaactaacaatacggtatttctgatttgtaaggttgttgtaacattagggaaaaaggccttacttcttcccccacgcccagcccggcggcaggcctggttcccatggtgttgcaagaatgttgctgtttgggtctctatcaccaggctgtaaatgacagttcaaaatcatgcaaagtcaacagtggagcttatctggagggtagattgtccagtggtgtggcaacatgtgataagaaggggtggcattgtatcagtaaaatggaatatttcagcttgattacacagagaaaaaacgagcgccctagaaatggactaaatggctaccaggcaaaaagtgttagtctgtgaaccagagacctgcactcctaaaactgggaggatctgagaatgcagaggccactttggaaaatgtgaaggtctaaagcatcaattatcttttagctgcccccaccccaccagctatttcttggagccagatgagcagggtctgggaacaactgcccgagggtagggtagggccagacgatcagagaggaggatgcatctgcagcatctctgttctttctcccagggtcaccggggcaacagcctggaccggaggtcccagggaggcccacacctcagtggggctgtgggagaagaaatccgaccttcgatgaaccggaagctgtcggatcaccccccgacccttcccctgcagcagcaccagcaccagccacagcctccgcaatatgccccagcgccccagcagctgcagcagcccccacagcagcgatatctgcagcaccaccatttccaccaggtatctggaaagaaggcagtgggcacagtacggtggaaaggagaacctgcctcccctccaggcctggcccagcctcttgagttctcagagagttcatgatgaagaccctggacccccgcaaatggcagaaatagggaaactgttcttggcaaagacatctctatgaattaaatggctcccacctgaacacacacacacacacacactgtctcacacacacacacacacttaaactcacacacacacacacttcccctgaggacccagtaaacaattgcttcattttcctatcagcacaattccaaatctattcatgccccttagcccatctggctgtcagatccacaagagaaaaaggcttaatacccacaacagagccttgtttattacttatttatctccctccacccttgttcccgatgggatttcaggcggcttactgagatggacaatacggccagataacatcattcctgaattccttagcagggcacacaaagtcctttgtgagctgccagaatctatttccccagcctcgtccctgctgcctccctgccaactccccgtgcaaacacacattccagcaaccccccacgctgccttagttacccgaatggtccattgcgtttcctctcatgcctttgtggcgttttatatgctgatctctctgcctgatgagcccctccctgggcagtcctacccctctaagctggagttcaagcatgacctcctctgtgaagccttccttgatttcccgggcagatacagacatttcttctctctgctcacttaccacttaaatgtgcatggttccccctctaaatggaagctccatgaagccagagaccttctctttccagctatatttcccttgtgtctgctactggaaacatggtaggtgcctgataaatatttcttgactgaataaataaaacctgcctttgccttctttgccttcagaatctaaggtgcctttagaccttaggtcctcctcaacgtggagggtttattgtcattatcagtaagtattcctggaatataccggctctgtggatggcatctgagcaaggcactgggggaaccggtgggagatgtcctggcagtggggtgaccagtcttctgttgtatgtttctaggaacgccgaggaggcagccttgacataaatgatgggcattgtggcaccggcttgggcagtgaaatgaatgcggccctcatgcatcggagacacacagacccagtgcagctccaggcggcaggggtatgggaactgtccttctctgggatccctggggaaaggccttgggacagaggtcaatggaggagatgaggcaggagagactcaaaccacacagatctggctgggcacggtggctcacacctgtaatcccaacactttgggaggccaaggcaggtggatcacctgaggtcaggagttcgagaccagcctggccaacatggtgaaacctcacgtctactaaaaatacaaaaattagccaggcatggtggcagatgccagtaatcccagctacttgggaggctgaggcaggagaattgcttgaacccaggaggcagaggttgcagtgagccgagattgcgccattttactccatcctgggcaacaagagcgaaactccgtctcaaaaaacaaaacaaaacaaaacaaaaatgcacacacagatcaacgagaggtgatggaatgtttggggaggcctggggctgagccagcaccgtccagtctgttgatctcagtctggtgccaggccttccctgttctcatagttctcagttctagttctttatcatctttatcatagtcctttaccattgcctttatcattgcatcttttttttgttttttgagacagggtctcactctgtctcccaggctcaagtgcagtggcacaatcatggctcactgcagattcaaactcctaggctcaagcgatcctcctgcctctgcttcccaagtagctaggtatattatttgtagcgataagctcttgctatattgcccaggctggtctggaactcctgggctcaagcaatcctcctacctcagcctcccacagtgctgggattacaggcatgagccaccgtgcctggcctgtgatccatcttgacttgtgacttgattgccctaacaccaagggctgttgtttggggcatgttgcccttctgtttgtcactcaagataaaaataccacctattgatgtggagagagtggttctcagggagtctattggggctttggacaataacatctgttggtaaaagtcctgggtctccagagtgacgctggtgcgttctgggaacttcttgctcaggcctgtgcataggtatctgatttaaattgcagcagggtagccgggcatggtggctcacacctgtagttccagctacttgggaggccaaggcaggaggacttcttgaggccaagggttcaaaaccagcctgagcaacatagcaagaccccatctctacaaaaaaagtttttttaagctgcagaggggtcagccttcagggaatgttgctctcaaagacttggatgtggtgggaggagccagcagaccctcccctgcctgcccagcccacagctcagcagagcctcttctgtgcttcccccaacagcgagtgcggtgggcccgggcgctgtatgactttgaggccctggaggatgacgagctggggttccacagcggggaggtggtggaggtcctggatagctccaacccatcctggtggaccggccgcctgcacaacaagctgggcctcttccctgccaactacgtggcacccatgacccgataaactcttcaggggacagaagctttttgtctggagctgcccacaagaaagagggcaaggaaaaaaggctggactccatgactatatatacatacatctatctacatctgcctgtgtacacacacaactttttatactagtaatttattggcaattgggctggtaattagttgatgcaaaagggaactcaggtggagaataatattgacacttgcttttctgcccccctcaggggtgtgtggaaggcagtgggggagttgggaggggggcagggaaatgaaatggagttttgtcctggccttcagctgtcactgcttcctccttgtcttgggaattttcacggagaacagctaagcagagaccacacctcggcactggacacagaacaacagggtggggttgaacttggtggggcacgttctagctgacctgcaagccccgctcacctggagggcttgcagagcagctctcctcctgttctccaaggggtgggcactgttgcattaggaattaaggtgcagcccagtgctgcgggcagccaagcgagtctgagcggggatgtgaaggcaggacggggttggagagaccctgcctgtgcaaggctggcctcctagtcaacacctagctgagacattcatctctgttcaaattaatattccttgggtctttcaaatgaatgtttcaatgtgaggagcgaagtactgggaaatcgagggattttccacaatccccaagcagcttactcagtggaacctctgtttccccagctatgaaggaaatagcatcctaca

SEQ ID NO: 400 - DNA, 899 bp, Homo sapiens
acagactgcagggctgactagggttagtttggaggagggagtaagaggtggggaggaggaggcacagttaatggatctgtaaacttgcaccctctttcagagtggtacatggaagacagcacaaagtggatccatactctgaaatgcagtaactctgatgcttgaatttgtctcccttcttgccagaaaggattctaataactcggtgtcaaagccaagacataaactcaaccccttctcttccaaaagcttcacgttacagcatggaagctgttgccaagtttgatttcactgcttcaggtgaggatgaactgagctttcacactggagatgttttgaagattttaagtaaccaagaggagtggtttaaggcggagcttgggagccaggaaggatatgtgcccaagaatttcatagacatccagtttcccaaatggtttcacgaaggcctctctcgacaccaggcagagaacttactcatgggcaaggaggttggcttcttcatcatccgggccagccagagctccccaggggacttctccatctctgtcaggcatgaggatgacgttcaacacttcaaggtcatgcgagacaacaagggtaattactttctgtggactgagaagtttccatccctaaataagctggtagactactacaggacaaattccatctccagacagaagcagatcttccttagagacagaacccgagaagaccagcgagtgcggtgggcccgggcgctgtatgactttgaggccctggaggatgacgagctggggttccacagcggggaggtggtggaggtcctggatagctccaacccatcctggtggaccggccgcctgcacaacaagctgggcctcttccctgccaactacgtggcacccatgacccga

SEQ ID NO: 401 - protein, 212 aa, Homo sapiens
MEAVAKFDFTASGEDELSFHTGDVLKILSNQEEWFKAELGSQEGYVPKNFIDIQFPKWFHEGLSRHQAENLLMGKEVGFFIIRASQSSPGDFSISVRHEDDVQHFKVMRDNKGNYFLWTEKFPSLNKLVDYYRTNSISRQKQIFLRDRTREDQRVRWARALYDFEALEDDELGFHSGEVVEVLDSSNPSWWTGRLHNKLGLFPANYVAPMTR

SEQ ID NO: 402 - DNA, 2044 bp, Homo sapiens
acagactgcagggctgactagggttagtttggaggagggagtaagaggtggggaggaggaggcacagttaatggatctgtaaacttgcaccctctttcagagtggtacatggaagacagcacaaagtggatccatactctgaaatgcagtaactctgatgcttgaatttgtctcccttcttgccagaaaggattctaataactcggtgtcaaagccaagacataaactcaaccccttctcttccaaaagcttcacgttacagcatggaagctgttgccaagtttgatttcactgcttcaggtgaggatgaactgagctttcacactggagatgttttgaagattttaagtaaccaagaggagtggtttaaggcggagcttgggagccaggaaggatatgtgcccaagaatttcatagacatccagtttcccaaatggtttcacgaaggcctctctcgacaccaggcagagaacttactcatgggcaaggaggttggcttcttcatcatccgggccagccagagctccccaggggacttctccatctctgtcaggcatgaggatgacgttcaacacttcaaggtcatgcgagacaacaagggtaattactttctgtggactgagaagtttccatccctaaataagctggtagactactacaggacaaattccatctccagacagaagcagatcttccttagagacagaacccgagaagaccagggtcaccggggcaacagcctggaccggaggtcccagggaggcccacacctcagtggggctgtgggagaagaaatccgaccttcgatgaaccggaagctgtcggatcaccccccgacccttcccctgcagcagcaccagcaccagccacagcctccgcaatatgccccagcgccccagcagctgcagcagcccccacagcagcgatatctgcagcaccaccatttccaccaggaacgccgaggaggcagccttgacataaatgatgggcattgtggcaccggcttgggcagtgaaatgaatgcggccctcatgcatcggagacacacagacccagtgcagctccaggcggcagggcgagtgcggtgggcccgggcgctgtatgactttgaggccctggaggatgacgagctggggttccacagcggggaggtggtggaggtcctggatagctccaacccatcctggtggaccggccgcctgcacaacaagctgggcctcttccctgccaactacgtggcacccatgacccgataaactcttcaggggacagaagctttttgtctggagctgcccacaagaaagagggcaaggaaaaaaggctggactccatgactatatatacatacatctatctacatctgcctgtgtacacacacaactttttatactagtaatttattggcaattgggctggtaattagttgatgcaaaagggaactcaggtggagaataatattgacacttgcttttctgcccccctcaggggtgtgtggaaggcagtgggggagttgggaggggggcagggaaatgaaatggagttttgtcctggccttcagctgtcactgcttcctccttgtcttgggaattttcacggagaacagctaagcagagaccacacctcggcactggacacagaacaacagggtggggttgaacttggtggggcacgttctagctgacctgcaagccccgctcacctggagggcttgcagagcagctctcctcctgttctccaaggggtgggcactgttgcattaggaattaaggtgcagcccagtgctgcgggcagccaagcgagtctgagcggggatgtgaaggcaggacggggttggagagaccctgcctgtgcaaggctggcctcctagtcaacacctagctgagacattcatctctgttcaaattaatattccttgggtctttcaaatgaatgtttcaatgtgaggagcgaagtactgggaaatcgagggattttccacaatccccaagcagcttactcagtggaacctctgtttccccagctatgaaggaaatagcatcctaca

SEQ ID NO: 403 - protein, 330 aa, Homo sapiens
MEAVAKFDFTASGEDELSFHTGDVLKILSNQEEWFKAELGSQEGYVPKNFIDIQFPKWFHEGLSRHQAENLLMGKEVGFFIIRASQSSPGDFSISVRHEDDVQHFKVMRDNKGNYFLWTEKFPSLNKLVDYYRTNSISRQKQIFLRDRTREDQGHRGNSLDRRSQGGPHLSGAVGEEIRPSMNRKLSDHPPTLPLQQHQHQPQPPQYAPAPQQLQQPPQQRYLQHHHFHQERRGGSLDINDGHCGTGLGSEMNAALMHRRHTDPVQLQAAGRVRWARALYDFEALEDDELGFHSGEVVEVLDSSNPSWWTGRLHNKLGLFPANYVAPMTR

SEQ ID NO: 404 - DNA, 1970 bp, Homo sapiens
ccggcagctcttcctgcaaacacaagcccttgttgtgtgcctgagccttgctctccggcctggagacatccatctgcccactctcctaggaactgctgattaccaggaagcaccatcggctctgctgccctccccctggcagagaggcacaatgaccacattatttctcttccagcttcacgttacagcatggaagctgttgccaagtttgatttcactgcttcaggtgaggatgaactgagctttcacactggagatgttttgaagattttaagtaaccaagaggagtggtttaaggcggagcttgggagccaggaaggatatgtgcccaagaatttcatagacatccagtttcccaaatggtttcacgaaggcctctctcgacaccaggcagagaacttactcatgggcaaggaggttggcttcttcatcatccgggccagccagagctccccaggggacttctccatctctgtcaggcatgaggatgacgttcaacacttcaaggtcatgcgagacaacaagggtaattactttctgtggactgagaagtttccatccctaaataagctggtagactactacaggacaaattccatctccagacagaagcagatcttccttagagacagaacccgagaagaccagggtcaccggggcaacagcctggaccggaggtcccagggaggcccacacctcagtggggctgtgggagaagaaatccgaccttcgatgaaccggaagctgtcggatcaccccccgacccttcccctgcagcagcaccagcaccagccacagcctccgcaatatgccccagcgccccagcagctgcagcagcccccacagcagcgatatctgcagcaccaccatttccaccaggaacgccgaggaggcagccttgacataaatgatgggcattgtggcaccggcttgggcagtgaaatgaatgcggccctcatgcatcggagacacacagacccagtgcagctccaggcggcagggcgagtgcggtgggcccgggcgctgtatgactttgaggccctggaggatgacgagctggggttccacagcggggaggtggtggaggtcctggatagctccaacccatcctggtggaccggccgcctgcacaacaagctgggcctcttccctgccaactacgtggcacccatgacccgataaactcttcaggggacagaagctttttgtctggagctgcccacaagaaagagggcaaggaaaaaaggctggactccatgactatatatacatacatctatctacatctgcctgtgtacacacacaactttttatactagtaatttattggcaattgggctggtaattagttgatgcaaaagggaactcaggtggagaataatattgacacttgcttttctgcccccctcaggggtgtgtggaaggcagtgggggagttgggaggggggcagggaaatgaaatggagttttgtcctggccttcagctgtcactgcttcctccttgtcttgggaattttcacggagaacagctaagcagagaccacacctcggcactggacacagaacaacagggtggggttgaacttggtggggcacgttctagctgacctgcaagccccgctcacctggagggcttgcagagcagctctcctcctgttctccaaggggtgggcactgttgcattaggaattaaggtgcagcccagtgctgcgggcagccaagcgagtctgagcggggatgtgaaggcaggacggggttggagagaccctgcctgtgcaaggctggcctcctagtcaacacctagctgagacattcatctctgttcaaattaatattccttgggtctttcaaatgaatgtttcaatgtgaggagcgaagtactgggaaatcgagggattttccacaatccccaagcagcttactcagtggaacctctgtttccccagctatgaaggaaatagcatcctaca

SEQ ID NO: 405 - protein, 330 aa, Homo sapiens; identical to SEQ ID NO: 403

SEQ ID NO: 406 - DNA, 58183 bp, Mus musculus
  misc_feature (1)...(58183): n = A,T,C or G
gtggagtcggggcgcagctcaaacatggcggcggttggcacggggcggtgaggcggtaccaggtgggggctgtcgggtgtcatgggcggtggcggcggtaccgcctccgcgtctccctgagctggacctcacgggggactctgcgccaagctgggcgatggatgagagcagcgagctgggcgttctggagaccatggagaccctcacggagctgggcgatgagctgactctcggggacatcgacggtgagtggcggcggctgggtgggagtgcggggggcgcgcggggaggaaggggttacggcggcgctcgcgggtgcgcgtgcgcccaccccgcgatcgccccggcgtgcgcgggaaggaacccgcgggggccgggctgcccgggaggttcccagttcttctggnnnnnnnnnnnnnnnnnnnnnnnnnnnnnnnnnnnnnnnnnnnnnnnnnnnnnnnnnnnnnnnnnnnnnnnnnnnnnnnnnccacacgcgctctggtttgtccggtcttcgccggcgtcccgcgtcgcacctgtcactccctgcctggccactggagcggcttcgggatttcccggactgcgctcccgggctcggctcccccacgcccccgctcttttcgggattgactgacagccgggtctgcgggcgctctggaaaactttgggcaacagctgcaaaaagcaagttactgatggagtggacagagaccgcagagtgcggcggccttggatggagacccgggcgctcctgctgtcgcactgcaaagggagttgagcagcaagaattttgagttgtggcccctcgggtacagactagggagctggtggcctttgtttcggcggccttaacagcgaagtggaagaactggtaggagcccagggaacctctcttaaaattctctcacttttcagccacgggaaggaaggtttggagagggtcccagacttgcccgcggtcatcatgctggttaacaaagcccagttctttctgtttctgagccactattagtttctttccactccacctttaagaaaaataggctagtaattaagtcattctcagtagtcagggctcttctgaagttctcagtcccaaatactttgcgttagttcatttattcaatcccgctgaattgggtatcgctcagttttgccggaggtgtcgtttaaggtcacttactttagagagtccagaactcctaggcagtgactcagtttatggaatgttactacacctagaatctagaaccttgcaggcagatgtgatggccacatcctcgcttcgcaggcgaagaagcaggtagaaggttctctcgtggagaaaggagtgacaacagttgtttaaagaaggtgttggccaggtgcctgttttgcttttgtagcattttgtagcatttttcccttagggttcgcccttacttctcattttggtcatccagacagtgtgacaagcccgtgtattggaagttccacttttaaccacagattcttccaccaaggatcgctaaacactaagataggttaacgaatgggaggggttactccttggaacgtgggagtggctaaagtgttttgagcacccaggtacaagataaaagtgttaagcactcacacaggttcccaatacttatcacagccctgtcagataaagatggatgtcagactggccatctcccctcaccgttgttgggactgaagcccagcgctgttcattagcatacccagggttccctagtcagtaaggatgtctaaaactgcctgccagcaggtacaagagaaaattcatcttggtcttttttttttttttttttttttgtacttacattttataatgatctttatttgtctgcgttttcagtctattaaatcatcttagcggttaatattaaccttatagattgctaagtctcacggaaaattttaggaccacctggggttttgtatgtgcctagggcagcaagtgcaagtcagaggtgggaaagcttccttgaaggctagtttaccagaaagatcacaccaaggagatagccattgaccttaaaagacaagaagaaccagttgaacaaagctaaggacaccgggctagttggaagtgtcccctgaaccctctgttctcctgagcaggttactggaggggcggggggcgtggtacgacgggacaaggggacaaaccacctttctttttcttccctctgttctttgcaccgagaacagcccttgggacagtgagaatgctcactgtttatggaatgtctgtatgagtacctgggacaggatactaaacggtattaggtatagtttccatgattggatcagggtgagcagcccatgtgcatccaagaggaggaagaggagaggtgatatgaatgcacttttgtaactggaagcctaaaagtctcatggctgccttcaggagctcaaggagctgtgagtccaagaccaacagggtctcttcttagtcggagagctttacgttctttaagttcttctttctttttttttttttttttttaaagatttatctatttattatgtttaagtacactgtagctgacttcagacaatccagaagagggagtcagatcttgttacagatggttgtgagccaccatgtggttgctgggatttgaactccagaccttcggaagagcagtcgggtactcttacccactgagccatctcaccagccctaagttcttatttctttggggtaaaataaatggtcactgacctggaaatatagttccatggcagggtgcttgcctggaattcataaatttatgagtttgatacctactaccacaaagacaatgcaattgagcacagtggagcataagccatctcagctttcagaagctgaggcagaggggtcacctcatgttctaagaccagcccaaacaacttagtgagaccctcatctcaaactaaaaaagaatgctggaggggggaggggcagctcaacagtagaactcttgcttaacatatgttgaggtcctaggttcaattcccaatactgcccaaaaaaaaaaaaaatagaataaataaacaatttcagcaggacactatataaataagaaaggactttcttataatggggactgagataacctagataaattaggtgatggaatgaagccctttggaagaatatcaatgtcattctctctgaagcaatgccagagtctggagttttatttatttttttaactgttggcttcattatctttttttggtttgtgtgtgtgtgcctctgattgtgggcataggtgtgcgttggtgtctgttttgcccttacagtatgacttcaggcgtcaggttttggctttcatcttctttgcagcagtgtctctcctgttgtttgacacagcatcttctctcgggctcttgggcctctgaccttccaaggattcccctgtctgccttccatcctggccaacaaggggcactgggcttacagacctgccttccacgctcagcctcctgtgggctctggggattagaactcggggactcacacttgtgcaacaggtagtttatccactgagccttctccccagaccttaactttttttttacatttattcagtttatggatatgcgtttgcctgtgtgtcaaatgaaggcgtcaaatggcaacttttagagttagttctctccttctaccatgtgggttctggggatcagagtcaaatcaccaagcttagcagccagcatgcctctttacccactgagccatcttattggcccaccagtcctcttaaaagttttatttcttgagaattccatatgtgtataccatttgttttgatcatatccacccgctcacctctttcaagacctcccctcacatttcccttctggcttacctgtactctttcctttctaaaaataataataataataataataataataataacaacaactcactaggccaattagtgcttcccgtgtgcacatagtaggacctgctgtgtccattgtcgatcaggtggggctgaatcacacgaaggcctttcaggtcccaaggttaaaggcatgtgtcacaaattccgtcttgttcctctttcctttttagcaatagagaagcaaacacctaaaaccaaaccttctgaaagagccacttgttctggcccattttgtatctctcctcagtcttcaccttggcctcccacctggcttgtatttcagagtagggtctctgaagataaccttgttgacagcagccatgtcttttatagaaagatagtatcttcttctggcatcagaaaacacagagtcaagaaccttttttttgctaggcacaaaagaaataggtgtcaggggctgcagagatggctcagcagttaagagcactggctgctcttccagaggacctgagttcaactaccagcacccacgtagtggttcccagctgtctgtaacttagttctaggagacccaacatcctcatggttcatagagatacacacaggcaaagcgcacccatacacataaacactaactaattaatcaattaaaataggtatcaagagtagcactgataagcatatgaaggaataaccaagctaactgaaggaaaaaagggctgctaaagaggttttttttgtaattaacattatgtgtaagaaaatggtatatgagatccaagaggtgaaatgaaaatgaattgtgctctagatagattggctttttttttttttttttttttgaatattaggaagggagttggtgaacatttcaaagtagaaataactagtcatgggttaagaaatgccaactgtgttgctaagatgtaggggtgtgacctctgtgaaggccgcatagagggaactgtaggattctagtgagaccttgagcacggggcgtcccggggcattgaggaagctgtgctagggaagcttgccgaggagatgatggtgtgtaggcttatgtgggcttgtgcaggggcgtagtcacagtcgggatgggaaacctgttcagaagctaatgacgagggagattgaagtgaaagaaaagaacggaggatggtgctaccgagtgctgcggggatgctcaggccatgcaaggagaccacacaggaggtcagccttcgttgaagggtcgagtggcaagggaaggatccagaactagatgaaccaaacagcactcagaagtccgtgagggaggtgcaagcaggggcagcgcttctccttggggaagggtgagcttctgaaacctcaccttgggccttgtgcatgtgaagcaacctctctaccactgagctgcattcccaactcccgtgtttctacattttattttgaaacatgggctcataaagttgctcagactggcgtgtctcagcctgtcgctaccagctctcctttcctctttaggagttgcctgttctaaatgtgatgctttaatggacccggagcccatggcttcttccccttagcacacgttccagttcatccatgttgcaatgtagtgtttcagcctggctccttttgttaactcacctgtcagctgccagactttggggctctttctcccttttggctgtttggaaagaagcaactgagaagtttggttttctgtggacatgcatggtcgtttttctcaggtagatcacctgtacttggtgtttgcttgtccattcgtccactgtcttcctgtccctggtcagttcttttgcttcttgcagccctcactctgtttgcccatctctggttaagtcaaccgcccttaaagacctacagggtggtgttgaggttcctggtccctggttcttgattttggggtggtagtgtttgcttccttgttttttatgaaacacattcaacttctagaggtaatttgttgttgtttgatgctggtttggcctcaaagtgtatgtgcgcatgcaccaagactgacttttaaagttcgggaatgacagacatagtttggaagtaaaatgttgaggattgccctgtttctaaatacatagtcagctcacactgacttaatgagtttatagttttagacagtttttttcttttttttaaacaacaaggtcttttactgtgtaaacctggaactcaatgtgggagaggggagtgctgggattcagatgggaccacaactcccatctgaaagtaacatgttttgagaccaggtcctgcttgtgcgaccccaggctgggcttgtggtattcttggctaggccatcctagtgctacggttacaaatgtgtactgtggagcctggtttaatgggtaggacagagtttgtagtagaaatttgaagaagcagcttgagtttcagctcctggtacttgaaaatgttgatcccacgctgccctcccatccccctgcctccgcctccccctgctgcagtgcaggtattacaggcatccgcgccatccccgtattgccattttgctgtgctgggaactgacttgagggccttgtgcccactgggctgccctgagccacaaccccagccccagcactcggatcctttgtatttttcctatgaaagctatcgagcacttgctgttgcccacagcttgttcttttccacatgctgtaagctcttggcctcatctgcttacattttctggggtttctcagagcagaccagtgtattattgagttttcctttctctgtctgtttggcctcgcccttgttaaacattctgtgatcacatccaagccattgggctaataatattcctgaccattgaagtctttaaaatttgcggttctcatactctgctcaatatcctgcatttattttaaaaagggtgttcttgtttccatctcgagcagggtttctctgtgtagccctggctgtcctagaactcactctgtagaccaggctggcctcgaactcagagagatcccatctgcctcggcctcccaagtgctgggattacaggagtgcgtcaccatacctggctagccaaaacttttaaagtatatacacacttgtgatattttcgcatacagattgctatacgtggcaataattgcggtgtaatgggtcctgtaatgcagtataatccagccagatagacagtttgcatctctttggctctgttgaacattttcatcatggtagtctcttagattaagtagagttgctttgagcaactcaggaaaagtcgctttggagcccacattgccagctgtgtccttttcacttgtcacattttcccattgctccaaattacaatggttacccttgcttattggggttagggaagtactgcatttacatggatcagaagtttgtacatgtgtaaaataggaccgtgaacattcttgctctctctacctatctccccaaattacaccttctcaaagataatcaggcttaggctggagagatggctcagtggtaaagagcactgactgctcttccagaggtcccaggttccatttccagcaaccacattgctaaaagcatctgtaactgcagtcccaggagatccagtgtcctcttctggcctgtgaggtcactgcacacatatggtgcacagacatacatgcaggccagacatccattcaaacaatacaaataacccccagccccaatttttttttagtttcttttacctcctgctaaacttgttataagtagaagcaaaggccggtgagatgacctagcagggaaggcacttgctgcctgaggacctgattttaatccacggaaaccccagggtaataggagagaaccgactccagcaagctgtcctccacacgcgtgcacacacacacatgcacacacgcaccgtagcactcaggaggaaaaggcaggcaggtctctgagttcaagggcagcccaacctgttgggtgagaagttagcactcaccctgctcatgtcagaggtaccactttaatgcccaccaggggaaccggcagggattctaatccctttcttttttgtccacttctgccacactcctgtcaggctcccagctgaagcccctccctggtgcttcgcttatgcagaagcacttgacttttaacacgctccttgaggttcagtgggtcctagctttccgtctgtgctctgagggtcttgggaaagtttcctaaattccgtaagactgttgtggaaggtctgtggtctccccctgtatttttagggcatcacaccttgccgccccaaactttaggtacatcttcccctgaaaaattctgttccaccattgtaaatggtgttgcaaagttgcttcttttcactcttaatttgctcatgaccactttgcaccagcctctatctccacataacgtaggaaatatcctttggttacaagtcatgtcttttaagaaaaaacatctctcttgaaggactagagccatggttttcaacctgtaggtcctggcccctttggggtcacatatcagatatttatattacagtccataacaggagcaaaatcacagttatgaagtagcaatggaataattttatggctgggggggtcaccacaccatgaggaactgtattaaaaaggtcccagcattaggaaggccaagaaacgttggactggagagatggcgcggcagttaagggtctgtactgctcttatagtagacttgagttggttcttggcatctacagcggacagtcaactactggtaatttcagtcctgggagtttgaggggggccagtgtcctcttctggcctctgaggggaacctgcagcactcatgttcatcatatacagatacacttatataaaattaaagtatttttttaatagttttgatcagccttgaagttgggcgtgctagtacatacccttaatcccagcacctgggaggcagaagcaggtgggtatctgagtttgaggccagcctggtgtacatagtgggttctaggacagccagggttatatagtgagaccctgagtaaaaagtaatcagccttgggagttttcctgagctagcaagctttctctttatttcttgggcagggttgggccacaacttgtggtaatttttcccatggtgttaattttttgtgtctgcatatatacacacataaaattacatatacatgtgtaaaagattattgcatttgtatatttagttggagggatcgtatgtgccacggtgtgtgaggatcagaggataacttacagaggttgtttttgtcttccacagttgtttctgtggttcggccatgtggctaaccaacttggatctaaagccttgatagcgatcgagttacccactgagctgtcttgctgacctaggaccttttgctcttgtttgtagatactgaggaaatgtgactagttagtcattagcatcttccttacttggctttgcttttcttttcttttttttcgagacagggtttctctgtgcagccctggctgtcctggaactcactctgtagatcaggctggccttgaactcagaaatctgcctgcctctgcctcccgagtgctaggatcaaaggcgtgtgccaccannnnnnnnnnnnnnnnnnnnnnnnnnnnnnnnnnnnnctaggatcaaaggcgtgtgccaccacacctggctacttgacttttctattgctgtgataaaaccccagaacccaaagcaacttgaagaggaaaggacttattttgcttacacatctggatcacagtccatccctgggggagggcagggcaggaaccaggaggcaggaactgaagcagtgaccatgaaagaacgcagctcactgacttgctctcaaggcttgatcaatctgctatattacacagtccaggcctgccagcccagggtggtccggccctcagtcggctgagtcctcgcagtaatcattacgttattacagtcggtcacattcaggaaggaaatgcacacagacttgcttacaggcagcctgatgtgatagaggcactttgtcacctgaggttcccttttcccagatgactgtagtatatatcaagttatcagaaagccaactaaccagcacgctgtccctggggtcgcagctgctttacggtttcctccctccctccctccctccctccctccctcccttccttccttcctttcttttccttctccttttttgggtttttccagacaaggtttctcttgtagagttggctgtccctgaacttgctctgtaaaccaggttggcctcaaactcccacagatctgcctgcctctgcctcctgagtgctgggattgaaggtgtgcgccactgcccagcatctttagcttttgaagtcataggtaagcagcatccccgtgtgctcagcactgcatctgctcagacctttacagaggtctgagctgggacctgggctgagctgctatcaaaggaaaccagaatccaggcactgtccactctgtaagactgttttcatctaataaagctggttggtttttagtcttttctccagttctccaggtacttaggatctgaggcccatgctacacaattagtaagtggtatgttggtgaccttattccagatgtgtgacgttctgaaatctgtgggcatctcctctggtccgtgccaaattccttgccgatttaataagcaggtgtctgaactgtgggtccaaggtagaaatggaattcaaaacttgagagatgttagattctctaatgatttcaccgtcagtgagcatgtgcctagtccctgggccctggaagtgacttcccctgggtaccctgactcttctgtgcatcccttccgtgtgtagggtaggggttgggatatctccagtacttgatgaggtgagctgagccagacagtcggagcgggcaggacctaacagtcttttttttttttttttttcttcccactatcaagaagggaattgaatgaacttcaatttgcgttgatgagttttttaaaaacagtttcagagtgttgattttccccgtttttaaatggctcttgtaagcacagtgggcgggtcacaggaatagtcggagtgtgatgggtttgttccgtttttcctgcacaagactcaaaggattaaaaaactttttgatgtgatggaatttttttagaggctagcagaagagtagcctggccctcgatgtgaagcccctggagaactcctgcttagaaactggcctccagatgctgaaggactcctgtgtctctctagccttgggagtcgccagtcccctcacaatcttactctttcatctggcctgggaacaggtctattgggttcggggtggtgatgaaactcagagttgctgaaccaggtttgcagctgctttgttgcactgacttctgcctagccctggctccagccatcccacaactgcagggaaactgcgtcgtttcctgggcactaaacattcctgtgggcctcaacctttgctaaagtcgacctggtagcatttgtctgcctaacggtgctgtgagatccgcgctctgtttctgtgtgcatttttcatggacattcataagggctctgcagaagagacaggaaatgaccgacccatgcaggactttctatgctgagcagagcgtgccgctcatccttgcctgtgggaacgaggcggagatgccctggtggagggagccgggttgtcaaggagccttttctctggtcagaagttgtaatgaatggataccatatgttcatagcccagtgctagaacatgtttgaaatgaatgcaacagtccctgttttcagggcgctttttctttttgattgctgtactcagagtacaagcttacatcccagtgttcgcaaggaaaaaatgtagctggagccatcacaggaagaattccagatgtttgaggcactaaagaaggacttggggaagtcttcacaaggactttggctaagttgtaaatgaagggtgggtgagcagatgcgtgtttgtaaaattatttatttgtattttatgtacattggtgttttgcttgggtgcacgtctgtgtgaggcagtcagattttggagttacagttgtgagctgccatgtgggggctgggaattgggcctgggtcctctagaagagcggtcagcaagtacacttttctgctgagccatctctccagcccctagcagaaccgttcttgataaactgttaccttctcaaccccttttaatcaggcccttctatgcttcagtgtattctctatctgacaagcttgagttaaaagcaagggtttacttgagggaggggagtacatgtattgattgacaatctagaaagctgggcttggaaaatgggtttgaatccagagaggctcagcggtgccagagcccagccagggttaggataaacagcagcctgctcaggaccccgccttcctgacgacctgttgggtcctttcctgagtaggagcaggccttaatcagagttgacttgtaggcagccttgtcaagacatgcctggtgggcattctccagaggaccagtgggatgctcatggtgtgtgtgcgtgtgcgtgatgaaacgaaatgacagctgtccattgctgctcctctctggtgatgatgtcattacggccttcacctaaggcagctccatccatccatccctctcgcgttccaggatctctgcattgtcaatttgcagggcatctcctggtgctgttttgttgctgttttccctcaaactgttcctttttccttgaatgcgcttccatccctttagctcttagaaccccttttatccagggttcagctttcagtcgcccagagtggtcctttcctccttacagccttacatgtttgaggcatctgactcccttatggcgaagctggtggaactggttgggtctctgtcctctctgggattctcttgaatatgttagacaagcattctaccacgagtaccactaggctgcatcccagtgtgcctcccccctcaccccccacttttaggcacagtctcagtgcagcaggcccacctcagattcagtcctcttgcttcagtctcccaaatgctagggattaaaaacccagggccttaacacatgtcggacaagcaccccatcattgagctgtccccctaccccccgtgcaaaacaattcattcaatccttcttttttccttccctgcctctctcttttctgcctttctctcctttttcttttctttatttttatctcttcttgggtacgccatctttttgtagcctcggctagtctccaggtctcacccagcctcatcctgtgttgggattgtgtcctggacgccatgtccagctgagtgcttttttccttgctctgtagggtcccacgaggcacggaaggccatccgagctgtcagacacagagtgagcatcacagacaagtgccaagtggatggtggtgtagcattcaagaacctactgtactgtgggtttggtctttgtttatggaggtttgagagtgtgatggtgaatggccgattcttgaggtctgacattttttacctaatagtcttggtactaataagggttgaggtcccttgctttgcggactccgtccctaagagcacaatccaggtggggtggtttgtgcctgactttgttgacagtgtgtgggttatctgtcgttgtgaaacccaaggccctcttgaagcacaggatcatgtaggatcagtcccttgagcagcttgctcaacttttagactgctctttcaagagtgggaaaaaaaaagagccacgtaactcatgtaaccctagggtgggggcaggtaatgagcgaggaaagacaggaaaagcctgagatgacacatcctttcctccctgagcttgggtgttcacccctgctcactccccagggaagcactcactgaatgtccaccgtgcccacctgctcctgggcttggttcagtgacagccgagtgatactggcaccaaagcattcagtgactgtgagcttgattgcaaatcccagctccactcccttgggcgttgtgggtgctggccatgttacattaggtgttagctacttcataactgtactttcgctgctgttaggaatcgtagtgtagatagctgatgtgtgacccctggcccagttacttcatctccttgccttgatttcttgtttgagaggtggatgatgatagatagcactcgcctcaggcttgtagaggttacacgaggaaaggtatcaagtgtttaatggagtgctgtctgtcatgtgccgtttgtattacttctgttactaatcaactctgggccacttcttgactgttgtactcagagtgcagacttttaaaaatagcaaatggagcatcatggagtgtgcttttgaaacatggggggctaagagactggtatctctggccagccttaggaaagaactagcatgcttgtgtatggtgcctgcatgggtgtggattcccatggaacattccagaatccagctgctgtgaaatgggggtggagttcttcaaggacaccacaatgtgtatgtttatggggataacgtctgcattggggtgcctctgtgtgtggatggggtttgggggccacagggcttccccaagaaaggcccccatttctgtttctcacttatatgcctaagaccgtgcaaaactcctcttagggacttaagttgtttcttaggcacaaacagctccacatttaagcacataagactgaggcagcatgcaaaatgccttacatatgagtgcttgaaacaggtcacctcatggggtgggtttgaaaattctgtaacaatgtgtgggaaatgcctaaccaggcattaggagcaaaataacagtggtaacactaaagaaggtattttccagaaaaacaaaacaaaacaaacaaacaaacaacaaaactcgtgtttatacttcgctaataatagtatacaagtttgctcacaagcataagtaaagaagcagctgtatacggacaattttacagttgtgtgctgtgtgcctggcctgacagatgttgcacaggtgtctgacaaccctcagaacctgcctcttgcaggcttttactgctgtgtgacatgtaatagggtggcagtcagtgtttattccatgcgtgtctttattgccgtgttctctattagagcagaaggggctaagaagagttgtctttggacggagatctgttatagaataagaatttggataggaaagtatgcctatgaactacaaagagctagtctctcttccctgtgtcccttgatgagttagttacgtgcttactgttcagttagctttggggaggggttggtggttgcttttatggtggtgaagacagaaccttagagcttactgagctccgtgcccagatctcgtccactgacactgaaagcagtgtgtggccgattttccaaatcccttctaacacactttcatttcgcctttactgtcactccgggtctgtatggtatttttctcccaagttgtgatttatataaatgcaaaataaagacatgtttggaaatcagcggtggtagtacacacctttaatcccagcacccaggaagcagaggcaggaggaactctgagtttgaggccagcctggtctacggagtaggttctaggacagccagatacagtaacagagacaccctatctcaaaaaaagaaaacagataaaaccaaccaaacaaacaaacagaaaataaatggctagaagccaggcgtggtgacacatgtgtgtaatgtttgtactcaggaggtgggacgggagccttcagggtcctcttcagctccataaggagttcagaaagagcctggggtccatgagactggatctcagtaccctacacacaccaagaacgggggtgtcacatgttactgttatgttagccacataaaagtaatataaattaacagggccagttgtaatcaccttctataaatttaaataaagcatacatatgatttctaaatagaaaatacaattttcttttagacatgaatagtgtaatggctttttaaaaattatttaaatgatttctgtatgtggggggacacgggtcagttctcccctccaccacaggcattccaaggatcagctcaggtcaccaggctttgtgacagacttcctcattcaccaggccatcttgctggccctcctttattcctttaacttttaaacaagagatttattttatgggtatgagtgtttttcctgcatataagtgcactgcatgtatgtgtgtgcaccgtgtccatacctgttacccacagaggcgggtacatcttgagactggagttgcaggttatgagccaccatgtaggtgctgcgaatcagacccaggaaacatcctttgaaagagcaagcagcctgtgtgctcagccactgaggcatctctccagccctcgttggttgctgctgtgtgcctcagcctcttgaatgccggaatggtgcacatgggtcatcacagctggctctgatgtcttctgcttgtggaacctgggactctgggtgttagtcagctgctataccgctaagctatctccagcctaggttcttctaaatggaaccttgtgttcaggagctctcagatagctggacgagaggtgtcgagtccttggcgaaagcctttaagtaggatggtgagccagcatagagaaagaataaaggtgatcttagcagaaaggacatggtggtcttactctgagaatgactcaccaaccccaaactggtgcagaaagagaagtgggtatctttgaaggctaggtgagtgggaagtgaaagaaagctgtgggtgttggagggctcaggactgggcagggccgagaaatggctcagaggaccaaaattcagttccaagcacctacaaccatctgtaactaacttgagctcaagggggaatctaactggtcccctggagcacccacataagctggacagacagatgttcacgcttcttaaataaagagagaacaatttgcaagaagggctgaaatgtggtttgtagctggcaggtggctcagcagttcagagcacttgctggtctgtagagggcctgcgttcagtggcctgcactaggaggcagcgcacaaccatttgtaactctagttccaggcgtcttgtttgaacaatggctgtgcaggtcagatggtgattggtgtctgacagaagactagttgaattgaaaacagggtgtggggtggagtgataaggtgccatagagagaagctttgaaacagtcagtcttagggtgaacctgtggcagagaagaaaacctgtggaaagtcctattgaaaatagctcttctgggtgagacagttgaacgggctccagccttgggctatggagactggagaagtcagtacttcattccctccccaccccccctccccacccctcccaccccgaactgcagaggtgccttctgggtgcctgggaaaggaggagagagccggacagagagaactaggaggccacattgagttgctctaggtttcttgtgtgctttttctcttgggggtggggtgtaggcatgtgaatgtgctgatagtggaagccagagcaaagcatgtagccttggcggcatggtaaacgccaagttatatggtaagttatagagtaacttactgaactgggggtcagctgtgagtcataagcacactcagccacgcccggctttttgtatgagtgctggggatttgaactcaggttctcatattcacagagcaaacactcttacacactgaaccaggccaccgcctccttctccttctcctcctcttctatctcctcatcttcctcctccttatcatcttcttcctccttctcctcctcctcctcttgttttttcaagacagggtttctctgtctagctctggctatggtgaaactgcggatcaggctggcctctgcttcctaagcactgggattaaaggtgtgcaccaccaccatccggtctattttctaaatttgtttataataaatatattattcctttcatgattttaaaaattgtctagagctggcaagatgccttagcaggtaaaggcacttgtcaccaaggctgatggcccgcgtcccatcactagagcacacacggcgggaagagaaaactgactcacccctacctctttatacatgtgccttggtatacacaagctccccctgccccgtaaataaatataactcaaaaataaaacatattatctaacaacattcataataaatataaagtgtaagaataacattgtactaatgtctcaacgaattaataaaatatgtattgaaaaaataagtagtggggcttgcagaggacaccccagccacatggcagctagtaaaacagtctgtaactccaggggatccagcgccctcttctgtcctctgtgggtactgcatgtacgtggtgctcagacacattcagggaaaacccccatacaataagaataagtgacctttgctctgtgcagtcactcactgtagtctaaggtctgaggagaccagctttggcagtatggtaaaccctgagttatgtggtaagttatacagtaagaccctggctaaactcttcatcctaccccaccctcactcccctaaacagagtaatgacctctgtaaaccagttcttctcttacctctctgggctagacaacaaatacccataggactattagctgactgtgtcatttgaacacattgttactccatctggggcgctttggatgtactcctaatcaaaattaatctgatcaggagcctgaagtgatggattagtggcagagagccctggccgtacttccaaaggacccaggttcaattctcagccaaccacacaatctgtaactctagttcagggtttctggtatcacctgcatacatagagatagacaagtatgccggcaaaaactcaatggcatagattaaaacaatgcaaatttgctctgatcatactttgatgtgcactagaggctgcctggctaaggcagccaagatatgttgtcgtctctaggtcataagctccgtagactatacatgaacttctgtttctgtgaggcatgaagctatttgaaatgcacaggtgctaaaaacctccctctagttttgtttctttgctttttttttaaagaagcagaacccaaatgtagattcttggtgccccaagcaacttagcctcaacttttagagactgctaaggctggggaaacggtggagaaggaagtgaggtgtgcttgggtgtgccggccacttccggggagcctctttgcccccgtgctctgtgaactgcagctggaacacaaactccattttcaaagcttcataaaaccttttcccaggccttgctttccctggcttcatggctctctgtggaaatgagagcccgtgtaactgcctgacacaaaactcggagtggggagccattctgtgctctcacgcggtggagggtggagtcagagcatgactgttcctggagcctgcacctcagctccctgcgtgtctctgcatggcgctccttcccacagtcgctcatcttgccttaccacttggttagggcctgctgctcagctttctgaagttggcttcactgatactttctatgtaagcgttgaaaggcattttactttaagaagaaaagaaaaaaagaagcagcggccgttccattccatctgcctacacgctcttaacctgctttgtgaactaaaaccctgtgacctttgcacaccagccggtattgcaccccccccccagcaaagggagctttgagagctttgagagcgagcgcttggtggagtaaactttaagcaggcccaagtgcgtgtgcagtgggtgctcaaggggcttcctgagggcccgccccttgctggcgttttgcataaattatcttatttcacctcagagcaaagaatcaagtgtgtatttatgtcccagccagccttttgtggtgagagagaagtaatctgtcctcacggctcctggagctgccttcctgagacccaggcccaaacagcaccaaacccaagcctgtgcgccctccctcggactgccctttcctttggttttatggcacttgggaagggctggagaattgctagatttctcctaatcatcttaaagtttcccataatctcgtattatgctcgtgcgccaggtgtgcgtttcatttgtgttttcttctgagactcaggacagctcttagttaaagtgtggagaaggacttgcccttagttgacctttgccatgtctgtgacttgtgccctcccacgtacgtacatcagactggagcagtgaggtgtttgtaagtggagctgacatgcctggctggttgaacggcgattgaattgctaagctccagttgctccgtttggaccgcactaggaatctccagtaacatgctgcttgccccacatacgactcggcttcctcagacacctcccctactttcagagacttggaagggactttctggggcagaggaagaggacttgggggaaggaatggagacggtgctttttggtttggaaggctggtctctctttattcttattatttatattatttactttgtgttgggtgcatactccatggcacatgtgtggacgtgagaggacaccttgtgagagtcagttctttccttcctccatgtggcttctggggttcagactcaggtcgtcaggccatgcccagtgtcttttcccactgagccattgtgccaggcatgggggctgttcttgccacagtggtttgtttggtgtctgaatgagagcatcagaggctaagagagcctctggaattcccgaccacttttcaagaataatcactcatttcatgggtacgcgttcacgtctttccttttagagtatcttacacgtacgccccaggaacaggaagcggtcatgagaaacaagagtgtctggagttagtggagcgtatggaagccttcccaggcttgaggcttcaggggaagagggattcaggggttacagacacttggaatatgatctagaaaggagagcatagtttccaagggggccccacagacttctttcccagtggggaaaagacacagccagagatccacaagggccctgaaaagcatggaacctggtgcaggaccaacatctctctgcctctgccttcaaacggggctctgtggtaatgaaggtgaacgaaatggtatggcagaaaaatggatctaaaccgggctatgtgctggcagtgtgtgtcactgtgttctagctctttccaggactttccgtcctttcttctctaaaggttcttgacagctgaactgctgagtgtactctatgctggcctcaaactcaggagctgagctcctgcctcggcctcccgagtgctggaattacaggcatgtgccaccatgccctgggcttcccaggtcacccacaataccgagatatgttgattgaatacccagattggttgaaggagatgaccagagtgtgtctattgaggatgaaaggggctaggaagaactaacgtttggtgcagctacagcccagcagagttggggcactgccacagagagcagggctgagagtggaggttgcttcgtggccaaggttactgcgctccaaagctttccggcagtgacagcccaccctctgcttcctgtgggttgtgtagacccatcctgatccatttctgctatggtcttagcattggcaagctggacatggtggcttatacctgtaatctcagcactcaggtggcagaggcaggaggattgatgcaagttgtgggtcagctaaggctatctagtaagacctgtctcagacaagacaagacattggatggtcatacactctattttcctattttgggtaatattgcttatggtgcctagagtggagcccagagccctgtgcatttccataaatactgtgtcactcccaactctagtgcatcaatttcttcatcaagtttaaaagttaacatttgtgagctgagaatggagccctgtgatagagaacacatgcctagcatgtgtcaggccccgagttcaatttcacagcacctcaaaagaaatcaccaagaaattagtaacctgaagttgaggttattaaagagccaaatgagagaagttagctctcagttcagttgttggctagtcaaggatactggctagactctaggcataggattacttctctgtgcccacagattacatacaactccatgggaaacattgggggtgggaggagtaccaaataaagatgcctgtgttccttggtctactgtagtagacacaatcccagagcttaggagactgaaacaggaggtttgctgtatgttttgttttgagacagggtttttctgtagagctgagctgtcctatgccttgtagaccaggctggcctcgaactcacacagagacacctgcctctgcctccggagaactgggatcaaaggcaggcaccaccatgcctggctcaggaggattgttttttgttttttttaggaggattgttttaagtaccaggtcaacccagtctacataacaaaaccctgtgtcaaaaagacaaaaccaaaatgtttctattttgggtagcaaaagaatgactccttttttctttctttctttttttttttttttttttgttgttcacagagatgctacagtttgtcagcaatcaagtgggagagttccctgatttgttttcagagcaactttgtagctccttccctggaggtggcagcaatggtggcagtggcaacaacagcagtggcagaggcaacaatggtggagccacagaccctgcagtacagcggtcattcagccaggtcccattatctaccttctctccctcagctgcctcccctcaggctccggccctgcaggtcaaagtctctcctaccccaccaagggcaacccctgttctccagccgcgaccccagccccagccccaacctccagctcagctgcagcagcagacggtgatgatcaccccgacgttcagcaccgctccgcagacgaggatcatccagcagcctttgatataccagaacgcagcgaccagctttcaaggtgacgcagaagtcagggcacttggtggcttccggagcctccgtgccagtgtgcagacagacactgcagacctagcctccctgagcgggagaagactttagtctggtcctgtctggacaagtttgtgatcattggcagaatggtgcagggatgtatctcctttctcaaaggctttaatgtctcttagacctacttccaagtccaaacctgggaaaggccaggttgtcctgataactagaggtggagttctgaataaaattaggtctgaaacttacttggccatcagatctgagcatccacagatgagaactggtccctcggcagataactcctaagctagcactgtggagataaattccgtttttaaaataggtgctgcatctctaaatagcagccgtcacggcgggcacgcggttcatgttgatggaatgcgcagctgaagtgcttgtgcttgctgtgatgtgctgtgtcccatgacaatggggagccccgggtaggctcggtattgctctcagtttgaagacataattttctggtgggtttggagactctggaggagaagataaaaaacagaaagcagagaccatgatctcaaagcagatttcccatctagaacggatgggaagcaatgaggccccggggggttgttgactctcggcgtctattaactcgattgcaggcgcagccatttgccacgtagcttcccttacattcgctccagcacccggagtcataaaacaatttgtactcattccatcagatattgatgcagtccttatgggacattcctattctctaaaccagcttgtaaatggctgtgcgcatcttcttcagcagcaggtgggaagccgaagtcattacaagacaccccgtccccaagtcacactgcagctgtggtgacattgtgcgttccttgcccatgtaactttgctctcttcttcccaaagtcctgcagcctcaagtgcaaagcctcgtgacgtccccgcaggtgcagcccgtcaccatccagcagcaggtgcagacggtacaggcccagcgggtgttgacgcagacagccaatggcacactgcagacccttgcccccgccacggtacagacggtcgctgcgccacaggtgcagcaggtcccggtaggtggcttggaaaggagtctgaattagtccttggttaaaacctgctgagcctgctatcgagagcatacacagaccagggaggaggaggagggctaagaaaggaacctctgagtaccattgcagagatctgactgagcctcgcctctggcatgcagtgactgttgacacatacgatgggtatatacagctgggaagaagggctcagcggacaggcacttgttaccaggcctggaaacctgggttcagttcacaccgtggaaggaaaaaccagctcttacaagctgccctcccacaacagatgtaccaagtgtgcatttagagaacaaacgggatggagagatggctcagccgttaagagcactgactgctcttccagaggtcctgagttcaaatcctagcaaccacatggtggctcacaaccatccataatgaaatctgatgccctcttctggtgtgtctgaagacaactacagtgtacttacatataataataaataaatctttttaaaaacaaaaaacagcgttttagggggctggggagatggctcagtgggtaagtttgcttgcttgcttgtttgtttatttgcttgcttgcttgcttgcttgcttcattggtttgagacaagatctctctttgtagtctggctgtcctagaaatcactctgtagaccagactggcctcaaactcacagagatccacctgcctctgcctcccaagtgctgggattaaaggcatgccctgctatatctgtcagggtgatagccaaaatagaagaagcttctagttgattaagagtgctttcgaggcaataaggcgagcttcggtcctgctctgacctgtatgcactcagctaggcatgtttgcacacgtgtgtggtcagcacacacgtaaagtatatatgaacttacttagactttcttactaacaaacgaacatttttattctgtgtgcacgtatctgtgggcgggtgcacacatgtggcagtcggagggcagattcaggggtcagttctctccttccaccttgtaagtcctggggctcagactcaggtcattaagcatggtagctggcacctccactgatgaaccttctcaatggccccaaactaacctatcttaaaaaaacaaacagaaacagacaacctgagcttgccattcttccttcctacccgtgcccctggctctcccgaccctagccaaggccagctctctcagcctgaaagccttaaagccttaccgttctccttagctgtccccttcctccctccccttccacacaggatgcaagctgcacaaaatagccaactttgggaattgtctgtaagggatttccttgtttgtttgtttgtttgtttgtttccagtttcaagaaaatgttctcttatgttttcgtgattagtctacgcagcaaggaagaaacaaaaacaaaataataatcatgctcttttttgtcctcctccttctaggtcctggtgcaacctcagatcattaagacagattcccttgtgttgaccacgctgaagacagatggcagccctgtcatggctgcagtccagaacccggccctcacggccctcactgcccccatccagacagccgcccttcaagtgccagtaagggtcgggctctgcttcctctgggctcagagtttctaaagcccgctgctgagtacatgtggggagcttagtagaatgtgtccatcagattggaaacatcaccccacttttagtttgtttcttcccttgaagcagtgttgtggagttgtgctgtattaagtcttgggagcttgtaagggagtggaacagaaccctagatgagccctgctgctggacggcagctcctcacagagccgtcatctttttttaccattgttgccgtggggtttgactgctaaaggaccctagggccaccagacagggagaggtatgaagaagacagacaaggaaagcaccatccttcagttacaggatcccagccactttgagtaaaggttatttacattttggaagcattaacattattcataaaatctgagagctagagttggagaggtaggcagtggataagagcgcttgcttagcacactcaaggctctgggttcagtccccagcaactcataaacagggtgtggtggacgggactggaatccccgaactcgggagatgcaggcagaaggtgcaaaagttcaaggtcatcctcagctacataggggccagcctgggctatgtgagaccttgtcttaaaacaaaatagaaactgctaagaactagaaactattcaaatgtccgtccatgggagagaaacaactcacaatacacctgtaaaataaaagtattcccaacagtgataggaaagaaaagaagcccgacccagacggtcacactagtaatcccagtagtaagacggtcaagagttgaagcgtgggctggtgagatggctcagcgggtaagagcactgactgctcttccaaaggccctgagttcaaatcccagcaaccacatggtggctcacaaccatctgcaatgatatccgatgctccgatgccctcttctggtgtgtctgaagacagctacagtgtacctacatataacaataaataaatctttaaaaaaaaaaaaaaaagagttgaagtgtgactgtgctgtgtgacagagcagggttatagggcaggacttaagggacattctgtatggtaaggggttatagggcaggacttaagggacattctatatggcaaagtgttataggtcaggacttaggggacattctgtatggtaaggggttatggggcaggatttaagggacattctatatagcaaagggtttttgtcttggatgctacaagttgcatgcatatgcaaaacttcgaaagttctaaaaatgatacttgttatatgtaaattattcttttcttttgtttattttgtttgtttttacatagggttcctcagtatagcccagaactcaaactcaaaatctccctgtccaagcccctgagggctggggttataggccaccttgcctgattgatgggttgttttgtttatttgtttgtttttatttttttgagacagactcttctatgtagccctctggcttagatctcacaaagatccacctgcctcctcttctcaaatgctgggattaaaggtgtgcgccaccaggccggcccagtaaattatttctaattctgattaagtaaagcaggtttctgtctcctccttaaccatttggatattgaaaccattcattgagggagaacaaaacttagtacacatagaaacgaggggcgggaagctctgtgggagctctgacaaattgagagagcagctctgaaggaaagtataggtgttatcctgcacgctctggtggccggaagaaatgccagcatttgcttgtcattgagaagaggaaaaactatgtcacagactaggagaaagttttctctgggtccagctaatgctcctgtatgtgtgttcagaggttactgacagtttgacagcaaaaccatacagcattttcctagcaatcccaccccgcccccacccccatccccgcccccgccccaggccagaagttaaggcccagctaatcttttggtggtgctgtttattaatagtgatcttgagaggaagatgggagtggatgtgcacagctctgggcctctcaggacctgacctccttagcccaagagggtatcagacaacgtgaagcactcctgggtgataccccatatgcaggagcagcccacttcgtgttgtgaggttactgtatttaaactaacaaaaggaaattctgctcatgttctagaccctggtgggcagcaacgggaccattctgaccacaatgcctgtgatgatggggcaagagaaagttcctatcaagcaagtgcctggcggcgtgaagcagctggatcctcccaaagaaggagagaggcggacaacacacaatatcattgaaaagcgctaccggtcctccatcaacgacaaaatcatagagttgaaggacttagtcatggggacagatgccaaggtaagagccaggaagagcactgactcaggcccagtgtcgccttggtctctgtcatgcagttagggaaggtgcagccttaatgagtggacacaaaaggaagttagagacggatttttgttgaataatcctggtgtttaacaggattgtagaatactgcccagatatggtggcatatgtttattatcctggcattcgggagacaaggcaggaagattacaagttctaggccagtcaggactaaaagtcagttccgtgagtgaatgaatgaatgaatgaatgaatgaggaggctttcagaggcgggtcagcagaagagcaggtgacactcttcagaagacctgggttctgtcctagcacccacgtggttgtttacagtggctgtaatcctagttctgaggtcccgtgtcctctgtgtgtctcaggcaccaggcaggcatgacaggcaggcaaaatactcataaaataaagataaattaatctttaatgagtaattatctagcataaatggagtgttgaaggttggtgatgcgatgacgcctagtacatttactctgtcacctgtgctgtgtgacatgcggtgaaagagggagatagcgcatcctaccttgttgacaggtataggactatgtgtaccttggaggtaacttaggacattcttgacttttttgggtttttttgagacagggtttgtctgtgtagccctggctgtcctggaactcactctgtagaccaggctggccttggactcagaaatccgcctgcctctgcctcccgagtgctgggattaaaggcaagcgccatcaccgcctggctcttgacatattttatagtgctccctttcaggacagaagcaagagtgcagatcaactctgcacaagagcaaagcagaggaaattaattttttttgcatatatctttttttttttttttaatgaatgtgtctcctgggaagtgggaggtgctattttttttcttgtttgtttgccacttgatttccttaaagtttgtttttatgctagattattatgtggattattatagtcaaataattattgtatgtcagttttatgccaggttccaggctataaactcttaacatgtattgtctcatgaagaccttactaccagcctatggcttagatcctgccattattcacatgttaaggattaggagaagtgaggatttagctcatgatagagctagaatgggccagaccttgggtccgttgcctaggtccagtccctagttatgtgttagtcttggccagtgaaatgagccaactcaggccagattagcgtatacaaaggcgggtttaatgggaaccagctctccagtgggttcactgatcccaagtaataaagccaggaaagttggcaaggccaaggggttaggggtggggacgggagaagcttgaacacacatacagggagagagaaaatgcagagagcggcagagagaaggagacaaaaatgtctctgttatatagggaaaaacctctgggtaaggggtatagcagccgtgccctgtaacgggtagggaccaagagctgctgggagaacctagaggccaggcccactttgatatgttaaatatgcatctcaacgcttgtcctgagtctgaaacccagcacctggtactatcaccaccccaccaaccaaaaaaaaagaaaggaaagaaagaagaggtccagagttagggcgagctctgtgtccaccagccagccatgagccgggccctggcacctcgcagctgtgcttcccacgcgtggactgtggggctctgctctctcagctccacacgcacggccgtaactgtgtttcgtctgccttccttccagatgcacaagtctggcgttctgaggaaggccattgattacatcaaatatctgcagcaggtcaatcacaagctgcgccaggagaacatggtgctgaagctggccaatcagaaaaacagtaagtctgcctgccggagggccagcagacctcacaggggaagtcctgtggcaggcactgagaggtgggacgcacatgtgtgtgaggcccctctcatgtgggactttataaaaatggagggacttgtctttgcagagctcctgaagggcatcgacctgggcagtctggtggacagtgatgtggacttgaaaattgatgactttaaccagaatgtccttctgatgtctccgccggcctccgactccgggtcccaggccggcttctctccctattccattgactctgagccgggcagccctctgctggatgacgcaaaggtatgtgcttctgaaatgtctcaccctcagaatctctcattttctgtaaaggaatagtggccacagagcgctgacccaaccagcggtctaaatggtgtaaggtacagggggctgaatgccctgtgccgttagctgtctgtgaggtgggagctgctcagtatggtccatgcctgtaacccagcctggcagaggatcttgagttccaagcaagctgaggaagaccaccctccccccaccccacccccatccccctagaaaagggcctctggatgaagaagccacagaccctcagaccctcagacttagcaagtcagacagggaatgaggacacagagcagctgtcatgcgggtgggctctgggagcccctggacgcactccattactctccctgcctgccactaatgggcctggcaagaccactttctaggctgctctgctcgattagagcaaggccgcctcttggtgctctttccggaaacaactacaatttgcaatctaacagttagcattccaccaactgagggctcttaaatggtccctgaacaaaagagcccttggcaattgaagttttaatggaattagtttgcagaggccctgagcacagtgatttcccagaacctttggaaacactgaatcctgtcctgcgtcttgcaactggagtctttctgactccagaaacatgtggttcgttagtatctagtttgttcatgtgagggttaccatgttgctctggctggcctagaacctgctatgaaattagaatgaactctgtcggcctcctggtcttcctgtctctacctgcgaagtgccaggattgcaggcattgccagtgcctttgatgtgtgtggtactggggagccatttggccttgtccgtgctaaatacattcttttttctttcaagacaaggtctcactatacagtcctagctggtgggctggaactcgctctgatctctatgtagaccaggttggcctcaaacttacagagcagctcataactgtaatgtgagttccaggggggccaacaccctcacacaggcaaaacaccactgcgcataagataaatgattttaaacaataacaattacaaatcatggctgttctgactcggagctgcttttctgaaggtcaaggatgaaccggactctcctcctgtggcactgggcatggtggaccgctctcgaatcctcttatgtgtcctcaccttcctgggcctctcctttaaccccttgacttccttgctgcagtggggaggggcccacaacactgaccagcacccatactcaggctcgggccgcagtgtactgtcactggagtcaggtaggtgggtcccctaatgctggcttgggttgggtggcctgctgtggcaaaaggaccctgtgcaaaaatgggcttcccacctgcttgctgctgacggggcccagcctgagttagatataataagacaagcatgagtttgttgggacaagcaaaaccagtctggcacctgcttttggaagggactgggtgggagagatggggaggtgcttgtttgaggggccgtatgtcagaagtgagaccggtgtcctaatttcctcttaactgggggttttgtggcactcagcaccatggtgccagggtataaaaggactcttgtttaggctgcggaagtgtgtacaatttcctctgaaactgtcacagaaggctcacactttgatcttgcaccctggagtccatcaggtgcctggctgtcccgcaaggctcctctggtagtctcagccgagtgcccctctctaggtgctgggggctggtttgactggatggttccaactctcctcctgtggctggtaaatggtgtgattgtcttgagcgtctttgtgaagctgttggtccacggggagccggtgattcgcccacactcacgcccctcagtcaccttctggagacaccggaagcaggcagacctagacctcgccaaagtgagttccgtcatccgcctttcttcacctttctctatgctcagggaatgttgttgagtccccagtgtgaatcaagccctgtggcaggtgctgggtgactgaggaaagagaagaaccaccccccaccccccccccgtatctagaacagccacagggcagtgaaggagggtacccctgtgtgtagatcatgctgtgcacacaaaatgatctctgcagtgggacatacgaatgctgtgagtcttgaggcgtaagcagggctaccctggacaagaggatgggcaggcagacgtggcagggcctttcaggcgaaagtgtcctgagaactgtatcagccacttgtctccttactgtaaccaaatacccagcagaagcaatttaagggatattatttgagttcatagtttcagccccacgcgggaaaggctggtggccgtgggacaggagcttgtggcgtggtatctcatgtcttggcagaccaggaggcaccagagcgacagggagagatcactcacaagacctgctgcttgcaatccatttatgtcagccaggccttgggccccgaggttccacagccagctgcggcagtgccatggctggggaccacatgttggaatccatgagcctgtggggacattcacagtcagactacggtcaggtagacagactacagacaagtagaccatttgaggctatgtgtctgtgtcgaaggaagaagccagtgaaggctggcactgtagctagttgctgcgtgcacagagttttaacttataattaggtttatttttttatttctgtctgtctgtctgtctgtctgtctgtctgtgtgaaggtatatgcacatgagtgcaggtgcccttggaggccagaagagggcgtcagattccctggagctggagttacagctggtgatgagcctcttggcatggatgctgggaaccgaactttgatccctccagaagagcatcgagtgttcttaccttctgagctatctctccagccctctgcattaggttatttctagttctctggggaatcagggaagattttagaacaagaaaattagttgaaagtttttatttggaatcactgtaaggagagattatggggtgggttctgtgtcacctgatgacattgaagaggctacccatgtacactgtggaatcatgtgactcagatcatccctgagcatagcaaacccagagcttactctccctctgcaggctgccacacctgagtcctcccacccctggtcagtgcccacccgaagccctggggtcctaaagtacaagcgcagtgcaggacagcagttcataggaatatcctagaggcagatttaagggtgtttgaaactcatcctggtggccttgggaagaataggttagcgaaaggagacagtgaaagatacagaaacaagctaggaggctcttagaatgggtagaataagagagaaacaagaaggtagaattgaataaatattttgagatataaattaattagcaatgatgttaactcaaaggtggaagaagctggatggtacagaggactctttctaggctgttgcctggaaatgctctgatgccttgagtagtgagcagtggccaagaggcagcactcacagggctgggtagagccggtgctaagggaagccgcattcttgctgggaaaagagttggactgattgaggaggcaaagacagcctggaaaacagccaggaaaggatgcctgccatcctttggttgccattgataacctctctcagttatcaatgtcagcagggtgccgtacaccccattagaccctcagcttggcagagatcccaaattgagggagttcagcaatttagctgtgagtttgccttaaagctgtggttcttgggcctccatgggccactgaatcacaggctacaatcccagagctgtgactaagcaaccctgaggtgtcgggcacagcaaacttcccgaacctaagcacgctctttatctaaaaaccagtacttatttataaaagctgctcaacaccagggcgatgggggcgctcacctcaaatcccagcacccggagcactctgacttcaaagccagcctcatctgcccagagaaaccctgtctcaaaaaacaaacaagaagctgctctgggaaactctaggacttgctgaaagacagaacacagtacaacttaatttaataaaaaggccaaggaattcctcagactccacagtgattgtgggatgaggttacaggtggccgcttttcatgtttttgtagcgctccagcatttctcagatgttcttcaatggaaattatgttttattctgctaacaggcatgctttattctgataacaacgtggtaaggtagatgtgtgttaaacccaaaaggcagaggtaaggccagtgaccattattcccacttgctgccttatagggtgatttcgcagctgctgctgccaacctacaaacctgcttatccgtgctgggccgggcgctgcccacctcccgcctggacttggcctgcagcctctcctggaatgtgatccgctacagcctgcagaagctgcgcctggtacgctggttactcaagaaggtcttccagcgctggcgggctactcccgccactgcagctggctttgaggatgaggctaagagcagcgcaagggatgcggcactggcctaccacaggctgcaccagctgcacatcacaggtgagaagggagggcggccaggcgtgctgcacggttggttccgagcgcctcttccttgggttgttttgcaagcgctccaccttgactgaagccagcttacatggctttaaaccagccaccaacctacactctctatagctgtattttaccctcccttcctccctcacttccttcctttttttaaaaaaatgtattgattttatgtgtatagatgtgtaccacgtgtgggggcaatgcctagtggaggccagaagagggcgccagatcccctggaactggaggtgcctgtggttgtgagcagccatgtgggtgctgagaattgaacctgggtcctctggaagagcagcaagtgttcttaaccactgggctatctctccagccttgagcttaactatttcgaagatggacttgggtgtagatgcacatgcctttaatcccagctctcagagacagnnnnnnnnnnnnnnnnnnnnnnnnnnnnnnnnnnnnnnnnnnnnnnnnnnnnnnnnnnnnnnnnnnnnnnnnnnnnnnnnnnnnnnnnnnnnnnnnnnnnnnnnnnnnnnnnnnnnnnnnnnnnnnnnnnnnnnnnnnnnnnnnnnnnnnnnnnnnnnnnnnnnnnnnnnnnnnnnnnnnnnnnnnnnnnnnnnnnnnnnnnnnnnnnnnnnnnnnnnnnnnnnnngttttgttttgttttgttttgttttgttttgtttgagacagggtttctctgtatagccatggctgtcctagaactcactttgtagaccaggctgtcctcgaactcagaaatccgcctgtctctgcttccaaagtactgggattaaagaatgtgccaccacccgcacggcaaaaaccccttttctaagatgaacattattcacagtactgtctctccacacttaagcatggccggatacacatactacaatcccagcaccaggaaggctcaggagtgcaggatcgtcctgggccaacctgggctacatgagaccttgtctcaaaaaaaaaaaggaagaagaagagataggactagcaaggtggctcagtcagtaaggcccttgccaccgagcataatgacctgaatcaaccccagtgactcagtggcaggagccaactaagtcccccacgacgtgcttggacttacacacgtccatggtacacgcagacacataaaataataagtgtttaaaattaaaagtgcggattatgatggctcttggtttcctgctcaggagtttggtttgttgacagaactgagagaaacgggaggaaaggccatttgccaagccaggctgtgctgccctgtgctggacagttgccgtgagacatggaggagaaatacctggtagacgttggacctgtggagtctgcggcccaactgatgggccctgggccttcaagggagcccatgaaagggacctctcatgcagaggacgggtggggcagtgtagtcaagacgggaactgtgtaactagacatcgtggcacatcctttaatcccagcactggggaggcagaggcgggtacgactccgagtttgagaccagcctggtctacagagtgtttcaggtcaaccaacggcacatgatgtctcagaaaaacaaacagaccctgcccgagagggatgtcagtcaaaggtcagaggagagtttgtcaaaggtcagaggtgtttggcccttgggtaagagggacagggtaaggacaaacgattgaagagacgattgctgctgctgtacccatgagcagtaggtgaagtccagagctacctgctgctttgagctttagccagaggggagcagcctgaggtgagcttgcggctttgccaggaaatccccaccttcagctttgtcctgctcctcagctctgtcctgcagcactgcttttgttcttgggttttgccccctcatggcgccctgagaacagactccatgcccgatctccgaccacgagactaagctgctcagttttagagttccaactagaacggtttccatcagcccgtgtctacactcgctgaccattccctccccccaggacctaggggcctctgaagggacagggctgaccccagcgtggctctcgtactgtgctctgtcctctctgaaggagaaagcttagagttttgtggggaaagcagatagcccacactaatacagagtgacctcaggcactaggagcgcctcctgcttatcataaggacgcagctggttacgaggccccctcagctggtgaggacaagaggccatggaggccctgaggtcagaaggctgcaactctgtgaaagctcaggacagctacaatggggccttgggcctgtgccaggggcaccttgtctgtcccctgacctcacggtataaactatctccctgctgatccaaccagtgtgtgactagcattgtctcgctctgtttcccttctgtgaagtatgtaggaggagggtaaggaaaccaagagccacttgggttttgtgttgttttcattgtctcccttcaaatatttggaaatttagccctttaccaacagaatgtggccgtgctagtgacagggctttgggaaggattgcaccacacacctgacttctgtccagtgaccagcactcctagcagctaatcctaacagtaaccacaagccaagttccagtcggtaggagaggcagggagccacatagctagtaacttgctgagcctgcatcccgtccgcacctttgcacctttctgagcacaaaggccacttctcgtctcctctggcacctctttgacacaaataagaggagatgtttgctttggttctcggtttgcagagtatagtccttcgtggccaaaggcagctttcagccacagagagaatgcggagtcagcctggatctggaggtgtgcggtagtcctcaaaggcccgccccaatagctcccatctgtcacctaggcccaccttataaaggcaacacagtctgcccaggtggggagtgccaccaagtgcagaccccgtgttaaaacccctgagtctgtaggtgacggtttacaatcgctgttaatgattgtactggagaggcaatgagactgtcgtcttggagactgttgacatgagtgtctgtttctgcccgccctagggaagcttccggcgggatctgcctgttcagatgtgcacatggctctgtgtgctgtgaacctggccgagtgtgcggaggagaaaatcctaccaagcacactgattgagatccacctgacagcggccatggggctcaagacccgctgtggaggcaagctgggcttcttggctgtgagtactgttcagttcctgtattattggcttactttcccccgtccctgtggtaaagtagcttttggaaagggtatggtccatcaaggcagagagggtgtggcagcagcgacaggccatgcctaattacactgcagtagcagttaggaatcagataaaccaggaacaggggccagcctacacccctcatagtgacctctgtatccctatataattcccaattataccatggccaaaaagttccacagctccccaaattggggaccaccagctggggaccaagtattcagacacacgagcctatgggtgacattttgcagtcaggccataatgtttccctgagtgctttcccatcctgggcctaaaagcagaatgcaccctgccacttgaaggatttggggggggggggtcacttgttcttccacaaaggcaaagagtgatgaagaaaatgcagcaagatgtcccccttgctgggcttttcaggcagagagccttacggggacattctggtgcactgaagtaaaagcctcagttcatagaaatacacagcatgtctgtctgtctatctgtctctccacccccccacccccgtgggattcatgtgtaactcattttcagagtcttattacatctcctgtctgtttatctacagactgttttgagggaataccttgtattgattgatctcgggactatagatccacaaataacaaagagcagcgctctgcagagctcgcagggcagctgcgaggtgggaagttagggagtgcttccctcgtcgcctggcacaggacggggcctgcgctggttgttcacagctggctaattcccaaccctcactatcgctggttcacaacatctgctgacctcgggctttctcttactccagcagagagagccacatttccctcagtgccccactttgcatagataactgaacacactggaatattttatctctgcctgtcaccacttggtaatggaggtgatactctgagaacagacggagaacatgtgtgtggtaacgctgatcttttgccacaagtgtatcatggtagtctacgtgacagggcgtaaggaaactaactctcccctccgcttttataaataaatgagacatgcatcggttgacttatccagcatattttattttactcctgttctggaccaggcactccggagcagatagtagagaaaaatgtgttaactggcaggacacccaggcgggttcaggcttgcagaaagacatgtgggtaagctcaaagacaggaccattgtgtcaccccaaagccccacttagcttcattaggcgccatcattgctgagatgcagctgccttacagaagagctctcagcctgacttcagcacacgggctgaggttcagggagatggctccactgaggtggctctaaaagctggtgactggggcacaccttgttgaatttgggaggttgcagcaggaagatcccttgtgcctagaagtaagtccaaagctaatctgggcaacatggcagaccttatcacaaagcaggaaggaaagaaaatcacccttgcctgcagctccccccgaaggcgttgtgtgcctcatctatactcagcagtttcatatgtagttccctggcagtcctccagcacataggacagatgcctcatccactccaggtggctgcttagaccttaaaccttggttttcccttcagttttttaacctagcgagagatcttgggcatcttgttttgcagaggtggctggcactcacgtgaggctgttaggagcacttcctgtatttgctacaaaccactgcagaaaggaaatgtttttaattgtcacccaccgctgtgaacacaccctcattctaagtgtctagtgatggctctgctggggcaaaggggtaaacacctgagactttagcagggttgcccagtgtgcactgccagtaaggtggcaaacagtggcgggcatctgttgtgcctgcccctttctgtccactcccttttggagcagctgggttaagagttgcagacaaggggctggagagatggctcagcagttacgaaccctgtctgctctcccagagatcctgagttcaattcccagcacccacatggtgactcacaaccatctgtaatggggcctgacgccctcttctggcctgtggatgtatatgcagcagagcactcatacatttaaataaaaattgaaaaagaaaaaaaagagttgcagacaggccagggaggcaggtgggtctctgaattcaaggccagcctgatctatagagcgagcttcaggatagccagtactacacagagaaaccttggggggaggggggcgtgtggggggaaaggaaaggaaaaaaaaaagaggcaaagagctggcgttttggttctgtttgtttagttgttagtggttccagtaacctacgaagtatttatgtcttaattagtttagtagcttgtggagcgatcagacatgcagtttgaaagaggagacaatgcttttatttttttaggcctttgaggcagatttttaagatttacttttgtttgtgtgtctgggtgctctgtcggcatagatgctgcaccacatacaagcctgtgagcctccttttgcatcctctgaaagagcatcacccagtgcttttgactgctgagtcatctccagcccttggccttagctttttggtttggtctggtttggtttgatctggtttggtctggttttcacacagcatctctctagctagccttgatggtccttgaattcactacctacatcaggctcacctcaaactcacagagacccacccacctgcctctgcttcccaagtgctgggattaaaggggtgggccaccacactcaccttgcctccacctcttaagtgtagctgtcatagacatgtaccaccatggcttagactcaaactggacacagcaccccattccctgtttcacgctggtttccacatgctaattgctttttagaacaagacaaaacagtcaaaaaaaatagcttcctaaaacttattagctttacacaaaatacaatgttatttaaaggaaggtaatgtagtctggcttttgcatctcgaagcacctcggtctgttgtgtttcatctgtctacatgatgtccggtatccatgcttagagcaggaattgcaggtaccacttggctcccgtgagcgttccctgtgccacttagggttcgtggcacacagtcgccagctgtaacggagggctggagccagtccaggcacactgggcagctctcgagagctaagcagtcctgggcagctgcctcgcctctcatgccaggcagttagcagatgagctacaggagaggctcctgtagctcagagaggtctggtgtctccaaaatttagagggaaagtatttttttctttaaactgggagtattataattggagtataaagccaagaaaattaaaagagcaataaaaattattctcagtttcctatacagaagcctttatagttgtgctgcctgtcttggatttatgtttcttattagttcaaaccattaaggggagacttcatgtcagctaatgcttcttaaagtttagactccagggactcttgacaccctcttctgggctctgtgggtactgcattcatggtgcacaaacacacagaatgttttaatttaatgtcagaccaggcatggaggccatgcttttaatcccaggattcaggaggcaggagcagttggatctctgagttcaaggacagctagagctacaaaatgagatgctgtctccaaggggttttttgttgttgctcttgttgttgttgttcttaatgtctagaccatgatttcaatgtttgaaataaaagagctcaggttaaaaatatattttaacctaataatttcctaaatggcttcagtgggttcttgccataggacctgaaaggcttcctttgtacctctctgtatcacccttggatccctacagaggccagcactccttatttttccttggaacagtcaccatatttccttgctaaccaggcctatgacctggagagggttggactcaattattagaagattctgggtacacgaagccctggaattacacatgtatacacacacacacacacacacacacacacacacacagcctgtgttgtcccaccgccgaggagctcggtgagcactttgaaggtcatagcaggtcacaggttcttaggtattgggtatcacagtaccctgttcccaaggctgggtggtaaataggagactgtcactgtttctgtgaatctaagtgaaatgctgtcctggtcctataggctgccatgacactgccagtgagtgtgtctataggccagtcagctttctcccgtcaggcggctgtccccgtggtccccttcagagcctccccagcgcatcctcgagtggctgtgctatttctgactctggcattcaagttttctgaaactgttacattagctgattgctgcttaaagtctattaaaggtcagaaccatcagcctcccagaccccgagatagatgccctcattagaggcagtgcctacgctggagaaggaagttcccagaccagcagcccctgtggcggactcctggggctccagctatgtgtcttccttcccgtccacctctgctcggccccctgttccgattgagtaggtttatagatcagaaatcgtgagctatagagtggagatattatcactcaaaaaagacggaattggggccagggttggggagaaaagaatttctaataaccaacagacagcgatgttcttgcgtttgtcttacactggggccccagaaacagtgttgtcctggctatgcactggtggtttcatttccagacacttttaacatccctttggtttggtttggtttggtttggtttggtttggtttggttttgagacaaggtttgagacaactatgtagctgagcctgtcttggaacccactctgtagaccaagctgatctggtagggatccacctgccctgcctcctgagtactgggattaaagaaaggtatatgcccagtatatactggtatatatactggtatatattaaagaaaggtatatacccagtgtccttttttagagaactagagagatctctcgacagacgttggtagagtaatgaagggatgaagaggggtgtgtgtgtgtgtgtgtgtgtgtgtgtgcgtgcgtgtgtgttttcagctataaaggaaaacaaaattatgaaatttgaaaaaatagtggatggatctggaaattaaagtcaagcagcctcagaaagatgaatcctactttcgttcacatcctggttgtgtgtgggagggggcagagggcaagtcgtggaggtggaaggacagggcttgtgcacactagagcacgtgacttgaaaacaaaaagggggacatgcccttaatctcaccactctggaggcctatagagcaagttctaggccatccaagggtacagagagaaatcgtggggggaggggggcactgggagtgaacaggtatagggtgggggagggaggagaaatggaggagaatcaacacaaacagattttgtttggaaatgctacgatgaaacctaatccttttcacgtgaatttaaaaagaggctggagagcgagctgctgtaagagtagttgctgttcttggaggaccgaatctggtccccagctcccaaacccagtggctcacaccacctgtaactcccggtgacgctgctagcattcctcccaggctccaccccgcaggtaggcctggcttgctctgaaagggactgactagtctctctgagccctctctccctctctccctctctcccctcccttccttctctttctctgtccttctgtgccccctctctttctttgcctctacttccttcccatccccattccctgtccccaaacaaactctgttttatactagacctgtgtggagtggctctcctcacggggagatgcctcagcacgggcccgccaccaccccgtaccgcgctctacaaagcacatccttggcttcacagaacacatcaacctcttctggtcttaagggtacacatgcggtgcacatatacgaaaaaaatgcttatattaattaccatttaagtttgtgcaggggaaaagaagtccctttgtgatctttcttccaggttggggctcatgcaaggaaggcctgagactttctgttgaagttttctgtcagggtcccacatacacacaaacatgccatggtctcttacataccgcccagtgtggtaccgcctagtgtggtgccgaacgctggctctgggtgtgcatttctctgtaaactctttgtaagagagctgaaaaaagtaatcaaaaaacaatttgcctaaataatactctaaaagatagacagttttaatgacccgagaaatcctaggattgagggggctacttggctaggcactcacagtgtcacagataaagttggggacttctgaggccccttcctaaataaataactggaagccagaggtgaaagagaagcatgtcccagagggctttagatagtcttggcaggacggggtatagcaagaagcccactgcatgtgccccgctccgtggcgggacttaactgtcaagcctgagaagtttcatagaacatagcgactttctcttgtttctgtggtgggatccctttgggacccactcagggcctgtcttccattgatccccttccccatcgttctgctaccttgatgtcacacctgctccttttctttcatagagctacttcttaaatcgtgcccagagtctgtgtggcccagagcatagcactgtccccgactccctgcgctggctatgccatcccttgggccagaagtttttcatggagcgaagctggtcgatcaagtcagcagccaaggagagcctgtactgcgcccagaggagcccaggtgagggtgctttctccactgcacagagctggtgacaggcgcgtcacaggagactagacactcagatgtctccaccttattttttttttccttttccttttttttgagtctcataaaggataagtaactttcttgaggtcagagcctatctgtgacttagctcggtttgcagctctgctgtgttgcctatggtcactacatgacagggccacacatgataagttgtgataagcaccagctatattcttagcccttgttctagacactttggagacgtcaaaggtatggggtgtgctgttccgtggcctcggggccttctggccccactgggagggcagagagctgtacacagagcagttagggaacaataggcagcggcaggcagtcaccagtgctcagaatggtgacagggacagggctccaggcactggaaggagatgcaggctttctgtctctggcatttgatggtgattggagtggacttgcccgggcctagcgtgcagaggctggcagggtagactcacacagggaaggaacactggagtgtttgtctgccatggtctctctgccgagtggagagtcaggctctgtgagtacagggtggatgtcagccatggggagcgggaagcttggatctggtttttgtgcagtatcaggattatgtgtggcaccaaagattgaagagaaagaaaggcaaaggaaccccagcccgtctgacagttttgtccacagggcagaccttccacagacctgctggtcctcctgcacttcccggggccaagccttctcacagagaaagtgtccagaaacatcccccctcctcttggccaaactggggctgagaacggaatggaatggacgagtgactctctaatcagggcctatcagaaaagggactcgtcagccatcatgtgctttgcagcacccctgtctagccatcttagggcgcgcgtggctgatccccggagacttgggcttctccacagtcaggagtgctgtagcccactatcctcttgtccttcttggccatcagttctcacaaagacagacagtctctcaacgttacattctctttttcttgctaaggctgtacagccattcctttacacctctgacttggaacttctgaacccggcgccagtatggtgtgtgcctgcgtggacacacgtgccctacaggggtagtttagaaccacacaaaggcctgggctgccttggcactctcatgggctaattcttatttttccttccttccttttttttttttttttttttaatttgttcattttgtttgtgtcgggtaggggcaggtgccgcagtgctcaggtcagggctgtttgtatgagccggttctcccctactgtgctagctgccgggttgaactctgtcatcaagcttggtggcaggcacgcttactcactgccatatctcgccagcccctaaagggtaatcctggctttggttaagaaagatttggtccctgttacaggcacagccatctctttaagtctctttccctgcctttttacactgtaaaaagtcttttattttattttattttatttttttccttaccgaacaagactggaatctaaagtgtcacaggtgcctgttgtcactgagatgtcccctcagccccagaagggctcatgagtaagacccttacgcttctttctcttcagctgaccccattgcccaggtacaccaggcgttctgcaaaaacctgctagaaagagcggtggagtccttggtgaaacctcaggccaagaagaaggcaggcgaccaggaagaagagagctggtaaggtccccaggccttgaatctgccctggggccagtgccctcaggcaacattcctcaccagaccagtggccagcttttcagctcagtggtctggctcagaccccacaatgcccttttttttttcactgtttatagccctccaccaactggggctagttgtcagagcaagttagaaatggatgagtttgctttgcttttggggacagagagcagtgaactgttgagagagatggagtgagatacggagagctcaccaggcaggcacagctggcccagagagtttgaaacccagctcgcagtgaacatggcttctctgtcgcagattaatgcccgataaaccaaaggatatcaaagtcccaccatcctggagtgcattgaggagtgagggcggggcagtcctacctaagcagtaggaaatctctggaagagtgtggctttggagtctagtctggaggaatagtcagggttgtccacagagggaggaaggccgagcctggggtctttgctggcacagggaagaacatctgcggaaggctggctgtgaagcacatctatcatgcgcatgggcagaacttgatctgcccggggatatgggaaaagggagccagagagggccgttcagtcttagaattggatctctaagcagccaagcttataggtgtaagcacacatgtgggtatgtcaggccataccgtacataggtgtagtctttctataggtcataaacatggcacctttttttttttttagtgaattttccagtgctctagagtatttgaaattacttcattcttttgtggactctgtgggatttgtgacctcaccattctccagcagttccgtgctcaggtcggcccttggtgagtatcaacccctctagaatcaggagtccatctcaaagcatcttcccttgtcctcggtttgcatctgcgtccgcaaggatgccccagcccatagttgtccctcatgagcaacattctctgagcagagaatattggtccttgtataatggaacagcaagtgggtcattaccacactgaggccctggctgggtagcttaggtcaggaccctttccatatgcacatacaagccacaaagggcctgagtgcctgaggctagctggtgttcaccttagctacagaaggccctggagctagcttctaacactcccgctgggaaggttcccttcttaccatccagctccccactgcctcggctacagtctcccctgctgactacagagctatggttttatttgcttctccctctaaactgccctcagaatgacagcccgtcgactgccacctctcagcctctgaagtacctgggggtatgggatgccaggctaccttggaaggatgctctcatcctagggagagaagggtcccaggaaagcagctatggtagcgtggttcatattgacttggggggttagaagaatacgtgttcttactccttttctgtcaccgggctgtccctcgctggtctcacaggatcccttgtaacatagttttaacagttgagaaacctgagactcagaagggaaactacagcaataaaaacacaaacgtgctttgccaggcagtggtggtgcccacctttagttccagcactcgggaggcagaggcaggcagatctctgcattcaaaaccagcctggtctacagagtgagttccaggacagccaggtctatacacagagcaaccctgtctcaaaaaaaaaaaaaaaaaaaaatctagcattaaagtgaacttttttgttaaacttctattccgaccagtttcctagtgataagagtaccaaatggggttactggggcataaggatgagcgtgttcaagtccttgctacatacacactaccagatcctgagggagagtgacctgaagattccttgtccatcaccacagccgagagatgccacatgcactgagtgccccttagacttggttcctgtgggtgctaatgggtgattcctgctgctgttcccatgcaggccccgatgtcatctgccggtggtggacgtccgcagtcaccatggccatcagctggctccagggagacgatgcagctgtgcgctctcgttttactgaagtagagcgggtccccaaggccctggaagtgaccgagtgcgtaagctccttggtcgtttatgtacttttcgccaaggggatcttagtgaggtagcagaagggagcaggtccagatagccatgttgatctggggtcagaactgtgtgacagatgggagctgggggagggccagaggaaccctcggtgtgtgttctgcacagagctctccaggcgcccttgcttagcacggttgcttaggatgccccttccctctgcctccgtgacgccacactgtatagaggaaatggaaacggcacagccctggcagagccagaatcagcaatgtgatgtatgtagtgcggccactgcaaggcagtcctggagcttatgtgagctccagttcccgtttccttactgctgttcgctactccccatcagccctgttggctctgtgcgtgtgtgtgtgtgtgtgtgtgtgtgtgtgagtcatggtacacatggagaagtcagaggacagcctacaggaatgggctctttccttccaccttgtaggttctagggaccagaagtccatcaacttgatggcaaacccctttaagtgctgagccatctctctgtcacctgggcaagatgcataaagaaagattttgacattcttttcaacacgtgcctgaaccttggaggtgtgcagtatttaaagatgagcaagcctgcctgctggtaccctgcatggcgttggttagatgtgggtgctcttggtaacattacaacacgcacatgcagtgaggcagagagtcccctggggtcctgtcctaaaagccaaggcacactcttgccaagaacaattctacgcagagcaccaacaggctgaggagtgggagggggcggcttgagctgtctgtttcattggggcaggccagatttcaagcccctatctggtaaatacccagccctacaatagcactcctacctgagtgtgtctgcctctgactcaggtgaagatgccgaggctcaacaagtaggttacctcaagttactgtgccactgagcctcagagccacaatggacggcaaagctgcctggcgggcatccctgcttgggttcttcttgctcctccgcccttcacaacccaacatcctgtccccaggccagagacttgtaacactgaatctgagtctccagtcacctccaggaccagttaaggactgaacagaaaaaggcttgactcggctcaaagccagcgtttcctgtctggggctggctcaaggagaccacagtggcagtatcgcagtgccagcagatgccacagcaaggagggtgtgacgacgctggcacagctgacctgtgctcacctgcttgccttctcctactcactgctctaggagtcccttggtgaaggccgtcttctatacctgtagagccatgcatgcctccctctctgggaaagctgacgggcagcagaactccttctgtcactgtgagagggccagtggtcacctgtggagcagtctcaacgtcagcggcactacttctgatccttcacttaaccatgtgagtgggagcccctggagggttcggtgtggtctgtatgaacagttccgcccaagcttacacagcctgctgggctctctgagacacagaggccagatgcacagatgaagcctactcgggcaatgtgccttttgtttccccgggcaaatgtgtttgcaccttttcttctcccgagctctcttactctcaggtcctgctagctggcagcttcctctaagtcccaagtgaacgggccagggctctgcgtttgctccaggtagtccgctgctcccttgggcctgggcccactgacagccctggtgcctctggccggctgcacacctcctggcgggcagctgtggtgcattgtagttgcattgcatgttctggcaatacctgtgcaatgtttccacagtgcatcacggaggcctgccctgactgcccacggtgccgtggccaaagaggatctaagggcaccgctgagggcctacctaaccatcgtggggaataaggacagtgtcacccctggtcccctaggaaacatcagacaggaggaacagggaactttttgggaggttagaactagctgcttcctggggttttgtctggaatgtcatggtagcggctgtcagcggaccaccacttgggtgctttatgtaagtcaggacagcttgtcagcccttcagggagagccgttgtgtcgatcacaggcttggtggcaagccattgttgggcttcctgttggtctcccttggtgtgtttcctcccaaggaaaccattgtcagtcatatttgaggaactagaaaggtttttaaggggcacccttggcgctgtggttcagggcgggagaatgggcctgggagagcatgctcagagtgcaagacccagtccaggctcctgtcccacgcatgaagatgctgctcctacacccacaacttagaaatgccagctttgcctggagggagagtttctcatctgtgtcccctgaggctatcatcaaccacaggatagtatggcccagagttggcaccttgtgcaggcatggggcagaagaggtctgggcagcatggtaccccaagtccaatgcctgcaggaaccacctaggcgagatgagaagtggccgtcagggaatctaaatggtgcatgtagagcccctctccccttagggccgcacatgctactgatggcttattgggcatcaaggaggtagcctggactcatcaggggttacacacaacgcgcagtttctgcggtgcatgcgcagagggctgccttgtaaaaggctcataacagctaagctgccattcccatttcacagatgaggaaagtaaggcttagattaagtcacatgccagggttctgtagctgccaagacaaacgtgagaataccatgtgcctctgccttcctggtggcccacctccttctcttccctcctcccactgccctctgccccaggctccgctgctgccttagtcagccccttggttcctctagaggagaaaagcctggggacctctgggtgacttaccctccaggcccatcatgggagacggaaaatgtgcacctctccccacgctgcttcctcagagaggatcttctcctgcccctcccagccaccgtgatgtgtcccttttaaagctttggttttcttacctgcagagtgatgagaacaggccacacccagcttgggggtgggcagtacagggttaatgctcccggcagatactcttctcaatccctgcccctgagttttccgcctgggttcaggccaggggctgctacctgttgggctgagggtctggcaaggggctggggtccctgaattaggtgtgggcgagtcacagtctctccctgcggtttatccctaggtgatccagctgttcacctgtgacctgctactgtcgctgaggacagcactctggcaaaagcaggccagtgccagccagctcctgggtgagacctaccatgcatccggcactgagctggccggcttccagcgggacctgggcagccttcgaaggctggcccatagcttccgcccagcctaccgcaaggtgaggcccagcagtctggtgggatgtgcaggctagcgggggtaggtctcgggtccagcactaagatgaggaccatgggttcctttgcacactgctgtgcacccggcccagagtcatgtgtcaccaaccagacctgcaagagaggtcagaggacagaggagaggctaagcagctccctccccagtcctggccacaagggcgctcaatagttgtaactactgtcagatggcagccttgcccaagagccacatggaaatggaccttcactgtagtttattttgtaagccacttgggaacttttcagctgtgctgccttctctccgcagcacccctgcctctggctgcagcatctgagttaagctctgaggaaagatgcacatctgtgcttctttacattcaagtcatcccttcattgtttacagtgctcatcagtgtaatgcagtgagcaggtggagtttgtttcaagcagagtctcaatatattccctaggcttggccttgagtctacttgagcaccttatgtgtggagtcaggcacacacctcctgacgtgtgtggcagtcggaggcagcagtaaggggagaggcatagattgtactaaacattaggggagtggctagaacttgttatgacagccaggcgagcctcaaactcactgagatctagttgacgctgcctcccagatgctagggttaaaggtgtgtaccatcatgcccagcttaaaaatgtacttaaatttttatttgacacataataatcataataatcatacatacatattacaagttatatataataagtatattacaagatagtatatgacatgtaattataattggcatatctttcacttttgtcctgattagcatacttatttacaataactacaataattgatggatttcattgtaacattcccacacaagcatacatatgtatataatgttacatatgtatgtgtgtgtgctgggctcctttcagtcccgtcagcctgtccttcccagtgctgcctctcctctcctcctcccatcagtcccctttctactcacatgcttttttgtttcattttgtaatgacccagtgagtttcatcaggcttgttcataggcatgtggggccttgccgatagccacaccactgatgataatgtccctctatctcccagcaatccgtaactgcatatagatgctcacaagaggcctgagaactcatgagctcacctcactctgtgacaggaagttggagagcccagtcttgtgcagatcttacgaggagaagtgtagcgtctgaactcaagtgcagtgctttgtgcctggaggcccatgttgctcggccctgcttccccccccccccccttcacctcaccctgttgttattgtgtaaggatccacatgctggagcctgaattattctatgagagcagaagaggacacggtatcataagtggcaaggaaaggagaaagctgggctagaagcagcgctggaggccaaggctattgttggggaagaaatccctcagccggaagtacagcctcagggtcgtactgaacactgcaggataccaagacaactggcctgggagagatccggtcatcagagcacaggcaaaggggctacttggtagtgtgcctacctacaatgcataaagccctctgtcagccccagcaccaaagaagtctcaagtgtgatggcatacacttgtaatcctagcatttgggacataaaggcacaaggatcaggaacccagttcatccttggccacatagtaaatttgaggccagcacaggctacataagaatgttcctcaagggctggagagatggctcagcggttaagagcactgactgctcttccgagggtcctgagttcaatccccagcaaccacatggtgtctcacaactatctgtaatgagatctgatgctctcttctgggctgtctcaagtcagctacagtgtacttaaatataataaataaatctttaaaaaaaaaaaagacttcctcaagaagacagacagacagacagatgtgtgccccatggtttgggctgcacctcccttttggaacccattcaggttagacctctggtctgctcacagactggctgggaccaaacgcctcccctaaaatgccctccttcctgcccgtcctcactcaggaggcttcagtgcccccacccagcatcacgagctactcaaaaggctgaaacaggactattgtaaattcaaggccagcctgggcaacttagtaagaccttgtctcaaagtcggaaaggctgaggatgtcgcccagtgtggagagcttgccaggcatgggtaaggccctagtttctctctctaagactggagaaagacaaagaagttagagacctagacctgggcctccacccaccagtggtttctgtttttacacaagcagccgatttaggccaatgagatggctcagcaggtaaaggcactggctattaagcttgatggcctgcgtccaatccacagcacccacgtggtggcagaagggaaccggctccctcccacaaactgtcctcagacctccacatgcacttaccctccacacacacatactcaaacacacaaaataaatcctgtttttctgagttggcatggtaaccatacctttaatcctagcactctggtgacagaggcaggtggatcactgtacatttgaaatctgcctggtctatatagggatttctaggccatccaggactacacagtgtgaccctgtctcaaaaccagagactggtccttggaaacatgtacccagtctgaccaatcaatctgcagcccacgtgtgagcaagagagcaacacaaaaccatacacttaaatcttgagatttctcgtgtgtgtgtgtgtgtgtgtgtgtgtgtgtgtgtgtgtgtgtgagtgtgtgtgtgtgtgatccccaatgtacagaggtagggaggattggctgtattgcagagtccttcagcatgtcccttataaaggacagtgttgggttacagtgtcaaagggctgaagaagacttccagtctagactccattcctttctgaagaaataagatattgcactcgatactgtcctagctattgcccctcatccctctctctcctcctctgtccttttgtccgactgagacacagccctcaaggacaaggcgtcacccaaaccctagagggtacctcggggctttgcaacagcagggacgttgcctctagctcctattgctcctgcccacagctggcctgtgctctgtccctttctcactgttgacataggttcctaggttggcttgaggataagatagggacacagcgattagacaggtcagacccagagtgtgattggtgccccctgtacctcccaggtgttcctgcatgaagccactgtgcgcctgatggcaggagccagccctacccgtacacaccagctgctggagcatagcctacggcggcgccccactcagaacaccaagcatggtaagtccagcagctgcctggccagaggcccgctgtagccttacacttggggagcagagagggtggagcccaggtatcggacagggtgtttccacacactgcgtgactctcttagctgcttagtgaggtggggacaaaagggaggcagcaaaaccttgttagctgaggaatcagcacacggctctaaaaacttcggatgtcctcccagtgcagcagcaaggtagaagttgcctgggtttgactatctcagcccaccaactgccaagttcatcttcttctgccctttgagaaggacagggaagagggccgaagacacctccacaggatgagggggtgtgttcaacaatcgaggccgcacaaactccttgggacagtgcttatgtaaatgtcattcccacaggagaggtagacacctggcctggccaacgagagcgagctactgccatcctgctggcctgccgccatcttcccctctctttcctgtcttccccgggccagcgggcagtgctgctggctgaagctgcccgcaccctggagaaggtgggtgaccgccgttcctgcagtgactgccagcagatgattgtcaagctgggcggtggcactgccatcgctgcctcctgaccaccgtctggggcctggtccacttctttccacctttttgtctctttctcccaggatcttccctctgtctcccagactgtctcccatctgtttctctccctcctcccagagctgtgaggatgaaggcaagactgattgttctgagctgttacctgccaaggcttttggatcatttcgggccagtaggaccatgggcagagctccttaacactgctgtggtaaatccacggtccaagcccaggcgggctgagaagagagatggcctgagcaggaacggagctctcctcagttggaagcaatgtggggcgctgcgagcccctcccagtcctctagagactgtctcctttctgcctctggttctctttgttgttgttacgtttcattccagtttttgtttttaatcaggctttctctgggaactaggtctttgcaccagagagcattttgcattctggacttgatagacgcacccctttttatacagatgtttttatatgtgtgtgctcaggcctgccgagatgcagggcaaagttgctgtggcatctttgttcctctccctgggtctgcactccctcccctgtgcctgactaagccttgttcattgttctttcatccttacaagggacagccagccaaggaggaaaggagcccagccctggggaggtgggtgggagggaggcaggggcaggtctagggatgggtgaaaaataatgtcggcattgttttttaattttttaaaaaataaatggtatcttatttaattgtcctgttccttcccactccttccccccctcccccagacggccgcctgagctcagggtgggcccatggggctggacaggatgaggtcaccattgggcctgagggccaggggtctccagcatgacttgtttgctctccctcccccaccctcactcctacctcccatagaagtgtattcttatccctagttcctgtctgagtaagccagggtggcagacgctggtcccaaacctcacccagcaaccagcctctcattttcagggcaggcagcagagacccgggtctcttgccttgagatggggggagtcctaggaagaagagtggtctggtcctgtttctgcagactgcttggctcagggcttcctgagagacttgagaggaactgtccctcctccctcatgcttctcctcatcccttcaagctggttgaagagagtaggcaggggcggggccccgaggtgcttcaaccccacctactctgccttccacctctccccaaccatcactgtaatttatggcccccgccgtggggcagcctagcccttgtgtctgtgtatatactgtgccttttctccttgtcgaggggtgggaggggttggtttttcactgaacaggggatatgcctatgtcttcatcagtgttgaaacattcaccatgtgctggacgtaggttttcaataa

SEQ ID NO: 407 - DNA, 5045 bp, Mus musculus
gtggagtcggggcgcagctcaaacatggcggcggttggcacggggcggtgaggcggtaccaggtgggggctgtcgggtgtcatgggcggtggcggcggtaccgcctccgcgtctccctgagctggacctcacgggggactctgcgccaagctgggcgatggatgagagcagcgagctgggcgttctggagaccatggagaccctcacggagctgggcgatgagctgactctcggggacatcgacgagatgctacagtttgtcagcaatcaagtgggagagttccctgatttgttttcagagcaactttgtagctccttccctggaggtggcagcaatggtggcagtggcaacaacagcagtggcagaggcaacaatggtggagccacagaccctgcagtacagcggtcattcagccaggtcccattatctaccttctctccctcagctgcctcccctcaggctccggccctgcaggtcaaagtctctcctaccccaccaagggcaacccctgttctccagccgcgaccccagccccagccccaacctccagctcagctgcagcagcagacggtgatgatcaccccgacgttcagcaccgctccgcagacgaggatcatccagcagcctttgatataccagaacgcagcgaccagctttcaagtcctgcagcctcaagtgcaaagcctcgtgacgtccccgcaggtgcagcccgtcaccatccagcagcaggtgcagacggtacaggcccagcgggtgttgacgcagacagccaatggcacactgcagacccttgcccccgccacggtacagacggtcgctgcgccacaggtgcagcaggtcccggtcctggtgcaacctcagatcattaagacagattcccttgtgttgaccacgctgaagacagatggcagccctgtcatggctgcagtccagaacccggccctcacggccctcactgcccccatccagacagccgcccttcaagtgccaaccctggtgggcagcaacgggaccattctgaccacaatgcctgtgatgatggggcaagagaaagttcctatcaagcaagtgcctggcggcgtgaagcagctggatcctcccaaagaaggagagaggcggacaacacacaatatcattgaaaagcgctaccggtcctccatcaacgacaaaatcatagagttgaaggacttagtcatggggacagatgccaagatgcacaagtctggcgttctgaggaaggccattgattacatcaaatatctgcagcaggtcaatcacaagctgcgccaggagaacatggtgctgaagctggccaatcagaaaaacaagctcctgaagggcatcgacctgggcagtctggtggacagtgatgtggacttgaaaattgatgactttaaccagaatgtccttctgatgtctccgccggcctccgactccgggtcccaggccggcttctctccctattccattgactctgagccgggcagccctctgctggatgacgcaaaggtcaaggatgaaccggactctcctcctgtggcactgggcatggtggaccgctctcgaatcctcttatgtgtcctcaccttcctgggcctctcctttaaccccttgacttccttgctgcagtggggaggggcccacaacactgaccagcacccatactcaggctcgggccgcagtgtactgtcactggagtcaggtgctgggggctggtttgactggatggttccaactctcctcctgtggctggtaaatggtgtgattgtcttgagcgtctttgtgaagctgttggtccacggggagccggtgattcgcccacactcacgcccctcagtcaccttctggagacaccggaagcaggcagacctagacctcgccaaaggtgatttcgcagctgctgctgccaacctacaaacctgcttatccgtgctgggccgggcgctgcccacctcccgcctggacttggcctgcagcctctcctggaatgtgatccgctacagcctgcagaagctgcgcctggtacgctggttactcaagaaggtcttccagcgctggcgggctactcccgccactgcagctggctttgaggatgaggctaagagcagcgcaagggatgcggcactggcctaccacaggctgcaccagctgcacatcacagggaagcttccggcgggatctgcctgttcagatgtgcacatggctctgtgtgctgtgaacctggccgagtgtgcggaggagaaaatcctaccaagcacactgattgagatccacctgacagcggccatggggctcaagacccgctgtggaggcaagctgggcttcttggctagctacttcttaaatcgtgcccagagtctgtgtggcccagagcatagcactgtccccgactccctgcgctggctatgccatcccttgggccagaagtttttcatggagcgaagctggtcgatcaagtcagcagccaaggagagcctgtactgcgcccagaggagcccagctgaccccattgcccaggtacaccaggcgttctgcaaaaacctgctagaaagagcggtggagtccttggtgaaacctcaggccaagaagaaggcaggcgaccaggaagaagagagctgtgaattttccagtgctctagagtatttgaaattacttcattcttttgtggactctgtgggatttgtgacctcaccattctccagcagttccgtgctcaggtcggcccttggccccgatgtcatctgccggtggtggacgtccgcagtcaccatggccatcagctggctccagggagacgatgcagctgtgcgctctcgttttactgaagtagagcgggtccccaaggccctggaagtgaccgagtgcgtaagctccttggtcgtttatgtacttttcgccaaggggatcttagtgaggagtcccttggtgaaggccgtcttctatacctgtagagccatgcatgcctccctctctgggaaagctgacgggcagcagaactccttctgtcactgtgagagggccagtggtcacctgtggagcagtctcaacgtcagcggcactacttctgatccttcacttaaccatgtgatccagctgttcacctgtgacctgctactgtcgctgaggacagcactctggcaaaagcaggccagtgccagccagctcctgggtgagacctaccatgcatccggcactgagctggccggcttccagcgggacctgggcagccttcgaaggctggcccatagcttccgcccagcctaccgcaaggtgttcctgcatgaagccactgtgcgcctgatggcaggagccagccctacccgtacacaccagctgctggagcatagcctacggcggcgccccactcagaacaccaagcatggagaggtagacacctggcctggccaacgagagcgagctactgccatcctgctggcctgccgccatcttcccctctctttcctgtcttccccgggccagcgggcagtgctgctggctgaagctgcccgcaccctggagaaggtgggtgaccgccgttcctgcagtgactgccagcagatgattgtcaagctgggcggtggcactgccatcgctgcctcctgaccaccgtctggggcctggtccacttctttccacctttttgtctctttctcccaggatcttccctctgtctcccagactgtctcccatctgtttctctccctcctcccagagctgtgaggatgaaggcaagactgattgttctgagctgttacctgccaaggcttttggatcatttcgggccagtaggaccatgggcagagctccttaacactgctgtggtaaatccacggtccaagcccaggcgggctgagaagagagatggcctgagcaggaacggagctctcctcagttggaagcaatgtggggcgctgcgagcccctcccagtcctctagagactgtctcctttctgcctctggttctctttgttgttgttacgtttcattccagtttttgtttttaatcaggctttctctgggaactaggtctttgcaccagagagcattttgcattctggacttgatagacgcacccctttttatacagatgtttttatatgtgtgtgctcaggcctgccgagatgcagggcaaagttgctgtggcatctttgttcctctccctgggtctgcactccctcccctgtgcctgactaagccttgttcattgttctttcatccttacaagggacagccagccaaggaggaaaggagcccagccctggggaggtgggtgggagggaggcaggggcaggtctagggatgggtgaaaaataatgtcggcattgttttttaattttttaaaaaataaatggtatcttatttaattgtcctgttccttcccactccttccccccctcccccagacggccgcctgagctcagggtgggcccatggggctggacaggatgaggtcaccattgggcctgagggccaggggtctccagcatgacttgtttgctctccctcccccaccctcactcctacctcccatagaagtgtattcttatccctagttcctgtctgagtaagccagggtggcagacgctggtcccaaacctcacccagcaaccagcctctcattttcagggcaggcagcagagacccgggtctcttgccttgagatggggggagtcctaggaagaagagtggtctggtcctgtttctgcagactgcttggctcagggcttcctgagagacttgagaggaactgtccctcctccctcatgcttctcctcatcccttcaagctggttgaagagagtaggcaggggcggggccccgaggtgcttcaaccccacctactctgccttccacctctccccaaccatcactgtaatttatggcccccgccgtggggcagcctagcccttgtgtctgtgtatatactgtgccttttctccttgtcgaggggtgggaggggttggtttttcactgaacaggggatatgcctatgtcttcatcagtgttgaaacattcaccatgtgctggacgtaggttttcaataa

SEQ ID NO: 408 - protein, 1138 aa, Mus musculus
MDESSELGVLETMLTELGDELTLGDIDEMLQFVSNQVGEFPDLFSEQLCSSFPGGGSNGGSGNNSSGRGNNGGATDPAVQRSFSQVPLSTFSPSADQAPALQVKVSPTPPRATPVLQPRPQPQPQPPAQLQQQTVMITPTFSTAPQTRIIQQPLIYQNAATSFQVLQPQVQSLVTSPQVQPVTIQQQVQTVQAQRVLTQTANGTLQTLAPATVQTVAAPQVQQVPVLVQPQIIKTDSLVLTTLKTDGSPVMAAVQNPALTALTAPIQTAALQVPTLVGSNGTILTTMPVMMGQEKVPIKQVPGGVKQLDPPKEGERRTTHNIIEKRYRSSINDKIIELKDLVMGTDAKMHKSGVLRKAIDYIKYLQQVNHKLRQENMVLKLANQKNKLLKGIDLGSLVDSDVDLKIDDFNQNVLLMSPPASDSGSQAGFSPYSIDSEPGSPLLDDAKVKDEPDSPPVGMVDRSRILLCVLTFLGLSFNPLTSLLQWGGAHNTDQHPYSGSGRSVLSLESGAGGWFDWMVPTLLLWLVNGVIVLSVFVKLLVHGEPVIRPHSRPSVTFWRHRKQADLDLAKGDFAAAAANLQTCLSVLGRALPTSRLDLACSLSWNVIRYSLQKLRLVRWLLKKVFQRWRATPATAAGFEDEAKSSARDAAYHRLHQLHITGKLPAGSACSDVHMALCAVNLAECAEEKILPSTLIEIHLTAAMGLKTRCGGKLGFLASYFLNRAQSLCGPEHSTVPDSLRWLCHPLGQKFFMERSWSIKSAAKESLYCAQRSPADPIAQVHQAFCKNLLERAVESLVKPQAKKKAGDQEEESCEFSSALEYLKLLHSFVDSVGFVTSPFSSSSVLRSALGPDVICRWWTSAVTMAISWLQGDDAAVRSRFTEVERVPKALEVTECVSSLVVYVLFAKGILVRSPLVKAVFYTCRAMHASLSGKADGQQNSFCHCERASGHLWSSLNVSGTTSDPSLNHVIQLFTCDLLLSLRTALWQKQASASQLLGETYHASGTELAGFQRDLGSLRRLAHSFRPAYRKVFLHEATVRLMAGDTRTHQLLEHSLRRRPTQNTKHGEVDTWPGQRERATAILLACRHLPLSFLSSPGQRAVLLAEAARTLEKVGDRRSCSDCQQMIVKLGGGTAIAAS

SEQ ID NO: 409 - DNA, 74361 bp, Homo sapiens
  misc_feature (1)...(74361): n = A,T,C or G
cggcgcccgggcgcaacgcaaacatggcggcgggtggcacccgtcggtgaggcggtgccgggcgggggttgtcgggtgtcatgggcggtggcgacggcaccgcccccgcgtctccctgagcgggacggcagggggggcttctgcgctgagccgggcgatggacgacagcggcgagctgggtggtctggagaccatggagaccctcacggagctgggcgacgagctgaccctgggagacatcgacggtgagtggtgggtgggtgggagtgcgggggccgcgcggggaggaaggggttacggcggcgcgcccgggtgcgcgtgcgcccaccccccgacagccccggttcgcgcgggaagaaccccgtgcgcacggtgcccccggcggtcctcaacccttccggcgctgcgagcgtgagcccgacccagctgcgccgctccgggaggccgtgggatctggggcgccgcggggccgaaagcggcgcgagggtcgcgggttccagagcgcggggctagggacgtcgcgggggcgtctcagggagcggcctaaggagagcgcgtggccgccgcctccctcgcgcgcccacacgcggtttccgtggtccgctctcccgccgcccgcgaccgcgcgtcgcacctgtcactcccttcctggccgcggggacgtctttgggattcccggggcccagcccccagtctccgcgccccgaatccctgggcttctcaggattgaccgacggccaggtcgccgggtgctccgcgaaactttgggcagcgactgcagaagcaagttgctgatgaagagagcagtggcggcggagtgtggacacatctctccgggatggagacccgggcgctcctgctgtcacgctgcaaggggaattgagcagaagaaattttgagttgtggcccctcgggtacgggctggggagcgggtggcctttgttccagcgccttaacagcggagtggaagagctggtaggagcccagggatccactcttaaaatactaattttgcgaccacgggaacaacgatttggagagggtcagcggcttgctcaaggtcacccagctggttagagcctagttcttgcagttccttggccagtattggtttttttatacccctcctttcaagaaagagtccagttgactaggctagtaatcttattaactggatagttgcactcttatgtttaggccccaaaatgctttgtattatttcacttcttcctcaacaatcctgtgagatactcttattacctctattttaatacggtaattaaagaagccgaggccaggagatgttgacttatctaaggccactcaccttagagagcttaggcagaaacacaggtgcattgtacttttcagttttcagaatgctttcatgtccaggatctcactacagccttgcaggcatgtatgatggctacatccccgttgtgcagatgaagaagcagaagcagcagaagattctcttttgggggaagagataaatgcagcagctaattgaaaaggatctgtttgccattttcccattttgcttttgtaatatttctccccttggtttgtccttgatttccattttggtcatgtgggcagtgtgataagacccttaattgaagccccagttctaaccacagactctttgctaagtgcttctaaatacagaaatgggttaacaaatgggggatggggtaggtgggggttgggaacatagcaagggcagctaacatgttttgagaacttctgtgccagacggtgttaaacagttatacacgttaatgttctcaatcttcctaacaaccctgtcaggtagagagaactgttatacttgtcatctccctctcactgatcctgaaagtgaggcccagggtggttcattaatttactgaagattacacagccagtagaaagtactgtatgtctatagctgcctacctgcaagggcacagaaagaaattcatgtgcattttgcattcctattccatgatcaattcctatttgtcttattttgtttatctgatttttaaatttaaatttttatttatttagttattttttgagacagggtctcattctgtcacccaggctggaatgcagtggcacaatcacagctcactgcagccttgaccttctgggctcaagcaatcctcccacctcagccgggaggctgggaccacagaacgcatgccaccacacccagcaaattttttgaattttgtagagatgaggtctcactatgttgccaggcacaaactcttaggctcaaatgatcctcctgccttggcctcccaaagtgctaggattacaggtgtgagccacctaaattttttttttttttttttgagatggagtttcgctattgttgcccaggctggagtgcaatggcgcgatctcggctcaccgcaacctccacctcccgagttcaggcgattctcctgtctcagcctcccgagtagctgggattacaggcatgcgccaccacgcccggctaattttgtatttttagtagagacagggtttctccatgttggtcgggctggtctccaactcccaacctcaggtgatccgcccaccttggcctcctaaagtgctgagattacaggcatgagccactgtacctggccgagccaccgtgcctggccgagccacctaattttttttagagacagtgtctggctgttgcccaggctggagtgcagtggcacaatcatagctcactgcagccttgaactcttgggcttaagcaatcctcccagctcagcttcccgagtagttaggactaaggcatgtgccaccacacctagctaatttatatatatatggtagagccagtctcactgtgttgcccaggctagtcttcaacttccaggcacatgcagtcctcctgtcttggcctcccaaagtgctgggattactggcatgagccactgtacccgaccctgtcttaatttgtaatgagtttaaattacctagtggttaatactgtctttatccccacagatttctgaataaaatggaaactaccaccctctggaaactaccacagtggttcagtggcttcataggtccattaggtttgatcccagtggaagaagattccatttctctgtccttccagaagacctggtttataacagtgcataaggctttttctcaaaatagttatataccgcacaaggaagaggtgtggctgttgtgtcacaggagacctaggggccaggtttgggaaaagtggttccatgtcttcagttgatcaacaagtattcaagtgctggctgtggtttctgagctgtaaggaatcatgaaagatagcatagaattttatggcttcatggagcttgagatgagaaactctagtgccagtatggaacagcttaaaattgcacagcacaacaagtaaaagtcagcagtgagggtagcttggtaaaggctggcttagcaggaagaccacaccaaagaggtggctcttgacctgggccttggaggacaaaaagagttgggcatgctgaaggtcagtggtctgaagataaaattatcccttgattctcacccctgtgttcccattactgaatgttagctccttgaggcagagaccttcgtttcattcccactaaattctttgaacctagaacagtgcctggcacagtgagagtgcccattaaatatttgtggaatgcctgagtgatccagtgatcttgggctgggcaggatactaattgtcttggacatggtttggagttggattagatcaaggaaatagccagcctggatgcttctaggagccggtcaggtgaggaaggggagaggcaggcagggtgagtacatttacttcctttgtatgtgtatggtggggataaggggtggatgcaacctagagagcctccaggaggtgcaggcaggcaaggatccattcattccacaatgtctgctgtgttccagtccattggtacccttcaaggatatgggctcagggaggccacattcatttactcattgaatggcttctaagtattcatgatggacaaaggataacttgagcgcgacagatcatgtgtcttctctctcacgaagcttacattcttgatggaggaaatacaagttgagtaaaataaatgaacagtttaggcagggcactgtgagcaaaataaaattgggccatattatagagtgtgactgggctagcctacttagattcggaagtccagggaggcttcttggaagagaggtatcagtgtctgtttttcaagagatgccgaagtctggatttttatttgaaatacccagatttttggccgggcacagtggctcatgcctgtaatcccagcactttgggaggccgaggtgggcggatcacctgaggtcaggagttcaagaccagcctagccaatatggtgaaaccccatctctactaaaaatacaaaaattagccgggcatggtggtacacgcctatagtcccagcaacccaggaggcagagacaggagaatcacttgaacctgggaggcagaggttgcagtaagctgagatcatgccactgcactccagcctaggcaacagaatgagactccgtctaaaaaaaaaaaaaaaaaaaatgctggacacggtggctcacacctataatcccagcactttgggaggccgaggcgggtggatcacctgaggttgggagtttgagaccagcctgaccaacatggagaaaccccgtctctactaaaaatacaaaattagccgggcgtcgtggcacatgcctgtaatcccagctactcaggaggctaaggcaggagaattgcttgaacccgggaggcagaggttgcagtgagccgagatcgcgccattgcactccagcctgggcaacaagagcaagactctgtctcaaaaaaaaaaaaaaaagaaagaaagaaagaaatacccagatttttatatgttggctcatttaaaaaaaaagtactataggcacccaataaagcatgtgtgctagttgatctctggggtcttgtactactgcagaacgtcctgttgtcccaggcccccaggtttcccataatagagtaagtctaccatttcattttgtgttatatatctctattttgagaaagggcctcatgtgccattacacaccaggtcttctggaagggcagcaaggtgggatcctcttccactgggatcaggaaagaaacagtcatggaggtgacctttttgctgggtccaaatagatgggtggcaggagcagcctgacaagtatgtgggaggagttagaacaagctgcctttggaaatgaaagtttactagagatttcttggaatatagtgtgtgtgaggaaacagtagaagatgaggtctgagaggtgaggtggagctaaattgtactgtagatgcaaggtgttttatggaagatagggaattgttgaagattttcaagtagggggtgacatattaatcatgggtttttaagaaaattgaattgtgggctgggctcagtggctcatgcctgtaatcctagcattttggtaggccgaggagggtggatcacccgaggtcaggagttcgagaccagcttggccaacatggtgaaaccccatttctactaaagatgcaaaaattagccgggcatgatggtgggcacctgtaaccccagctacctgggaagctgaggcaggagaatcgcttgaacctgggaggcggaggttgcagtgaacccagattgtgccactgtactccagcctaggtgacagagcaagaccttgtctcaaaaaaataaaagagaaagaaaagaaaattgaacggtggtgataggcaaggaagattggaggcagggaggccaattaggaaactgtagccatccaggtgtgaggtgatgaagggtgacaaatttggatgggaagtggccctcattcaaatacctttccatggcactgacttgggcctctgcttgcttctccctgcagaaatccagtttgacagagtaccctgcagtacctggcactgactaggtgttctgtaaaggtgtgtctgatgaggaaaggaaagcacctcaagttcagtctgagtgttcacaccattgggaaggttggagtggccaactgggtgagcaaggagtgagtgttggggatgtgacaggacatgtcctcactgaaggcttgtccctgaaggcagagcagagggagaattctaagatcccattaagactttgagcctggagcactgggggagttaggagtcagcagaaagagctggttaggggaaatgatgaaaatttatcttaattgtgctgaaattggggtgcctgggggtcatccattaggaaatgagatgtagatacttaggagaaggtaaaactgggatggagattgaagagagtcactgctgagtcaagaggagagaactgggagattagaggttaggaaagtgttagcttttcaaggagtagtctgtagatggtggagacaatgccacagagaacaacaaggatgacaaggccatgcaaggagtcgtgggacttggtattaggaggccaaaccttgccagaacagtcagatgagggaatccaaggcagaaaggaagcaggggtgagtgggagatgggcaggtggaagcaagtagttctctttggagaaagtagaataattttttcaatgagctgatctactttctgtcttgatgagtttgcctgttctggacaactcataaatggaatcagacaggtagcataatattgcttaggttcatcatgttgcagtgtagtgttccattgcatggacacaccgcattctgttttatctactcttcagttggtggacatttgggccgtttccactctggctacattatgaatgaagctgctacaaacttgtgtacaagttgctgtgtggacatatatgttcatttctcttgggtagatcttctacattttttgttgtttatgttttccaagagcttataataaatagtcccatttattcacatgcttagtttctttttttttttttttttttttgagacggagtctcactctgtcgcccaggctgaagtgcagtggcgcggtctcagctcactgcagcctctgcctcctgggttcaggcagttctctgcctcagcctcccaagtagctgggattataggcacccacctccacacccagctaattttttgtatttttagtagagacggggtttcaccatcttggccaggctggtcttgaactcctgaccttgtgatccacccgactcggtctcccaaagtgctgggattacagacgtgagccaccgcgcccggcccacatgcttagtttctatgttcctgtaactaatttgccctaaatcttgtgacagaaacttgcaatgtggtggtcaattcctttctttcctgtcccatctgatggctatggtttaggtctgctctcccttcacttatcttgggacaacccctaaccatcacccttgggggcaatgttgaagctcttctttcccagttcttgatttttactcacttattttagtggagcacatcctccagtggcttcctgagaaagagtacatttaggtaactcttcgaggccttgcctgtctaaaaacatctttctaccaacctcattccactttggtagtttggctgagtttagaattttaggttggacagagttttatgtcagaattttgaaggcattgtctgattatcttcttgcttctagtagagaaatctgatgccatttccattcttgatcctttgtgtgacctgttttcttctctggaagcttttgggatcctgtctttatgttctgaattccatgacaacgtgccttgatgtgactgggccgacagtcactgtcccaacttgttggggctctggagagctgtgtctgatacctgaattcatgcagtccccctgccatcagcctccttgtcacctgagcctgcagaggaacttccagtacctgagcctttccatggcactgatttgggcctctgcttgcttctctctgcagacacccagtttcatctttggcagagtatcctgcatgcagtacctggcactgaataggcactctgtaaaggtgtgtctaatgagggaaggaaagcacctcaagttcagtctgggtgttcacaccattgggaaagttggagtggccaactggctgagctaggagtgagtgttggggatggttgtggtcagcacacccctaggaggtggaggtgggagaagagtggaaactgacttcacatttctccagggagggatgctttggaaaaactgctcagtgagatgaagcacagatctgcttttcatcccttttgtacctttttaaagacataaggtatgttttgacactggagtatatatgagggttgctaacgtttgggttgaaagagctgctgttgtccacagcttatttattttccacccatttttgtctcctggtctcatccagttacatttcctgggatatgtttttggaggttgctcagatcacggcactagagtccctttgggtttctcctccctcctctgtctatttggcctcgcccttgacaaacattccccacattcacacccaggcctttggcctaatgttcttgaatgttgcttgcctctcattgaataggcttttatgtagctctcatattcagttcatattttggcattttaaaaaatatatatttttgcttctttctcaactagatcatttcactcctcaaatttgtaattaaaaaaaggaaattctcaagcagttttattcaattagaactttgcaaatatcaaattgtccgtatccttctggattcttgtctgaacattgcttatctgcgtacatatcacagtgttttcacatagggattgctgtatgttgaagtagttgaggtgtaatagccatataatctaatgtgatccatctgaataggcaaacccttgcacacctgtgtacctgttgaacattttcatcatttgcagttttttcttaacataagcactgttctgaatacttgtgaacaagtcacttgggagtttgttcatgggcgtgtatcttccaaagaggagtcttcaagttcagctgggtaacacactatcagctgtagccctttcattttaaaaacatttccagtgctgcaaattactatggtgattgggaattacaacttggaaatatttttatttttttaaaagatagtacattcatatgaatcaaaataaaatacataaaaaggtactatgaaaagtcttgctcccggccctacccactatctgcgtagtcccaccgctccctcacaagtaattaaatttttagtttcttttacctgcttcaaaatgtatttgttattacaaaagaagctaataacaaatattgattttagtttttgctttgctttcctttttgactgaaaaagttagcatgctataagccctgttcttctgtgccttgccttttcctttctgcttaccaatgtatcttatagatcatcccagactttttcactgctgcatggttttccatttgatgatgccctgtaatttattcatccagtccttttttgatggacatctgaaggtattttcagtcttctgctattaaaaacaatgctgcgaatagctttgtaaattcttcctttcacacatgtgcaagtctagaggcaggagcggttaccagaagtgggattgttggatcaaagccagggtggtgctgtctccgacatagttgtcgcaagaatccagttaggtaaaacataagaggggctggtcacagtggctcatgcctataatcccagcacttggggaggccgagccgggtgaatcatggggtcaggagatcaagaccatcctggctaacatggtgaaaccctgtctcgactaaaaaatacaaaaaattagccgggcgtggtggcatgagcctgtaatcccagctacgtgggaggctgaggcaggagaatcgcttgaatccaggaggtggaggttgcagtgagctgaaatcgcaccactgtattctagctgggacaccagagcgagacgtccgtctcaaaaaaaaaaaaaagattataatggagctattgccataccatctaggtgtgtgtaagtatactctgtgatgtttgcacaatgaagcagttgcctaatgacacatttctcagaatgaatcctgttgtcaagtgacacatgactttatttgataatgaatacaagaccatttcatcttgatcccagatagatacattgagatgcattgatgttctctaagtgaacgtgactcatcctgttctttattagttattgactgtttccgtagtcacctctactttttgatcgttcaccaggttttgaaatcactgtgtaggcagcacccactatgcagttcaaaactttatgtaggcctgttttgtactgggctccaggttcagtgctggcaaataaacaagttccttgttctcacagaatgtgtatggccttgggtgccaggcaccgttccatgccttaacctacattcgtctcataatacgtttttgcatgcaatcttttcttcaattctgtggtatgctgcaggtgaagaaactgaggcatagatcacgtagcttgtaagtgatggaacagtggcctaaatccaacatgtgcaactttagaacccatgtatttttcctctgtcccatgccctgtctgatgtaagcaggcttctaagttgcaaataccaggtggtgtggtgtgctttgaagctatttattcaacatgtgtttatcaagaagtgtctgtccaggcgcagtagctcatacctgtaatcctagcactttgggaggccaagatgagaggatcccttgagcccaggagtttgagactagcctgggcaacatacctggacaacatagtgagaccccatttctgtaaaaaaaaaaaaaatacaaaaattagccaggcttggtggcaccagcctgtagtcccaactacttgggaggctgaggtgggaggatcacttgagcctaagaggctgaagatacagtgagtcaagatcacaccactgcacttcagcctcgtcaacagagcgagaccctgtctcaaaaaaaaaaaaatacatacacacacacacacacacacacacacacacacgtatatgtatatatattttttaaattaagaaaaaatgtctgctctatgctggacacttaaagtgacttcccctgggtcctagggtactttctgagccttaatttcctctgtaaggtgggggttgggtaccttagctcacttagttcttgcagcacctatgatgtagctaaggtacaaaaaaggaagaggacaggacctaacctcttttggctctatttaaaaatgaatgaggaactgaatgaacttcagtttgcacattgatgtaggactaggggacctgtttttagaatatgtttggaaatgtttattttttccttttgaaatggcttttgtaggtgtggtagtgggacacagaggagcagtcacagagtgtggtgcaagtgaccacaaaattaagggttaaactttgttgacatgatggaattttttagagtagcagaatcccagagcctgtgccttaaggtaaggctccctggggaactttgtttagaaatgaatcctaaactatcgaagggcttgcaaactagaaaatttctgcatatctcaggccttgagaattgctaatggatatgtatctaaatgtcccttacaagcttgctcctccacgtggccctgtggaacaggtctgttgggttcaggatctagtttggaacagtgatgaaatttcgagctgctgaaccagatatggaactgctttgctaacctggtgtctgcccagcttaagccctctccatcccacagctgtgaaaggaaatcatgcttcttcccaagtgctaacattcctgtgaggccttacactttacccaagtcctcctgatacatttgtcttcctaataagtgctataaaattgaggcttgatttccacccccaccccccacccccacaagagtcctgctctgtcgcccaggctagggtgcagtggcacgatctctgctcactgcgacctctgcctcctgggttcaagcaattctcctgtctcctgtaatcccgagtagctgggattacaggtgtgtgccactatgccaggctaatttttgtatttttagtaaagatgaggtttcaacatgttggccatgctggtcttgaactccttacctcgtgatccacctgccttggcctcccaaagtgctgcgattacaggtgtgagccactgcgcctgcccatggcttgatttttatgcccattttccatggacatagatgaaggcactgagacagagaaattagatgatttgccaatgcttcctatgctgatgacggggaatgaacttggattttctgatgtgggattccatattcttcgctgtcctatgaaaatgaggtgggagatgccttgattcaggaagcctgtctgtctaggagccccttctctggtcaaaagttgtttttaaaaaatccttgctgcatttcaacgtgaatgagtatccactgtattcatagcacagtgctagaagctgttagagttgaatgaaatggcctctgctttcagggagctaacatgtaaacatccagtcataatacatgggaaaatacaacagaggctataacagaggaacaactctaaatctttggaggactgaggaagggaattagaaaaatcttcacaaggactttggcatttgggctgaattgtgaagggtgagtaaataggattttagaaggtaaaggagcaggcatggtgtttatttagatagatttagacaaagttgggaataatttggcatgctctaggaatatgtgtgtcagagtactgcataggacagaggttctcaaacttgaatgtgtctatgaactcccagggtatacccccaaagatctgaatgtggaaggtctgggatgttgtccaacaggaacacctaactagtggagggggcaggatcagaggagccttctcagggataagctgaggtcttaaagggtggaaggagagagcagctgtgttccaggctgagtgaacagccattttgaagggcttgaccagtgctggtgctcgagtgtctgggttttgtgtagaccacactcttgataactgtgctgttcgttatcttccacaaacagggttttggtcaggtgcctccttgcttcagtgtgttctttatcagtcaggattcttggtgataagcagcagaaaccgcttctatctagcttgaacagaaaaggatttgttagaagggtggttcttggagtgactagaaaagctggagagccaatttggaaaatgggccagaaccaaggaggctcctgcttagtactcctccgccttcatgatctgtatattgtctctgctttcctgggtcattccctcaagggtcgcactcctggtgggaggatgcattaatcagagctgactggcaggaaaccttccctcacatgaggactgcccaatggggattctccaaaggaagatcagggtgctaatgggagggtcgggtctgatgatggacaaatggaacaaaagtggcaaatgcccaccatgtattctgtgcctttccttgcctctgaaataaaagcagtttctgccgccaaatatacatggtagcattaagtcaggcctttcacaggcagctccatctctccattttgcaccgtgctgtctctacttcagcagctggcaggacatttcctgatactgtggttttgctcaaactatttcctttgcctggaatacccttccctctctctaatttataaacccttttcatccgttaagctcggttttcactgcctgccaggatggatcagtcctttctctgctctctgacagccctttctttgtgaggcacttgtctgttcttgcccttgtcgcagtttatggagttggttaggtttctctttcttctctgtgagcatgggagatgggaagaaaacgaatacttttcagtctttgccctgtgcggagttccacacaaggcacataggatcctccagctcccagcccagagtacatagcgtatgcaaatttgagtggatgtttgtatttgtagcgtgatttgataacctgctttgcaagtattctttttctctttagttttagggagatttgggggcatggtaatggatggaagggtaagatggtgggatgttggggtctttcatttttgcctgaatggtttaagggctgaaaaaggttgagatctcttgctttgtagactctgcccccaggaggaggacagttcaggtgaagtggcttgtgcctgattttgttggcagtgggtcacctgaaatgtgaaatgtgagggcctccttttgcagaacagggtcatgcaggatcagttccttggagtctcactctgcatctcactcaattttgtagtctcctgctaaaagagagtgaaagagggaacagtatgatgccagggcagcagcaggtgaagagctgggagatacaggaaagacctgggatgacacatccttctctgtctgagcttggggcattcactctactcattcgtgaatgaagcacttactgagcacctgtccagtgtcaggctgtctttggtgatatccgtatgatgatagaaccaaagcatctgcattatgtggtagctaagagcttgactttaaatcccagctccaccacctgctgactgggtgacattagacaagttacttagcctctgagtgcctcattttccttacctgtaaagtggagatgataatggcatctacctcaaagtgtcattgagattaaacgaaatttgtgtaaagtgtttaattgctgatacatagtaagagctcagcaaatgttaattcctgtactttttaaaaatcattactactaatttgctcagtttttcttcttgattgttgttctcaaagtctgtttcttttatttattttcattattattattattttttttttttttgagacggagtctcgctctgtcgcccaggctggagtgcagtggcgcaaactcggctcagtgcaagctccgcctcccgggttcatggcattctcctgcctcagcttcccgagtagctgggactacaggcgcccgccaccacgcccagctaatttttttttgtatttttatttatttattattattatactttgagttttagggtacatgtgcacaatgtgcaggttagttacatatgtatacatgtgcagtgctggtgcgctgtacccactaactcgtcatctagcattaggtatatctcccaatgctatccctccctcctccccctgtatttttttagtagagacggagtttcaccgtgttagccaggatgatctcaatctcctgacctcatgatccgcccaccgtggcctcccaaagtgctgggattacaggcgtgagccaccgcgcctggccttcaaagtctgtttttaatagagcagtcatttaaaaataataagtgggataagagagacagcctttcaaacatgggatgacaagaatctgatgtctgtgttttagcattaggcaaggattggagtccctggctgcagcaagggtggggctcttgcatgggtcgggactctggttgattgcagcatcgtagagcctaactgctgggaggtggggcaaccccagcgagaaactcctaggaggaagcacctccctgtggtggttggggcaacttgtggagcagggtgcttgagaaaagagcacagggcttagaggaaggagtaaggctcctatctctgtctgctactcgctccccacctgcctgagatggtgtgcaggtcaccccctctttggacttggacttttcttcctgtgtaaaaaccaccaccaagaccgcttttcaagcacttactgccaggcactcactatcccaggtgatttacatatattaactcacttaaaacagtgcttgaaatggctacctcacagggtgattttgaagattatataacacagtgtgtgaaagtagaagtgttaaaaggaaaaataagggagccacagtgttaatgaagttattttccagtaaaaaaaatcatgtttaaactttgtatatgaatatatacatacgtatatatacactgaagtaaatagtactgaaaacagcaacaacagctttttaagcaacattccagcaggttcctcttgtaccatgtatccctttttatcctaacactttgcatgcagtcctggcagatttattatttatttatttatttatttattttttggagatggggtctcactgtgttgcccaggctggagtgcaatggcgcgatctcagctactgcaaactctgccttccagattcaagcgattctcctgcctcagcctcccaagtagctgggattacaggtgcttgccgccacgcccggctaacttttgtatttttagagaaatggggtttcaccatgttaccaggccaggctggtcttgaactcctgacttcaggtgatcctcccgccttagcctcccaaagtgctgggattacaggtgtgagccaccgcacccgccccaacagatgtttttacagaggttttctaccataacatgtgcctcttgaaggcatttatttttgtatctggcacatagtaggatctcagttaatgtttcttgaatgcgtgtcttaagggatgtatcttttattaaaatgtatacttaaaaagagagagattgttctagaaaacagcatcttgtcaaggcatatggtctcatttgaagaataatttaataatttggataggaaggtatacttgtaaaatacagccagtcaaaaatatcttttccccattccccttgatgcgtccattacatacatgttcaccctgagattgatcttccatcagcattgaaatgaacattgaaagtaataagatgggccgggcttggtgactcacgcctgtaatcccagcactttgggaggcggaggtgggtggatcacgaggtcaggagatcgagaccatcctgactaacatggtgaaaccccgtctctgttaaaaaaatacaaaaaattagccgggcgtagtggcacacacctgtagtcccagctactcgggaggctgaggcgagagaatcgctttaacctgggaggcggagtttgcagtgagccgagattaccccactgcactctagcctgggtgacagagtgagactccgtctcaaaagaaaaaaagaaagtaatgagatggggctgggcgccgtggcttacgcctgtaatcccagcactttgggaggccgaggcaggtggatcacaagggcaggagatcaagaccatcctggctaacatggtgaaaccctgtctctactaaaaataccaaaaattagccaggtgtggtggcgggcacctgtagtcccagctactcaggagggtgaggcaggagaatcacttcagaaccagggaggcggaggttgcagtgagccgagatggtgccactgcactccagcctggcaacagagcgagactccatctcaaaaaaaaaaaaaaagtaatgacatgattacctaagtgcccctccacacagccccaaatctcctttgttgtcactccgagtctgtcttacagcttttccccaagttgtgatgagcataaatgtaaaatccaagaaatgtttattttgtaaggggaaaaaagtgtgggtagaggagagactcagacaaacctaaatatagatataaattcaaatctcagttcagccactttgtagcttatgtagggggctttggcaaattatctaatttctttgaatcttagattcctcacttttttctttcttttttttgagatagcctctgtcccctgggctggagtacagtggagagatcttggctcactgcaacctctgcctccagggttcaagtgattctcctgcctcagcctcccgagtagctcggattacaggtgcccaccaccacgcccagctaatttttgtatttttggtagagatggggtttcaccatgttggccaggctggtcttgaactcctgacctcaagtgatccgcccacctcggcctcccaaagtgctgggattacaggcgtgagccaccaagcccggccagtttcctcacttttaaaacataataatattggtctcagggttgatataacgtactaagtgggtatcagtggtagctacttttatgttgtcctcatggaggacatgaatgaatttaatttcagtaatattaccttctgtactggtaatatttattctgtaaataaaatataaatatgctttctacccagaaaataagtttattagctttgtcacttcattggttttgttcttaaatatcaatagtgcaaccactggcttttattcaaaggtttaattggaatctaacctggggattttcccctttttaaatttatgtttaaaaaaaaaaactatggaaagtcggcatggtctgggctgcttgggagcctgaggcaggaggatcacttgagtccaggaatttgagactctcctgggcaacatagtaaggccctgcttcttttagtctttttgtttgtttgtttgtttttttgagatgaagtcttgctcttgtcccccagtctggagtgcaatggcgcgatctcgcctcactgcaacctccacctcccgggttcaagcgattctcctgcctcagccttccaagtagctgggattacaggtgcgtaccaccacgcccagctgattttttgtattttaagtagagagagggtttcaccctgttggccaggctgatcttgaactcctgactgcaggtgatccacccgcctcggcctcccaaagtgctggtattacaggcatgagccaccgcacccagccaataaggccttgcttctaaagacactttaaaaaaaaaacaaagcggccgggcgcggtggctcacgcctgtaatcccagcactttgtggggccaaggggggtggatcacaaggtcaggagatcaagaccatcctggctaacacggtgaaaccccgtctctactaaaaaatacgaaaaattagccgggcatggtagcggatgcctgtagtctcagctacttgggaggctgaggcaggagaatggtgtgaacccgggaggtggagcttgcagtgagcagagattgtgccactgcactccagcctgggcgatagagagagactccatctcaaacaaacaaacaaacaaaaggcaaacctatggggacctggcctgggagtgaaggagggagggaggcagggagggaggaaggaaaaaaccagaaaaaaaaagtgaaaaaattaaatacattttattatgtgcttgatgtatttttctgtgtattgatatatatccatcagtttggattattcccatatttacaattaagtaactgagtctcaaggaaattaattaatttttcaaagatagcacagtgattacattattggagtcacagccacttctctttgaatttaatcgtgacatctccattcagtttggccttgcaaaacgggccttggtttagctttttgacatcttgcctttctccttaaatctgatcccttgtcactctttttttatttttttgttttttcctctcctgactttcatctgaaaccctgaaccctacaggccatgggagatgacctgtttcccagttttggtcactttttgggccatatttataaccaaaactcttatttaaccagttttcagaaaattctcagcttcttcatcaattgatgaagttatctgactgactttttattccagccattctcatactctcagaatgattttttttttttttttttttttttttttggggtagatggagttttgctctttttgctctttttgcctaggctggagtgcagtggcacagtctcagctcactgcaccctccacctcctgggttcaagtgattcttctgcctcagcctcccaagtagctgcaggcatgtgccaccatgcccagctaatttttttatttttagtagagacggggtttcaccatgttggccaggcttgtctcgaactcctgacctcaagtgatccacccgccttggcgtcccaaagtgctgggattacaggcatgagccactgtgcccggccagtgattcttaattagttcatgatattttggagttctaggcaggacagcagcctctgcctcctcaaccccatgtaaaccagaatgagcaactgctgggctggaggagctctccttcttagagcattgtgggacaacttgctatgagttctccttcattttttcatttcaccaccatgagttgtagggccctttgtgctttggcccctaacaacttgcccagtatggtgccctgcccatcacccattgtcttcaacaacctatcatgcagctccatgtctccctgccttggctcttgaggttccctggcctagactgtactttgcatcctgatcagccttcaatccaactccttcagggaactattgacttgctggattctgtgattttgtcatgttccctgtgtctctttggtgtcttgcagatgcacatctctgctgtgacaatcttcacaaaccatattgtgatcctttcactaactctttgaggtcaaggactaatttattatctctgtgcctggtacacagtggatgcttaacccgttgaaatccttctgtatttacatacttacctccctaaaagtgaaagctttgcagaaattacatagatctgtccagattttccaggctagtctaacttttaaaaatatcttattccattatgaggtgaaacatcccttctagtttctggttcagaaagcatgatcggtcaggtgcagtggctcacgcctgtaatcccagcactttgggaggccgcggcaggtggatcacaaggtcaggagatcaagaccatcctggctaacacggtgaaaccccgtctctactaaaaatacaaaaaattagctgggcgtggtggcgggcgcctgtagtcccagctactcgggaggctgaggcaggagaatggcgtgaacccgggaggcggagcttgcagtgagctgagatcacgccactgcactccatcctgggcgacagagcgagactccatctcaaaaaaaaaaaaaaaagaagaaagcatgatcaccatttttataagttgcatgaaagttgctattgagagcatttcagtgagtcagtgccagtttttttgttgttgttgttttgtgttttgtgtttttttgtttttgtttttgttttgagatggcgtttcactcttgccacccaggctggagtgcagtggcgcgatctcgactcactgcaacccctgcctcccaggttcaagtgataactgcctcagccttccgagtagctgggattacaggcacccacccccacactcagataatttttatatttttagtagagatggggtttcaccatgttggccaggctagtctcgaactcctgacctcaggtgatccacccgcctcggcctcccaaagtgctgagattgcaggggtgaaccaccatgcccggcctggcttttgttttttaataccagtatgcttggtgcttgaagcggtacagggaaaggaacattttctccatgcactcatagaacacaagacataagaaaaacatctttaagatttatttatttagaatccgggggtggtggctcattcctataatcccagcactttgggaggctgaggcgggcagatcacttgaggccaggagttcaagaccagcctggccaacatggtgaaacccggtctcaactgaaaatacaaaaattagccgggtttggtggtacgtgcctgtaatgccagctactcaggagcctgaggcttgagaattgcttgaacgtgggaggcggaggtggagccagaggctgcagtgagctgagatcacaccactgcactccagcctgggcgacagagtgagactctgtctcaaaaaataataaaataaaatttatttatttagtgaccttgtctcactttgttgcctaggccgaccttgaattcctaggttcaagcgatcctcccatcttagcctcccgtgtagctggaccaacaggcatgtgcagcattaaaaaaaaaaaaaaaacttactatgtgtaatatagcaaagttttttaaaagttaaaaacatagccttgaactaaaacatcatgagcacatgtcagaaatttattaacattgttaatgaagataacaggatgacaaatggatcaaaggagactgcaagaaactgatatttacatagaaaaaagaatgcaggaataagattgcaaatttaaatacaaaactagggccagattccgtggttcatgcctgtaatctcaggactttgggagactgaggcgagtggatcacttgaggtcaggagctgaagaccagcctagccaacatggttaaattaaacttcgtctactaaaaatacaaaaattagctgggtgtggtggcgggcacctgtagtcccagctacttgggagactgaggcgggagaattgaaactgggaagtggaggttgcagtgagccaagattgtgccactgcactccagcctgggtgacagagcgagactctggctcaaaaaaaacgcaaaactagttaatgtcctacagtgcaatgaaaacaaaagcttaaaggttttcttttctaccagacagaaatgattttaacttaacaattttctgcaggctaacatctaactttacagaatgggagccttaatcggtagtaaatagaaagtcaaacaaggtgatggttccatagagcatcagataacttttaggcaggcagcttagacagtgctgtagtataactttttttttttttttttgagtcaggggtcttgctctgttgttccaggcttgagtacagtggtacagtcgtggctcactgcagccttgaactctggcctcaagtgatcctcccacctcagcctcccaagtagctgggactacaggcatgtgccacgaggcctgaccaagtttttttattttttagagagatggggtctcactattttgtccaggctggaatgcagtagcatgatcatgcctcactgcagcctcaaactcctggccttaagtgatcctcctgccttagcctcctgagtaactggaattttagtataactttaaagaggcatataacgtttttttttggtcttatttccaagttttagttaatttttctttcctgttttcttgagacatggtcttggtctgtcacccaggttggagtacagtggcacaaactctgctcactgcaaccttcacctcccaggcttaagcaatcctcccacctcagcctgccgagtagctgggcctacaggtgcgtgccaccatgccccctgctaaagtttgtattttttgtagagatggagtctcgctatgttgcccaagctggtctcaaactcctgaacttgagcgatctggccacctcagcctctcaaagtgctgggattacaggcatgtgccaccacacctggccaataattttctttaacaaaataaatcacaattgagttcaagaactaaaagatgactagatcatctgaggtggaaaagagtccctggtaaaagtaattttaaatagttttgaagtagaattgtgaaattcagagtttggagaaaggaagagggtggtcacaagtagaaaagagaagacatggcacttacattcaaagaaagattgccctaccccacccctcaaaggcatgtgcagaagagggagtgagtacttttccagggtggatgatgaactaaagtgggtgggaagtgaaaacctttggaacagaagggagcagttcataggaagcttggaagcttgtgttaaagaatttgatttgattaagggccgggcacggannnnnnnnnnnnnnnnnnnnatttgattaagggccgggcacggtggcttatgcctataatcccagcactttgggaggctgaggcaggtggatcacctaaggtcaggagttcaagaccagcctggccaacacgaagtctctactaaaaatacaaaaattagctgggcgtggtggcaggcggctgtaatcccggctacatgggaggctgagacaggagagttgcttgaacctgggagacagaagttgcagtgagctgagatcatgccactgcactccagcctgggcaacagagcaagactctgtctcaaaaaaaaaaaaaaaagaatttgatttgatttaaaaggctgttggatgaacaagatactcaaagaagatgttcgtcactgggtaggaggctatggttgaaattaaggcagagtgtggacgggagtgaagaggtaaatccatgatgctaaggaaggagacttgagtgaacttaaggcaggaggaaaaagaaagagcaatggaaagtggagctgcagatccctctcctgttcaaactatgagagctggctcaggtcccctgctatagtgggccagaaaagcctggacttccactgctttttcctgcagagctgagtccctccagggctgccatgagaggcggggagagagagcactagacagagaagaccagaagaccatttgagaattcctttgggtttccttcatgattcctttttcttctcattctgaattgttttattttattatgtaatattcggtatatgcaaaggaatatatgacacctttgtgtgtattacaaaacaagcatttgagaatccgcacctctccacccaatttttctttgtggtttctttgccagtaaaagagttcactcatctgttgcttaaaatataggatgcttgagtcaccagcttgccatcctgtgtcattcaacacctcctccagactcttcgcaggaaggtgacccagaaaccccttgaaggacatgataccgtccctgtgctctgatgtgccccctggtgtttgagtggagtgatttttagatagcggtttgcctgttaaaaccttccctttgttccctatattattgcttgcattttagggcttctcagttgaaggatgtggttgaaagagcccagttcctcagctgctcctctgggtgactagagtgtgggtaactgatgttttaggtcctggagaaagcagtgatgatcacaaatagtagaatggagaaatggttatctcatattgatcttcaggtttgttactagtctacatttggttttttaaataattattagaaaaaaacattgtgggtggggagataggatcattatgatgaaacagttctgtacattcaatcaggatacttgttgggaattagattttgcatttacctccctcactggtgtggtccatctcattttcagtggcctacacacatcacacaccattattatttccatgttcttgtacttgttgggcagctctaatatgaaagataaaatgaacgaaaagtacaaatgaagaaagtttaggtgactattcctctgatcttgaggatgagggtttttcttaagcgttacacagaagccatgtaatttcactatacaatgtaaaaatggtgtatagtcagttctgctatagttcatcatgtgcatttctaaaaatcatgccatgcgaaatcatgcagtaaaaaacacggagtgggcatgttggctcatgcttgtaatcaggaggctaaggtgggaggatcgcatgaggcagggagttcaagaccagcctgggcaacaaagcaagacccagtctctcttacaaataaaaaataaaaattatctggacatggtggtgtgtgcctgtactcccagctacccaagaggctgcagtggaggatcccttaagcccaggaggtagaggccacagtgagctatgatcacatcactgcactccagcctgggtgacagagtaagaccctgtctctaaaacagaaacccagaacttactgtgaaatggagggttaaggatcacaacaataaaaaatctcataggtgaccaaaaaaaggaaaagatttattttttaaaaaagatagggacctgccgggcacagtggctcacacctgtaatcccagcactttggaaggctgaggcgggtggatcacgaggtcaggggttcgagaccagcctgaccaacatggtgaaaccccgtctctactgggcgtggtggcgggcgcctgtaatcccagctactcaggaggctgaggcaggagaagtgcttgaacccaggaggtggaggttgcagtgagccgagatcccgccactgcactccagcctgggcgacagagcaagactccgtctcaaaaaaaaaaaaaaaagtggggggacctaataaaacagtcacacagttttatagaccagaaaaactaagaaatatataaataccacaatgaaaaggcactttggcttgaaaaacacctgaggtttgcttgtgggaagtaagtgtcattaggttacagcttgggagttatcaggaagtggtggaaggagggctgtctgaagtccaatggaaagttctgacatcaatgtgatgaatgtgattcataacacatgcagtgacctgatgaagctggtagatgtttaaggtgcctgtgtatgtgtgtgcacattttgtgcattcctgcatggctcatttcagccgaatatggttttctgcacttcctagtgtttttctcatgcataagcaaatgcaaaatttatattatgctcagattgtttctggatgtatctgatgcatttgaacaaattcacattttcaaagtaagagttaaagcaaaagtgtcaaaaaaaaaaaacccactatgaataatgtgtactagctaatactaagtgccaggcatggtgccatagattccacatgagttatctcatcaatccgtgagttagctgtaattgttagccacaatgtacagttgagaaaaactgcagctgaaagaggtaaaacttgccccaggttccaaggctaggatatggtgattctttttttttttttttttttttttttttttgagacggagtctcgctctgtcacccaggctggagtgcagtggcgcaatctcggtgcaagctccgcctcccaggttctcgccattctcctgcctcaaccgcccaagtagctgggactacaggcgcccgccaccacgcccagctaattttttatatttttagtagagacggggtttcaccgtgttagccaggatggtctcgatctcctgacctcatgatccgcccgcctcggcctcccaaagtgctgggattacaggcgtgagccaccgcgccaggccgacatggtgattcttaattgctatgtcattctttttttctgaacatattaaaagagaaataacaaagtgggggaagtacttgcagacatttaagaagaataagtatctataatatctggaagttttttaaatcagtgaaaaaaaaaaaaagacaaaatagcctgatagcaaaaatggacgaaggtcaagagcaggcggtttacaaaggaagaaatgcaaatgctcaataaaattgggactttagaaaaaaaaaagactttcagcctcagttagtactcagtcatgcaagacaaaacaattccatgttggttttttccactatcagattgacagaaatggctgtgaggaaacactagcaggagcatagatttttgaaacctttccaaagcatgtatagtggtcctttgacccagccatctaacttctaggaatttatcctaagaaaatagagaagtgggggaacaaaagagttgttaataatgccgaataacttgctgggtgtggtggcacacgcctgtaatcccagcactttgggaggccaagtcaagaggatcgcttgagcccaggagtttgagaccagcttagacaacatagggagactctgtctccacaaaaaaaagatttctttaaagttagccaggtttggtgatgcatgcttgtagtcccagctactcaggagtctgaggtgggaggattgcttaagcacaggaggtagaggctgcattgagccccaccactgccttccagcctgggcaagagagcaagaccctgtctcaaaaaaataaaaaaaaaagataaggctgaaaaatttaaagcaatttttcatcattaagttaaacaaattttaatacactggtacagtacaatggcacacagaatgataccgtgggactctgaaaaggatgatgttacgtctgtaatggttgacactgaatgttcttcatatttattaaccaaagggaacagggtgcaaagtagcatgttcagtgtgatctcatttttgtaaaacaatttgcatgcatgtgcatgcttaagtgtgcaagcaagccttgtagaggaagaaatctggaagggcacacattaaaacattgacaatgggccgggcgctgtggctcacgcctgtaatcccagcactttgggaggccgaggcaggtggatcacaaggtcagcagttcgagacgagcctgtccattgtggtgaaaccccctctctactaaaaatacaaaaattagctgggcatggtggcacgcacctgtaatcccacctactcagtgggattacaccgggaggctgaggcaggagaattgcttgaacctgggatgtggaggttgtggtgagccaagatcatgccactgcactctagcctgggcaactgagtaagactccatttaaaaaaaaaaaaattgacaatggatgactcaagaatagtggaactgctggatgatttttatttttgttcttttcatttatatgctttctaaatttttctttagtgaatatattacttttatgattttaacaaattattaaaaacagggccaggcgcagtggctcacacctgtaatcctagcactttgagaggccgaggtaggcggatcatctgaggtcaggagttcgagaccagcctggccaacatggtgaaaccctgtctctactaaaaatacaaaaattagcagggcgtggtggtgtgtgcctgtagccccagctacttgggaggctgaggcagaagaatcacttgaacccaggaggtggaggttgcagtgagccgagattgcaccactgcacgcctgggcaacagagcgagactttgtctcaaaaaaaaaaaaaattattaaaaacattgtctaacacaaggtgcataataaatacaaaatataagaataaatgacctttgtaaactaggtttcccagcccctaatagggctgggtaacaaatacctgttaaaggattattgactgaatctgtaatttggagaaactgtaaccctatttggaggcttcacattctttattcttgaccagaattaatttaaccagatttcaggttacctcattctcaggtagatgctgaaggctgagctgagcaaagtgatatttatgttacctccaagccacaagctccataaagttcatgtgaactcagggtctctttgtgagtcatggggctgcttgcaatgcacggatgataacaggaacctctaattttggttatttgcttttagagaccagaacccagatacagtttcctggggcctcacctactttgttaagcaacttagctataagtttacaaagcagctaaaaacaggagcaggggagtgagatgagcttgagcgtgccagcctagctcgtgggaggcctgtctctggccctgagctttgtggcctgccgtaggaactggagcttcattttcaaagctccataaaactcgccttctcccgggcctcccttttctgagtttcatggctctctgtggaaatgacagcctgtgtaatcacagaatgtgaatgatcagagcagggaacagtgaggagccattaggacattcccatgggtgtagctcacagttacaaagcacaactacaccctggttctccaggcctcctctttcctggcaccgcagaccagatggggtcctggagaggctctgcgtgcccttctggagcttcccatcactcctttctgcagatgttcatcttaacagcccctctgtgccactcagcccagtacccggctgcccggctgactggagatggctccactggagctttttgtgtgtgggttgaaagggacttttttattttaatttaagtagtctcattccatctgcctacacactcttacgcttcgtgaactaagctttctgacctgtgtaggttacttcaccacaccagcccatatctttcccacaaaagggtttcaagagtacttgacaaaatgagatcagtgcacccacatgcctgtgtagtgggtgctctggaagtaccgccaacattgacctgcataagggtctacccttcaccaagcacttcggataaattatcttattaatcctcagggcaaagaggccaagtgtgtattttcaaagcagccttttgtagtgaggaaaccaaggcttaaagagaagtatcttgcccacgctcacaccactgattaggtgggcctccagagactcacacctaggcctgactaccaccaaagcctgtgcgcatctatgaggccaccctggccttctgccctccttagctttccatggatggaaactgtcggccagtgtgtgatattcttctggctctgtgttacagccctctgtattgatttcttacagagttgggattttgggggaattctaaaaggttcaacaaattcttagatttctcttagtcattttcttaaagcattttataatcttgtacttggagtgtgtcagcactaaattatgttttgtttaaatgtactgaatttgaggacatttctcagtttaatcatgtcacggaattggaattggttagtacaagctgcaatatctgtagcaatctgcccatttctccctcgcacaaggctgagtgaggacagagcttagtgtcaagatgttggtaaataataccactatgtaggaatgtagtctggtgagatgctgtttttcccagcaggtttaactgactgaatacttaaggtgcccagattgaaatgcaaagctccagttatcccatatggagactacactagaaagccccagcagctttatttatttacatttatttatttatctatctatttatttatttattttttgggacggagtcttgctctgttccctaggctggagtacagtgacgcagtcatctcggcttactgcaacctctgcctcctgggttcaagcgattctcctgcctcagcctcccgagtagctgggattacaggcacccaccaccatgcctggctaatttttgtagtagacaggggttttcaccatgtttgtcaggctggtctcgaactcctgacttcaggtgatccacctgccttggcctcccaaagtgctgggattacaagcataagccaccacccctggcctatttacatttaattatgatttatttttcctatccttctgcaagcatatatatatatatatatatatatatatatatatatacacacacacacacacacacacaaaatatcaaaatatatatatatatgtatatatatatatatttttttttttttttgagactgagtctcgctctgttgcccaggctggagtgcagtggcacgatctctgctcactgcaagctctgcctcccgggttcactccattctcctgactcagcctcccgagtagcttggactacaggcgcccaccaccacgcccagctaattttttgtatttttagtagagacggggtttcaccgtgttagccaggatggtctcgatctcctgaccttgtgatccgcacgccttggcctcccaaagtgctgggattataggcgtgagtcaccgcgcccggcccaaaaaatctttgtgtttttttgtttgtttgttttgtgttcagagaagggatctggctaggtgccctggctcatgcctgtagtcccagcactttgggaggccaaaccgagaggttgcttttcaggagtttgagaccagcctgggcaacatggtgaaatctcgtctctacagaaaatacaaaaattagccgggcatggttggcgcacacctgtggtcccagctactcaggaggctgatgtggaaggatcgcttgagcctgggaggtggaggctgcagtgagctgaaattgcaacactgcactccaacctgggtgacagagcaataccctatctcaaaaaaaagagagacagagtctcgctgtgttgcccaggctgttctcaaactcctgacctcaagtgaccctcccaccttggcctcacaatgcactgggattacaggcatgagccaccacaaccggtctcagcagctttctgtttgtcagatatacaaatataccccaggctccaggcccccacatcccccaaaaaacacacacacacacacacacacagcatcagagacctgagaaggacatcttggtggaggtttgggggaatggagatggttccttttatttttttatagtggtggtgtggtggtttttgttgttttggtgtctaaatcagagcatcacatggccttgaaggtttggaaaggaggggccatagttcaagaacaagcagtagcttcttgggaacgtattggagagagaaaagagaaaagaatatggacaatgtagagaattgtaggtctgaaactatctgggacaaagctgaggctcctgacttctatagggaccagtcatatgaaaaagaagggagtcgtgagagatgatggggtagttgtgggttaagttgggttttggaaagcctttgggaagattgaccagggaagaggccctggaagtaggcttgagaccctttgggctgggaatttaagggtcccagctacttggaacatgatctagaaagggaagcgaggtctccaggtggacaaatccctttggacccaagactccttgcccagagaaaaggggcacaaccagacaagggctagcatgggccctgggaagcacggagttcagggtggggcaggcttgctgtgtcctggcctggcaacatacctgcactgtgttgtggtagaagaacacaaagctgggaggcagagaactggttctaatcctagctgtaccctgacaagctgtgtgaccttggccaagttactttcctctcctggacttcatatatggtttttccattctttgcatccctgaagctccatgacttaggggccatcaacttggttgtccctgagtgtttccaagaataccaacagtgcccagggttttactcagcttggagaggaggcctagagcctccctgtggtgaggaggaaagaggttagagcaagtttgggtctgcagtgctaggattagaggtggcctcacaagccaaaaccgctatactcacagccttaggacagtgactccctactcgctgcctcagtgtttccagctgtaaaaaaggacccttggtaccttcgacagaacagcacccatctagtacaaaggtagttccttttatgatcaaaacaatcaggaaaaagagagaggctgggtgcggtggctcacacctgtaatcccagcactttgggaggctgaggtgggtggatcacctaaggtcaggagttcgagacccacctatcaatatggtgaaaccctgtctctactaaaattacaaaaattagccgggcatggtgccgtgcacctgtagtcccagctactcaggaggctgaggcgggagaatcgcttgaacccaggaggcagaggttgaagtaagacaagttcgcgccactgcactccatccagcgtgggcgatagaggaagactccgtctcaaaaagaaaaaagaaagaaaatgagagaaagggcctggaggtgagtgtgaggagggaaaagaacatcaaacagataaagtcctgtcctgttgtcctgggaccttgggcagccatcttggcccagatgatccccacaagaaagaggtaagggtttcctgacccatttctgccatggtcttaggaaagtcattgagttttcatgccttagtttcttaagcaagtttgaaagttcactttttggatagcaataaaattactccttttcttttgttcacagagatgctgcaatttgtcagtaatcaagtgggagagttccctgacttgttttcagaacagctgtgtagctcctttcctggcagtggtggtagtggtagcagcagcggcagcagtggcagcagcagcagcagcagcaatggcaggggcagcagcagcggagctgtggacccttcagtgcaacggtcattcacccaggtcacattaccttccttctctccctcggcggcctccccacaggctccaactctgcaagtcaaggtttctcccacctcagttcccaccacacccagggcaactcctattcttcagccccgcccccagccccagcctcaacctcaaactcagctgcaacaacagacggtaatgatcacgccaacattcagcaccactccgcagacgaggatcatccagcagcctttgatataccagaatgcagctactagctttcaaggtgattcagaagttagaatggtagtggttggttggttccaatgtttatgtgccagtttgcagacactgtaaatatttctgtcgtcttcaggaatggcaggtatatcaatatggtcctgtctgaatgaggttctggtaactggcaataagaactggtacaggagcatgtcacattctgcagcttcaaataccttaatatctattgcgcctaattcaaaaatacttggttaaaaaatccagcaagcggccgggcgcggtggctcacgcctgtaatcccagcactttgggaggccaaggcgggcggatcacgaggtcaggagattgagaccatcctggctaactcagtgaaaccccatctctactaaaaaatagaaaaaattagccgggcatggtggcgggcgcctgtagtcccagctactcgggaggctgaggcaggagaatggcgtgaacccgggaggcagagcttgcagtgagcagagatcgtgccactgcactccagcctaggcaacagagcgagactcccatcttaaaaagaaaaaaaaaaatccagcaagcatagtagacacagggccattctgataactagtggtggagacttgaataaggcttgaaattggctaggcggcagccagatctcagctgccacagttgagaactattcattcagcaaacatctgagcatccactatggtgatgaatatgacttttaatataggtgcagcagcttcaagtagcaagcctcatgctgggcccttagtatgtgttgagggaatggatgactgaaaggggcctgttctttctgtgatgtgctgcatcccagtgccttttcatcatatttccctctgactctgtggggagcccagggtaagattagtattgctttgaatttcaaagaatcttatagttcttcaatggagttcaagaattgggacaggtgggggaatgtaaaggcaaaaagctgagacagtcctcccaaagtgcacttgccgtccagaaaggatggaagaaaatgaagccccagggagttgttgattctcaacatctgttaactcccttgctgggtgcagtcatttgctgattagcttccctttcccccaccctggcacccagagtaataaaacaatttgtactcgttccctcagaaattgatgcagcccttatgggatgttcttgttgtctaagccaccttgtaaatggctgtgcacatcatcttcagcagtaggtggggagttggaatcattatgagatactccatcctcaggtttctgctgcagctgcagtgacagaatgcattcctcatctctgtgccttctttctcctcttctcccaagtccttcagcctcaagtccaaagcctggtgacatcctcccaggtacagccggtcaccattcagcagcaggtgcagacagtacaggcccagcgggtgctgacacaaacggccaatggcacgctgcagacccttgccccggctacggtgcagacagttgctgcgccacaggtgcagcaggtcccggtaagtggctggaaaggattcagggaggcactggttggggctgttaactggtccttggttgaagatgtggtctacatactaagaaggaccaaccagagtgtacacaaagcagcttgtagggcgccaggatgcacctgtgagcagcgtatagtgacctggctgagtccatatctgtagatagacactggcactcaggaaaggctggtgcagtcacttacgtacacatgtaatgggcataaaactggaaagaaatgtgctaaattggtatttcccagataattttctttttcatagttttgtgttgtgtttttttgttgttgttgttgttttgagacggagtctcattctgttgcccaagctggagtggagtggtgtggtctcagctcactataacctccgcctcccgggttcaagcagttctgctgcttcagcctcccgagtagctgggactacaggcatgtgccaccacacccggctaatttttatatttttagtagagacgggatgttggccaggctggcttgaacttctgaccttgtgatccacccgcctcggcctcccaaagtgctgggattacagacgtgagccactgcccttggctttcatagttttctgttctccatattttctgctgtggatcctgaacatatattgggttggggggagggggggcatgtattattaatcttttttttaattttttttttttggagacagttttgctcttgttgcccaggttggagtgcagtggcgtgatcttggctccctgcaacccccgcctaccaggttcaagcgattctcctgcctcagcctcccaagtagctgggattacaagcacctgccactgcacctggctagttttttgtatttttagtagagatggggtttctccaggttggccaggctggttttgaactcctggcctcaaacagtgcatcgatctcggcctcccaaagtgctgagactacaggtgggagccactgtgcccagctgggggacgtgtattatttttataatcacaaaaaacgtctttatgttatatatcatcgtggactatatcctcttttttctttttttttttttgagagtcttgctctgtcgcccaggctggagtgcagtggcacgatctcggctcactgtgcaacctcagcctcctgggttcaagcaattctcctgcctcggcctcccgagtagctgggattccaggcacgcgccatcacgcccagctaatttttgtatttttagtagagacagggtttcaccatgttggttaggctggtctcaaactcctgacctcatgatccacctgccttggtctcccaaagtgctgggattacaagcatgagccaccacatctggcctatattttcttactaacaatttatcttaaaaaaatcaggtttattatttttgcttctcagccatgtgtctggctttcctgagtcttttctctcctctctgccatccaccctacccatctctgctctgctcctgctgggccactggcaccaccctcttgaaagtctttcaacctaaaaacccatgacctggctgagcaccatggctcacgcctgtaatctcagcactttgggaggctgaggcaggtggatttcttgaacccaaaagttcaggaccagcctgggcaacatggtgaaaccctgtctctacaaaaaaatacaaacaattagccaggcatggtggcacacacctgtagtcccagctactcaggaggctgaggcagcaggatcacttgagcccgggaggtcaaggctgcagtgagctgagattgcaccactgcactccagcctgggcaacagagagcaaccctgtctcagcaaaaaaaaaaaaaaaaaaaaaaagccaggaccctcattagctagcccctctttctccacctgaacccggtattcaggctgtacaaaatagccggcttttgaaatggcctctatgaaatttcctgttcatttttttattctcaatttcataaaaattatatcatttctcattctttcttggaaggtctatgcagtaagaaaggaatgcataacagaaggataatgctatcatccttttacttttcttccttcttcatccaggtcctggtccagcctcagatcatcaagacagattcccttgttttgaccacactgaagacagatggcagccctgttatggctgcggtccagaacccggccctcaccgccctcaccacccctatccagacggctgcccttcaagtaccagtaagagctgccttctcccccaccctcctccctccccctttattcctggaggtgttagtcttcagagatgttaaatctctatatgctgagtaggtatgggagggtctatagcacaaatcagtcaaattgtaaatgtcacccctcttagttgtttttcgctcgaaaaagtattagcaatgtgtgttcgatgtgggagtactggagtctacaaggaggtagaaaagaatagcagaaggaccctctattcttggctaatagctccacacaagaccattcacctcttagatcctgctgatgacttctgaaggaccctagggccaccaggcagggaagggctccaaggtgaagaacatggaaggtaccccatccttcagttgtaggttcttagccactttcagcatcctatagcatgagaatctgatagagtaaatggtgattaaaatttagaagcactagctttattcataaaatccaagaactggaagcaactcaaatgtccatccacaggaaaataagcacattgtgatatattcatacaatgaaattatgcctagcaattaaaaaacagaactgctgacaggcacggtggctcacgcctgtaatctcagcactttgggaggccaagaggggtggatcacctgaggtcaggagtttgagaccagcctggccaacacggtgaaaccccatttctactaaaaatacaaaaattagctgggtatggtggtgcatggtgcatgcctgtaatcccagctactcaggaggctgaggcaggagaattgcttgaacctgagaggtggaagctgcagtgagccgagatcgcaccactgcactccagcctggatgacagaacgagactgactctcaaaaaaaaaaaaaaaagctactgatgcatgaaacaacatggggctgtccctcagaaatagtgtgtcaagccaccgggcgcagtggctcacacctgtaatcccagcactttgggaggccgaggtgggtagatcatgaggtcaggagatcgagaccatcctggctaccatggtgaaaccccgtctctgctaaaaatacaaaaaattagccgggcatggtggcgggcacctgtagtcctagctactcgggaggccgaggtaggagaatgtcgtgaacctgggaggtggagcttgcagtgagccaagattgcgccactgcactccagcccgggcgacagagcaaatctccgtctcaaaaaaaaaaaaaaagaaatagtgtgtcaagccaaaggagttcatgctaatgagtccatttatatgaagtttaaaaagaggcaaaatgaagctatggtgctggaattcagagcggtggtgacaaggaggggaggggcatgcggggactttctgagctggtagaaatgggctatatcttggtctgggtggttatatacattgtgtacatatgtaaaattcatcaagctataaacttaagatttgtggtttttattgtgcatgacgtacttattggcaactaatgaaattgggcacctttttatttatttattggctgattagatattgaggccattatttaagaaattaaactaaaattggtccaggcccagtggctcacgcctgtattcccagcattttgggaggctgaggtgggcagatcacctgaggtcagtagtttgagatcagcctggccaacatgatgaaatcccatctctactaaaaatacaaaaatgagccaggtgtggtggtgggtgcctgtattcccagctactcaggaggctgaggcaggagaatcacttgaaccaggggggtgcaggttgtagtaagctgtgatcacgccactgcactccagcttttgggcaacagagtgagactttgtctcaaaaaaaaaaacaaaaacaaaaaaacaggacgtggtggctcacgcctgtaatcccagcactttgggaggccaaggcgggtggatcacctgaggtcagcagtttgagaccagcctgaccaacatggagaaaccccgtctctactaaaaatacaaaattagccaggcatggtggcgcatgcctgtaatccaagctactcgggaggctgaggcagcagaatcacttgaagctgggaggcagagtttgtggtgagccgagatcacaccattgcattccagcctgggcaacaagagcgaaactccgtctcaaaaaaaataaaataaaataaaataaagttagaaaaaataagaggagaaaacagagatgaagaataaaaaggggagacctccatggttggcctatttacttaatcaaatggctcttattgagagtgtcacttctgcccttgagctttttgatggcaaaattgtataaagaaatgcagtaatttgcttaattgtcatttgagaggaaaaaatgtgtcatacactaggagaaagttttctctggtgccaactcgtggttcaccgtgtacaactttagaagtggttaacagtttgacagcaaagcagaaatcatatgacttgtttctggcatacgtagatcaaaacttaaaacatatttagccatgttaatcctcttgtggtgtagtttatcagcagtgattcttgaagggaggtagtaaccaaggttccgtggctcctgagacttcttggggcctgatttgattaacccaggaagagtctcagacctcatgaagtactgccaggtctggcagcacttggccaaagcgggcaggtctgtgttgaggttgctttatgcagactaacaaagggatcattctgctgtgtacctgtccctattctagaccctggtgggcagcagtgggaccattctgaccacaatgcctgtaatgatggggcaagagaaagtgcccattaagcaggtacctgggggagtcaagcagcttgagccccccaaagaaggagaaaggcggacaacccataatatcattgagaaacgatatcgctcctccatcaatgacaaaatcatcgaattgaaagacctggtcatggggacagacgccaaggtgggtgccaagcaaaattgtgttttatgttccaccatctcccctctacctgtttttgcctcaggagcctagagaagtcccaggctcaaggtaagtgaatacaagaccgagttagaggtgcttttttattaaagcatcttggtgtcatgtcaagattataaaatattaaaaaacataagggactggtgagggttgataaggcagtgacccgctgagacctttgactcctttggctatgctctgcagtgatggggactccactgtcagaggcagagaaagatgcctgccactcagtagttccagatacaggactgtgtgtaccttggagtcagctgatggcatagttttagctgtgtttaggggttaccttttaaggaaaagaaagaaaaaagaggttgagtctttgaccagcaacacatagaggaaactgatgttccaaatgtttctggtgtttcagtgtatgtgtcttctagaaagtaggagattttatttttaaaacctatctatgtttaaaccctattttgaaagaaaatttcattttccttgcctacaaatctgaaagctgtacatcctaagtaaaaatctatgccttaagataactgtccaggctaggcactgtggcttacgcctgtaatcccagcactttgggaggctgaggcgggtggatcacgaggccaggagttcaagaccagcctggccaacatggtgaaaccccgtctctactaaaaatacaaaaaattagccgggcgtgctggcaggtgcctgtaatcccagctacttggaaggctgaggcaggagaattgtttgaacctgggaggcagaggttgcagtgatctgagatcgcgccattgcactccatcctgggcaacaagagtgaaactctgtcttggaaaaaagaaaaaaaaaaagataactgtccaacaatgctgtggttgtttttttcatttgttttcgttaaagtttgttatggtgctaggattattataagaagtgggaacaatagctaatatttattgagtgtcaactatttgccaggctcagggctaagccctttacactcattatctcatttagccctgctgcaagcctgtgattcacgcgctttcattatctctgtgctaatgaggaggaaagtgaggttctgaggtatggaataacttctcccgagtggcacagctaatcattgggaggaccagcatctgaacttggtttctcctctcacagagccatgctgtcatcccaagtgctagggctctgctcttttcacactgtagcctgcactggtctcactgtgttttcactcatcttcctacccagatgcacaagtctggcgttctgaggaaggccattgattacatcaaatacttgcagcaggtcaatcataaactgcgccaggagaacatggtgctgaagctggcaaatcaaaagaacagtaagtgtgctgagaaaaggcttgtcagccctggcccaggtggggctttgtaaaagcagatcattttcaccaggtggggttttctttgcagagcttctaaagggcatcgacctaggcagtctggtggacaatgaggtggacctgaagatcgaggactttaatcagaatgtccttctgatgtcccccccagcctctgactcagggtcccaggctggcttctctccctactccattgactctgagccaggaagccctctattggatgatgcaaaggtacagacttttgaaatctcctgatccctggaatctttcccatttcccctaagaagatagctgggaggtcacagttatgaggccaggccgcatgttaagagggcctagcctggagaaaaacaggaattctgtgaaattagccaggtcctggagaataaagaaagaaaaaactgactccggggggaaacagtccctcaggtttaactggtccttgccgataggccccgtcagagaggaatgagtgccagatccagaacgagaatgcagagtagctgttgtgggggcgttgggagctgctggaggcacctcattgcttcactctgcctttaatgggcctggcaagaccactttgggaggctgatcagttggtttaggatgaggctgcctctgggtcctcttttcagaaatgattacaatttgcagtctaacagataacattttacctatgggcctttaatcgtcaaagcccctggcaatggtagtttaatggaattacttaagagacgctctgagcctaatgatcttcctgggaacctgtagagaccactgggttttgtactgtattttgacttcggcagtttctgactctgaaagcacaaagttccctcctagtgtttgtttttgactaagctgtttattgtatcatatacttaattttactaaggaagctccatttttgaaatattcttataaatgtggttctgtttggcaacaacaggctgtttgacatataaattgaattagctgggcttctgagtcatcagaagaaaatcttaaatggttttaaaatattgaaaagaaatgacatgctatatacacattggggcgcaggggagatctggcttcagccctcctgctgtaaaatggagagtggggtgggtgtagacaatgatacagttttagaacaggtaaaatcctttagatagattcacactaaatacggtctttgatcaacttcattgaggtgtaatttaaatgcaataaaatatacctactttaaaagtacagtaccaagagttttaacataatgtacagtgctatgtaactgtcactgtaatcaagatatagaacatttccatcaccccaaaaagctcttttgtacacctttgcaggtagtttcccacacccctctccagcctcagacaatgactgattcattggtttcctgttactttagattcattttgcctgttctggaattatacagaaacagaatcatacagtgtgttctcttttgtggtagatttctattttaaaagaaaatctcttctacctttgttctttggaacatgtacttttctcagttagcaagcaggtgaatgtgccaatgtttgagcagcagttagtgaattataggcttctcagttcccatctggccttagtcctgagttaatcgacttgaatttaaacctcataaccatttctcaatatatatatatgtatttataaagtgctgtaaaaacctatgcagtatttattccaacctcgaggccttgttttgaaggtcaaagatgagccagactctcctcctgtggcgctgggcatggtagaccgctcacggattcttctgtgtgtcctcaccttcctgtgcctctcctttaaccccctgacttccctgctgcagtggggaggggcccacgactctgaccagcacccacactcaggctctggccgcagtgtcctgtcattcgagtcaggtaggtggaggccccttgccccacctgggcatggctggaccactatggcaggagaaggaccctgtgtacaaacttcttggcttggctaccaggtcccaaagggcttttatagtgggcccccacctgcttgcttctgatagggactggcataagttccattttagaagtaacaaggcaagcccaagttcagtcagaatgagcaaaacaaatcagggacccacactactctaaataccctggggtggaggggtggtacctatttgaaggaggatatcgtgttttttatctgaggttgcaaaaccaatgcctcaaccctttcaaaacaaagatttttatggcactcagctccataatgagaagggctacagtcattagccctgtttagattatagaattatttgccctttcttctgaaaatgaggtagaagactctttcctgtgatagtgctggggtctgtcaggtgcctggctgctccgcaaggcctttcctagcagactctgctgagacgctccttcttaggttctgggggctggtttgactggatgatgcctactcttctcttatggctggtaaatggtgtgattgtcctgagcgtctttgtgaagctgctggttcatggggagccagtgatccggccacactcgcgctcctcggtcaccttctggaggcaccggaaacaggcagatctggatctcgccagagtgagttctgtgtccgcccttccccatcctcccccagacttgacaaataattcagcaactcgtgtcaaagaaagtcctatgatagatgcttgtggtgagaggaaaaagggaccctgctgctgaatagtcacagggcagtggagtgggcgcctctgcatagataattaattccagggacatgagatgatctatgtctccggtatgacaggaataatgaagttgagttctgagggaggggttctagggcttgagcggggctgccaagagtaggaaggaagggcagaggtggcagaaggaccttccaacccgaacacatgaatggacaggctgtttggagactggcaggttccagggtgtgttgagtgtaggttatgtcagagagagttgaaggcaaaggctggtagtgtgtctaggcccaaattggagagggctttcactaggaactgatttggggctttattcccaattctctatagaaccaggaaaggtttttgagcaggaaaactagctgaaagttttcatttgaaatcaacagggagtttacggaaaaaaatctggggcaactcacagcattgaggaagagttaaacatccacatttcaagaggaacaagaaccagaacactcctcagcagcagtgagccatgggcctgccctccccacctctgcaagctgcagggccattagtgagaatctgattggccatcctggatctgtcagccttgctggggctatgggtctcagaatatagatgtgattttgagaggcctgttccttgagtataacatcccaagatgtatatcctagaggcaggttcaggtgtgtgttttacaagcatcattatggtggctgtgaaggataggtaggagggagatgtgaaatgcatggaacatggcaacaagttagggtgctcttttttaagtaaagacaaggtctcactgtgttgcctggctggtcctgaactcctaggctcaagtgatcctctcaccttgacgtcccaaagtgttaggattacaggcatgagccaccacgcctggctgagtcagggggctctatgaaatagactgagtaagagatgatggcaaggacctggaattaaaaggaaaggtttgaactgaataagtatttgaaatgtaatatttggaagggaagtgattagtgacgttgactcaaggataagagaggctccaagatggagtggactccatctaggccatgttgcctggaaaagctggaagaggcccctgtagagtgagcagtgattgagaggcaggccatggggactgagcaggggcggggccagagtgtttgggaagcatgtctgtcagcagagggttcttagggagaattggactggggagtcaggaggggtaagagccaaagactgggacttgggaatagcccatctttgagggaaaggcaggggaggagccagggaacacctgcctcctttggaatctgcaaatgcaggtccttctggctggaaagatagaggcaccttagagactgttgctgtgaggacatcttttcttttcccttgtccagtcctgtaatgatgtgggaaacaaagcacagatagtgtaccagctgcccaatagaggaaaataggagaatttactttcatttcccaagactatatagcctgtcctctagtttccagcagtgagagagagaaagcgagcggtctccagtacagtgccgtagactctccattagaccctctcaggttgacaaagattagttcatctgaatcctagagtagggtagtttagctgtgagtttgcctaaaaccatggttctcaaacttcagcaggcatgaagccgggtgctgtggctcacactgaggtggggggattgcttgagcccaggagttcaagaccagcctgggcaacatagcaaaacccccatctctaaaaatgaaaagaaacgctttagcagacatggcatgagaatcacctagagggctgcaataccagagattctgattcagtagccctggggtaaggtccaagtgcttgcatttctaacaagctcctaagagctgatgctactggcctctgggggccacactttgagaccctgaaagcctaaaggatcatgcagttcatctaaatctgtgtcaccaccttatgtctaaaagctactgctggccgggcatggtggctcacgcctgtaatcccaacactttggaaggccgaggcaggtagatcacttgaggtcaggagttcgagaccagcctgaccaacatggtgaaaccctgtctctactaaaaatacaaaaaaaaaaaaaaaaaaagtgctactctgagggaactctgaccagcatttgctcatagaacaaacgcacgcagtacaatctcaatcgagtaaaaagtctgtaaggaaatacctcagaatgtcagcagggattcttcctgggggatgagattataggtggttttgttttactttcttgtagctttctgaagtttccctcgtttttatgagtgtgcactaattcctctgataattgggggcagggggagtagaagtctatatcaaaacaaaaagccggagcaaggccagtgaccattaacaccttttgatactttgtagggagattttgcagctgctgccggcaacctacaaacctgcctggcagttttgggccgggcactgcccacctcccgcctggacctggcctgcagcctctcctggaacgtgatccgctacagcctgcagaagctacgcctggtgcgctggctgctcaagaaagtcttccagtgccggcgggccacgccagccactgaggcaggctttgaagacgaagctaagaccagcgcccgggatgcggctctggcctatcaccggctgcaccagctgcacatcacaggtgagggggcagctgctgctgcctggcttgctgcaaggcatctcatgctacctctcctccttagcttgatttgccagttctgcaccctagctgaagtccctttaacgctactcttttagagtggctagaccaagcttctacctgttttcacagctgtaaggttggctctttgctttagctcatcagttctcagatgcacatgttttcacaataacatcactatactcaggatgtgtcctataaacagtggcacattgtagataagttggcagtgtttttctttagtgatacttaaattaatggtgagacttaaaattgctgacatcttagagtcaatgaaatatgatcatctgtttcattcagtaagctcctgctataataggcagagaggtcaacaaatgaatgacagttcagcgtgagtatgttagacttagcagaaggaacatgttttcgttgggagggagtgggtacccgtttggagggtttcaagaaaggttttctggggaagtagagtcttggctttgcatggaaggatgcatagaggtcaccagctctgcaggagatgagcctctgggcagagggatgttcccaaggaggagccccacctggggtggctcttgagaataagccttcagtggtcctagagggagccagggcacaaaggcagtactcagaccatgaaggatttggatgccaggctgaggatcttgtagtgtatcagtaggattcagtgaagagcattaggaaaatagtgatatgatcaggtttgtgcttctcaagtttagaagagtcaggctgggcatggtagctggctcacacctgtagtcccagcactttgggagactgaggcaggaggatcacttgcactcaggagttcgagaccagcctggacaacgtggcaaaaccccatttctacaaaaaatacaaaaattagccaggcttggtgatgcacacctgtaatcccagctacccaggaggctgatgtgggagaatcactggagcctgggagatcaaggctccagtgagccaagattgcaccatagcactccaaaaaaaaaagtttagaagattcactctgatggcagataaggagtggatcccagaggatcaaggctagagctagagaggccaaatagaagctgatgcagattaaagatgagagttgctgaaaggacagatgagaggaaattagaaggtggaattgactggactggggactcattggactgatggatggggacagtagtcagctaagacggttccctggttcttccttgggagtttgggtgagcgatggtgccaccaacaaaggtaaagaaaatagaaggaagagcaactttccaggaaaagggtggtgagttcccttttggacacttgcctgtgagatgtggaggtgagctggacatgcaggatctacagcccaaagaagactacaggtgagagtgaaaagcaagggagcctatgagagtggataggtgaaaaggagaccctcagggccattcagaagaacaccctcatctaaagaacagataggccatcgcggtggctcacacctgtaatcccagcactttgggaggccaaggcaggtggatcacctgaggtcaggagttcgagacctgcctggccaacatggcaaaaccctgtctctactaaaaatacaaaaattagccgggtgtggtggcacgtgcctataatcccagttactcgagaggctaaggcaggagaatcacttgaacccaggaggtggaggttgcagtgagccaagatggcaccactgcattccagcctgggcaacaagagcaaaactccatctcaaaaagaaaggataaaggctggcacagcagttcacatctgtaatctcagaactttgggaggtcaaggaaggaaggtcgcttgagcccaggagtttcccatcagcctgggaaacacggggagactccatctctccaaaaaaaattcaaaaaattagctggtttttgtggtgtgtgtctgtggttccagctacttgagaggccaaggtgggaggatcacttgagcctgggaggtagatcgaggctgcagcgagctgtgattgtgccactgcacatgcatgcagagatgaacagatagaggatggggagtcaggggcagaggctgcctgagaggagcagttggagaggtctgaggagacactgagatgctaagtgttggaggagcaaggtcagagagttgaggaggggagattgttgctgggacacccagtaagatgagggccaggaataacagtaggatgtggtaactggaaggtgttagataccttgatggcagtaaggagcttcagccaaaagtggaacagagccaggcaagtgatgtaggagtgaccaggagatgagacagtggggccattgtgcagctttaatatgtgggctcatggtagaattttagcagaaggtccctatctgcaaatttgccccgctgttatcttgtctgttcctcagtgtgcccttgggacagaataagcccatactcaggtctctgatcaggctgtgtcctccttgctgccaaattctggagaattccagctgagaagctttacgtcactcattccttccatactcactggcattccctgtgtgaggcactgaggggacagaggtaactacagtatggttgccacactgccctctcacctcccttcctgtgtctcctgcaggaggaacacctgaggccagtacagaatggagtgtggaggctgagatctccctaggctgataaaaagacagggaggcaaggcagcccaggagggggaacacagggctggatgagcacgggaagcctggctttgccactgtctgcaccttgacatgggcacttcctcccctgaggcaaggagactgcttgcccttgtagtgaggaccaaagccagcaacagtatgaaagcctcacgagagctgtgatgggcccttgtgcctgtgcaaggatactttgttccctgattaggggatcagccccagatgggccactgtgcacctctcataggggagggtgtggtaagccttcctggcctcccacccactaacccaacatgtgttcagctgtccttgctcagtttacgtcacttccccctcaaacgggtatgtgtttgtgtattgtgaaggcgggtttttttttggcttttttgggggacagagtctcgctctgttgcccaggctggagtgcagtggtgcgatctcagctcactgcaacctccgcatcgcaggctcaagcaattcttctgcctcagccttccaagtagctgcaattacaggcgtgtgccaccacgtccagctaattttttctatttttagtagagatggggtttcactgtgtttgccaggctggtctcaaactcctgatcttaagtgatccgccggccttggcctcccaaagtgctgggattacaggtgtgagccactggcacccagccacattgtgaaggttttttaatgaaaataaattcaaatcagttcatctaaaaaaaatttcattacctctgttgaatgtttggaaacacacagtgtggctgtgctgctgacattgttatgttgcactgtgcgcctctgagtcctatacaacaacctgcaattgtgacagctctgggtgtgacagaaatgggtgccatgttcccagctaccctgtgaggtagacaggaacacacagccagtatatcacagagcctggcatcccatcctgtgatcaggcctgtctgatcacaaagttcacctcgcttctcccctggttcctctcttactttgatcgtgctggagagagcaggaaaaagtttggttttggggctccatcaacaatagtgtctgtttctgcccaccctagggaagcttcctgcaggatccgcctgttccgatgtacacatggcgttgtgtgccgtgaacctggctgaatgtgcagaggagaagatcccaccgagcacactggttgagatccatctgactgctgccatggggctcaagacccggtgtggaggcaagctgggcttcctggccgtgagtacccttcggttcccttctgtaaacctcccctgagcacttacctagccaggagttaagatgcagaagcagttatgaacccccttccccatcaggtgctgcccacctggaggggtaggcaggcattcattcagtcgctcatttcaccaggactcccagcaaccgataaaacagaccaaaattcctccccttgtggccttaataccataagccttgtaggcaggacattttggtcccctgaggtaatatgaggtaatatgaagattggttcagcaatagcagagctactgtacttgggggttaatatgcaacttttctgttcttcaagtggtcataaaaattcttagaatcccctggttatgtctcatggttctttcatttactcagaaggtatttattgggcatcttgtattgatcacagcactgtgaatccagaaataaaagccagtgcctttgccaagctacagagttaaagaaaagaaaaatgaaatgaataaaagtaaaagaaaacctgtgcctgtctacaaggagctcaggtcagacgagggcagggattgtggctatcaagcacctcccatatgcctagctaggagccaggcttgggaactctcaaatgggtaattcccggtccttgttatcagctagctcacaacatgctgacctcaggctttctcttactctagcagaaacaggtatgttttactttgtgtcccactatggatagactgctgaatacatcaggtatgttcaagcattaccacatctctatttgtttccgtatctcagtaacagcagagatgagctgagaatgaatcagaacgtgccctgtagtgacattgatatatttcctgaggtacatcacgatagtctaggggacaaagggcgcagggaagcccagtgtactctttatgtctacacttgatcttagccagaaggctgagaagtgatactttttatgtcttacctctgtttctggtgactacagataagagactcatcccttgattcactcattcagcaaatatgactgagcaccgtctctaagcaggacatttgccttgtcctcagggagcatagttggcaaggaatctagacagcagcccttcttgagcttgacattgatcttctcatgaggaggactgggctccaggtggggaaagaaccccatcctcacttgtgggctagacgacctgggagtccacagacactgaagacacatcattcttcctattcatttcaaccttccctcgacagatcttcctgggaccaggtcttcaggacagtgtgagctagggtgagctcctgagctggtcttgggggaagtcagggtgggctttctggggaaggtgaatctaggctgacagcaggaggcattgatgagatctctctccttttcagtttattgaagtgctctgggctgatgtcattacatttgtaacttccatgccccccaaaaatgttttgaagacattcattttatcaaaatacaacatacatgcagaaaaatgcccacattttaacttacggcttgaagtgaagttacccatgcaacacccacccacatcaagaagtagaacattcccagcacccccagaagccttcttgaggccctccctgctcttcctgccccaaccaaggtaaccactcttctgaattctgtcactggagtttaatctgtctattgttcatcatttcagtaaacttatcaaagtacatgcttagaagtctggctgggagggccgggcacggtggcttacccctgtaatcccggcactttgggaggccaaggcgagcagatcacctgaggtcaggagttcaagaccagcctgaccaatatgatgaaaccctgtctctactaaaaatacaaaaattagccaggcgtggtggcatgtgcctataatctcagctacttgggaggctgagacaggagaatcacttgaacccaggaggtggagggtgcattgagcggagatcacgccattgcactccagcctgggcaacagagcaagactccatctcaaaataaatacatacgtacatacaaacaaaaattagctggatgtggtggtgcacacctgtaatcccagctacttgggaggctgaggcaggagaatcgcctgaacctgggaagtggaggttgtaatgagccaagattgcaccactgcactccagcctgggtgacagagtgagtgagactccgtctcaagaaaaaaaaaaaagattacaatatgcatgtcaaaaagtatacaaatcataaatacacagttcagtgactccacagagtaaacacacccttatagccagcagacagatcaaagtacagaaccaagaccccagaaacttctcttgggccctttgcaatcactaacctgccccttcccccaagccttccagccttccaagggtaaccaccatcctagtcacctcagatgctttgcctctgtttaaactatattaatataaggagagtcttgcagtatacactgttttgtgtctgacttattttgctcaatatcatgtgtaagaatcattatgttgttatgtagaattatagattgttcgttctcatatttatagtgttccattgtatgactagattattgcagatgaactttttagttgttttctggctttggttattatgaagggtgctgctgtgaacctccttgtacacacatctttcaggaaacgtgactgcatttttaggaatggcatcgctgggtcagaggttgtgcgtatttccaaattgttggccattctccactccatcagcagtgaacaagacttctagttctacatccttaccgaacacatataatgtcaatttttttaagcccttctagtgtatctcattgtagttttcatttgtacttcccaggtgattaatgagattgagcacctcttcttacatttattggcaatttggatagtctgtttcgttacattcaattcaagtcttacctctttttcatttggactatctgtcgtctcattgattagaggaattctttattctggagattacccctttattggatatatgcttttcagataccttctcccactctggggcttgcctgttctgtcttaatggtgtctagtgagagcacaagctcttaatttcagtgaaatccagattattagtcttttcctttacagttagacattttaagtcctgttcaataaatctttgtcctacctcaaagtcatgaagatattctcctatgttgtctgctagacgctttattttttactctttacacatatgtacctaatccacctggaattaatttttataagagttggaggtaggagtgcaagatctgtttttctccataaggatatctacctgacgcagaacctgttattttaaaaactatccttcccctgctgcaccaagtggcacctttttttcataaatcaaggatccgtgtaccgtgggtctgcctccagatctagtctgttccactgcaccatcaccacccaaccctaacggctgagttttctcttacgtcttgatgtctggaagtgttggtcttccagatttagtgactaacgatgaatcttgggtgtttctttgtagcctcttcattctacagaggtacttgatgctgctgatggacatttgggttgtttccagtatttgccgttataaacagtgctttagggaacatttttgtccattgtcttcatgcacctccataagagtttcctcagaccaaatctgtagagatggtgatgctgtgtcaaaggatataaatatttgaaacttaatagtattaccaaatttgcatattcagtaagatggaaaaaggagaactgtcatctttaaagtaactgctcttctctgtttacttctcttgagagaggataaagagactcagacagtactttcttataaaggaagaagctttgaatttggtgagatatatttagctacaaatgagccagttgttgggggcaagtggagggctggcctctgtgaaaatggtttagactagaggttcccaaacttgctcaactcatgactcaagattcccaaacattctctactcactatgtctcagtaaatttttcatggcatcccttagccaaaagaaatacctaacggttctggttttcgttttttgaaacagtgtcttgctctgttgcccaggctggagtgcagtggtgcaatcacggcacactctagcctcaacctctctgggctcaagtgatcatcccacctcaccctcccgagtagctgggactgcaggtatacaccaccacaccgagcttatttttgtattttttgtaaagtcagggttttgctatgttgctcaggctggtctcgaactcctgggcttaagcgatctgcccacctcagcctctcaaagtgctgggattataggcatgcaccaccgcgcctggcctctgttaagtagttaagtttgaacatcctaataggtatttaaattgtcttaacagcttagtggtcatttgaaaaaatcatatgtcaagttgaaagaagaaataatattttttgctaggagtggtagcacacacctgtggtcccagctcctcaggagactgaggtaggagaatctcctgaaaccacgagtttgaggctgcagttagctatggtcacacctgtgaatagagccactccactccagcctggacaacatagtgagaccatgtctctattaaaaaaaaaaaaaagaggttgggcacggtggctcatacctgtaatcccagcacttaaggaggctgaggcgggtggatcacctaaggtcaggagtttgagaccagcctggccaacatgatgaaactccgtgtctactaaaaatacaaaaattagccagggatcgtagcacgcacctgtaatcccagctactcggaaggctgagacagaatcacttgaacccaggagtcagaggttgccgtgagccgagattgtgccactgcactctgggtgacagagcaagactctgtctcaaaagaaagaaagagagagaatattttggattcttaataatttcttagaaatcatggttattaagaatccaaaatattcttttatttatttatttattttttgagatacagcctcactctgttgcccaggctggagtggaatggctcttcacaagcatggtgtcactgtttcttaccaatacatgaacctgtcaagcactgcacacctcaagctttggaatcagactagcaaccatcactctctctcttttccacattgattttcacacagtactatgacagatatcacatctccaaaggaagctagtgtggtctcaatgctgaggctgcatgctctccccatctagtcacttacagtgcccagctgatgttgagcatcactgttttcctcgaaagtttaaaatagccagtggctcccttgatcacttgctgtggcacctcagactgccttggcacacgatttgagagccatggggttagaccgatgttaggggacacaacctggggttgggactggcccagggatactgagtggctctcaggatctaaacagttgtggggttcttgccacagcctctttcacatcaggcaattagcagatgagttacagggggaggctcctaggccccagttggggaagattctggtgtctataaaatttaggaaaacttaaaaaaaaatttttttttttttggcttgggattacaagccaagccaccagcgtggccaagatggtgaaaccctgtctctactaaaaatataaaaattagctgggtgcggtggcgggtgcctataatcccagctacttgggaggctgaggcaggagaattgctagaacccaggaggcggaggttgcagtgagccaagatcacaccactgcactccagcctgggtgacagagcaagactctgtctttaaaaaaaaaaagaaaagaaaagaattaagcttaaaatacatttttacttagtgatttccacatttgcctttctggttcctcttgccgtatgacctggactaggctttgcttctacttgtaacatttgggccctcgtgagggaccagttggtcctcagtttctcctggagcagccaccaggctcccttgctgattggacatgtggaattggctgttcttggaaagagagttggagtcaaccgttcaaatgttctgggacctccgaagcccaggaatcacgccaccaccccccaatctccctccctgctcagctcctcaactgctattctcccaccattgcagttatcagctcagattcagtgagtgctttgtggaaggttggcagagggtcgcgagggtcctctacatttgttctccagtatccagtatcaacactggttaccaaagaggaaggacggactattggtgcccctggtcccagtgattagaaatgtaagtgaaacaccccacctcatctcataagctgctttgagattatgagtatgtgtctatagaacaggttgttttctctcagactcaggcagtgtctccaggttccccctggagagagatagtcttctctgtctgtgtcctcgagtggcactctgacagtgctatttctgaccctggcattcaagtcttctgaagccgttacattcgctgatggctacttagagcccagtaaaggtcagaaccatcagactgaaccagaccatgaaacagcgctgctcctgtgggggcgagggctggggtgtggaagcgatgtctgcgggcctcggcctggcagccccgcccctgggctccctgggctttctatcttatgcttctccctccctcctgtcttctgtcctcagttcctcactcaccctggcctgtttcggggagtggttatgggttggaagtcatgggtgttagtgtgaaaataccctcactcaaaaagtgacagaactgaaaacgtggtagatggtattgtccctgcagttcttgtcagtggggtcctggaatgatgttatcccggcaagtggaggaggggcccagtgaccggggccctggctctttgaattgtcccacaaagaggctttccaggttccccctctgttctttctcgcaggctggtgttcacatcaggggctcatgcaggggtgccatggggtttctgtagggggccgcccttgcagggccagctttgtggggggagtctctcaaccacctgcacacagatacttgcctgtacagggcctgggctgtcctcccagctgccccttcactccagtgccatctgatgtgaccctgacggctggccatgtgccgagcactgttctaaactttacacgcaaagtaaaagtaaaagaaaaattagtcaaagcagaataattttgcctaaaatagtctaaaagatatgtaattaaaatgacatgatgggccaggcacggtggctcacgcctgtaatcccagcactttgggaggccgagacgggcggatcacgaggtcaagagatcgagaccatcctggctaacacggtgaaaccccgtctctactaaaaatacaaaaattagccgggcatggtggcgcgcgcctgtagtcccagctacacgggaggctgaggcaggagaatggcgtgaacccgggaggcagagcttgcagtgagtcgagatcgcgccactgcactccagcctgggcgacagagcgaaactccgtctcaaaaaaaaaaaaaaaaaaaaatgacatgataaaaagtcccaggatagaaggggctgcctggcttggcactctcggggccgaggggaaagtacagcagccagggggcccctgagacccctccttgggaaaccgccttcctagtttaccctgcaggttgaatgccagtaggatcaggcagccccagcaggacaggatgcagcaggggccccacgcgtgccttgtggctgctccctgccctcctgctgggatgtggacctagtcagcaagtccagcacactctactggtgggcttgccctagtttccatggtgggctttactttcaggtacctgtgggagtcctatccctgtgctgatctttcccagtctcccccaaagcccacctccaccatggtgctttctgcaccccacagtggctgcagccagcattctgccaccttggtgttacccctggtccttgtccttccacagagctacttcctcagccgagcccagagcctgtgtggccccgagcacagtgctgttcctgactccctgcgctggctctgccaccccctgggccagaagtttttcatggagcggagctggtctgtgaagtcagctgccaaggagagtctatactgtgcccagaggaacccaggtgagaataccttggagccattcagaattggagaaagccatgcaaaccgccggtactacagagtcactgcaccagacacgcggagacacgggttgtctcttaatcttgttgagtccgtttgtttgtttgtttgtttgtttgtttgaaccaaagctcagggaggttgagtaacttgcttaaggtcacaagcctgatcagaaattgtcagtggctaagctgggtgtgcagctctgctctctctaacattcagagcccatggtccttacatcacacagcaataaattgtgattaagctccaagggtactcttagcccttgttttgggcactttggagacacaaaggatgtgtgaggcttgctttccctggcctccaggtctctcccattgggagagcagacagacataaatggagagtttgggaacaataggtggcaggcagtcatcaactgctcagagtggtgacagggacgaggcttcaggcattggaaggaggtgctggctttctgtccctggcatttgatagtgattggagttgactcgcccggccttggagcagtagaggctggtcaggattgacttagaccttgagtgctcagtggctgtctgctttctgctgtacttttcctcccctctcagaattggagtctgtggggagagtaaggttctacaggtataggggtgtgtgtcacacattgggggagttcactgtccttttcttttttaaataataactgtattgctcaacgtgagaattgtgtgcaacaccaaaatataaaggatgaaagcaaaagcaatcctaaatctttctaccccacccctgctggctaaacatggacttctcagtggctttgtcatctctggcagtctctggctccaggccttgttacttggaatgtgttcataagtgtccctcctcctggtcattagatcgaggcccacatatctgccacatgtgaggagagagaaggggctggtgatttgaggcctgccagtaaagaaacttgctggtgacagtcagctatccaagcattgcaaggccccgtgtctagccagttcagacaggtcactgctgatggcacgttccatgacaaggctctggaaaaaccggagcatgttcttcgttgtcatgagcgtggcagcagctaccacctttttttccttgcctggtggttctccttagccacatggagaagagaaatcctctgagacattccattttctgttttctgatccaactccacctgacagctcccaaccttagagtactgagcactgtgccaggagacacagcaccctcccccacaccccctccccaccggagctcatccagaactagtcttgagctcttcaggctgggagtgaacactctcccccatcctccaactgtttagcacagtagttctgggctttggtggagaaggggcatctgatccccattcacaaggcatggctgtgtttggagtttctctccgtaaagacaaagtgggctcataaatgagctccatttaaccccccttgcctgtctcttttccagctgaccccattgcgcaggtccaccaggccttctgcaagaacctgctggagcgagctatagagtccttggtgaaacctcaggccaagaagaaggctggagaccaggaagaagagagctggtaaagtccccagaccagtccccctgccttaggacctgtccacgcaggcaactccaggacagcctgaaggcctgcactcctggagggaaacaagcctggcatcgggttggcagggcaatcaaatggttcctttgtatttaatttctcaaaaatgagagccctatgttaactctgacctggcctttcctcctagaccaagtgcgttttttttttttttttggagacggagtctcgctctgtcactcaggttggagtgcagtggcgcaatcttggcacactgcaagctctgcctcctgggttcacgccattcttctgtgtcagcctcctgagtagctgggactacaggcgcctgccaccatgcccggctaattttttgtatttttagtagagacgaggtttcaccatgttagccaggatggtctcgacctcgtgatccgcctgcctcagcctcccaaagtgctgggattacaggcgtgagccaccatgcccaggcctttttttttttttttttttttgagatggagtttcgctcttgttgcccaggctggagtgcaatggaccagtctcagctcactgcaacctctgcctcccgggttcaagtgattcttctgccttagcctcccaagtagctgggattacaggcgcccaccaccatgcctggctaatttttgtacttttagtagagatgaggtttcaccatgtcattcaggctggtcttgaactcctgatctcgggcaatccgcctgcctcggcctcccaaagtgctgggattacaggcatgagccaccacgcctggcaggtgcacccatttttatgtatccctttaccaagcggagtcagtacttggaccaagtcagggatttcattagcttgctctgctttttggggtagggagcaggggcctgttgaaaggggatgggggctgggtgcagtggctcacgtctgtaatcccagcactttgggtgggaggccaaggtgggcagatcacgaggtcaggagatcgagaccatcctggctaacacggtgaaaccccgtctactaaaaatacaaaaaattagccaggcgtggtggcgggcgcctgtggtcccagctattccggaggctgaggcaggagaatggcatgaatccgggaggcggagcttgcagtgagccaagattgcgccactgcactccagcctgggtgacagagctagactctgtctcaaaaaaaaaaaaagaaaggggatgggaatgaaatgtgacgagctcagcagaaggcagacacatctggcctggacatcttggggacccagcccctcatggaatgtgccgggcaatttttctctctgacatacttactgagcacagtccttctttcacagagtaagacctgagaggcagataggtgccaaagtcacttttgttttttgttatttttgtttgttttttggggggttttttgagacagtgtctcactctgtcacccaggctggaatgtagtggtacagtcttggctcactgcaacctctgcctcctgggttcaagcggttctcctgcctcagcctcccaagtagctggaattacaggcacgcgccaccatgcccgactcatttttgtatttcttggtagaggcagagtttcaccattggtcaggctggtctggaactcctgacctcaagtgatctgcctgccttggcctcccaaagtgctgggattacaggcgtgagccaccgtgcccggccccaaagtcactttcctacaaggcccagatcctgattagggtgcacctgaggagagggggagggggcagttctgcctgggagataagaaaacttttgggaggagatgacactggacttggggcttaaggagaggagtgagggtaggctgtgggggatgctagggaaaggcccccagtagagggaagagtgtcagtgacagcccagagacacggaggaaggatgcctgaggaatacaaagggtacacatagacagcgcttgcgtgtgcctgggatgacaggaaagggacagaaatggccattgggtcttagagctggagagctgaacagctaggccatgaggtgggccttgtgtatatgttttgatgtacatgggaccctttcttttcttcctagtgaattctccagtgctctggagtacttgaaattacttcattcttttgtggactctgtgggggttatgagccccccactctccaggagctccgtgctcaagtccgccctgggtaagcacctgcgggtggcccacagtctcagggtgctcagttcaggtcttcacagtgcttttgccccaggggtccagggcgttaggagtgtagatgccagcatcttctctggatcccaggttcatacctgtggctccagttcacagtcaccccctcccaaacagcactcagaggcaggaaactatggttttcagagaagtagggcaatgagtaattgaatgtcttcctcaagccctagctgtgtgacccaggtgaggacccttcttaatgcccagaagaacaagcaatgagtggcccaggcaccagggatggtggggagtcacctttcagatgcacagtggcccctgaggcagctcttgggccttatgctctttgctgaagagacttttcatctgggcctctctaccactcctcagcccctcatcacatcagtgtcacagcacagcccactgactggattgacatcatgacatttctttgcttctgtccctaaactgccatcaggatgatagcacatcagctgccaactcttgggcttctgtggccaccctggaagatgggggtaccaagctaccgctggtcactctccctagggagggagggatcccagaaaatcagccaccctatcatgatccctgacctgtggcctctgttttcaagtttagggaagcatgaccatccccgctggttttgtgggatcactactgtcatcattttgcagttgagaaaactaaggctgagagaggagaagacttaaaatattctaacaggagcctgttccagatactttgaagataccattctttatggctattgaaagcttaggttgtatccatctttttatttaaaaacaacactgcagtcaaatatgtgttaaacttttttctctctaagccagtttcattatgacagactgccaaaaatgggattactagcttaacgggagtgaacttttttattttttttgagacggagtcttactcttgttgcccaggctggagtgcaatggcacgatctcggctcactgcaacctccgcccgcaccgaggttcaagcgattctcttgcctcagcctccctagtagctgggattacagtcacccgccaccatgcccagctaatttttttgtgtatttttagtagagagggggtttcaccatgttggccaggctggtctcaaactcctgacctcaggtgatccacctgcctcagcctcccaaaatgctgggattacaggcgtgagccaccgcggccaaccaggaatgaacatttttaaggctcttgatatatattgccaaacactttccaagattgtgctggtctattcccctcccccagaatcctgggtgtgggagcccagaggctgctggcccgttcccagcaggcaaagatgttacccatctcctaggaaggaagtgtagcagcctctgagcgccacaggtctcgtttctgtgggtgctggagtgcgtttggtgctgttctcctctaggtccagacatcatctgtcggtggtggacgtctgcaatcactgtggccatcagctggctccagggagacgatgcagctgtgcgctctcattttaccaaagtggaacgcatccccaaggccctggaagtgacagagtgcgtaaccctccttggccactcacttgcttctctccaggggaatcttgtttgagttagcaggagcaaactggactgggtgggcgtgttggggtgaagggtcaggactgcatgacaggtgggcggctagaaaagtcgggggtgagggcaccatggagaactcaagttgggccagcaggtcctctgtgcaagtgtcctgctctgcacaacacgacagttgtcccagcagctgtcagcactgtgtccgggtcctcctccctgcagccttcatggcgccacaggctgaaaagaagagacgagagcagtgtggcccccagcatcttcagaagctttgtggtggaggcaggcactggtggttcacaatcagtgcagagaggccactgttgcccccaaaactcatgtgcactggagcatcttgcccctgtgtgctagcattttatccactttccttccagccacctccacccccaccatcaaccctggcaactttgtcctgtaactaaaatagcctttagcacatggcataaccggagagcttttgacattcctctttggagattcatgtctgcgtcttgggggcattcggcactagtgatgggcagccctgcctgctgactccccggctgtttctaattggatctgagtattctaagagaaactgtaaaatgctccaagacagaaaggccccacgaggtcctatccttagagccaaggctgtagcatttcctatcaagcagacccttaaccggcgcacaggaaggagctgagaagagtgagtatacacaggcttgaagtcctttgttccctgaagtagatgtgacaccctaatttcattgaagtagccccatttgtaagcactctgactaggtaagcacccagcccggtatagcattccacctgtatgtgtgtctcccccagtcgatgtgcctgaggacactgagactcagcaggtaagttgtccaaagtcacctcgctccagagcagcagagcttccatggacagccaagacacccctgcaggcactgctgcctgctggattcacttacccctgggtccctctgcttttcagggactaggatgctatgagaaccctcccccatccctagcctccccttccactcccagtctcctctacagaaagaagctaactaagtatctccagagagtttaataccacatctctgggggggtggtcccttaaagaacgggtacaacaccttattgtggccactttataggtaaggaaactgaggcacacgttggaatgactatcttgggtggcttcttagcagcagacgtgatggtgaagcctgtgtctctgacttccagcattgaatgaaggtgctaaagggtggggcgctaaccctagctcagggctggcatttcagatctggagctggtggcatggtgccatagtggcagcattggagtcaacagatgcacatgtcatatcagtgtggggcgtggcagtcactggcttgggcccctctgcctgtcacgcaggtgacacatagtgacctgcctctcgactccctgtcactgctgcaggagccccctggtgaaggccatcttccatgcctgcagagccatgcatgcctcactccctgggaaagcagatgggcagcagagttccttctgccattgcgagagggccagtggccacctatggagcagcctcaacgtcagtggggccacctctgaccctgccctcaaccacgtgagtgggagctgagttggcccctgggggaggtgctctgcactggtttacgagaacactcccactcacctcatgctgaccctgcgggtggggccatccgaaagacagagaaaccaggacagcagccccctttcaaaaaagttacggcttattggcctaggtggactcctttttcatcccttttcagcctctgaggcaagtgtgtttctacctgcacctttcttaggctcccagagtcccaggtcctgctggcccatagcctctgtaagcccaggtgcaccccagctggccaggggttcacctgcatttgctccagcggtttgcgtgacttcccaggcctctgcaggcagccttggagtgggttcctgccccctcgggcacacaaacagagctgaagaccaccctgggcacctccttggctggccgcatacctcctggcgggcagctgtggtgcattgtagttgcattgcatgttctggtggtacccatgcaatgtttccacagtgcatcacagaggcctgcctggccctcgagagactgccctgactgaaggccctatcaggtgggggaggggatcctgatagagggcactgctgccactgttggggcccaagtcacagccatcccaggaaacaggagggcacccagctgaaagtggagcatcacctggtctacggggaacatgtccttagctccagagtgggagggaccgggagagtcctggagattcagattctcagccactccctggggcttggtcttagctggctaggctagtacttcaagctagatattgtcagtggacctgggcactgggatgaacccaggacagcgtggcagcccctacagggacaggcaatgtgcagaaaaggcccaaactggctggacgcggtggctcacacctgtaatcccagcactttgggaagctgaggtgggcagatcacctgaggtcaggagttcgagaccagcctgaccaacatggtgaaaccccgtttgtactaaaaatacaaaaataagccaggtgtggtggcatgtatctgtaatcccagctactcaggaggctgaggcagaagaatcacttgaacccaggaggtagaggttgcagtgagtcgagattgcaccactgcactccagcctgggcaacagagcgagactccatctttaaaaaaaagctggtgggggtgcccaaatgccctgggctgccaagaccaaaggcagatggtgagccacatttcaccttctcttttgggctttccattagtctcttccgtatttgtcttcatgagagaaccaaacagtacaggctcagtttggggaatgagaggcttgcagccaccctttggactggggttccttggtagcagctctgtggtaggaaagtgagcctagaagacaacgccatgcagcctgatggccctcggagggcagaatccagacataggcctgctgcctccatgcccacaggtgcttctgcagcatgcacagcttagaagtgccaggttttgaggagagggatccttttccacatccccttgaagcacacaacagccagaaaacagtgtaggcaaggatcaaggccttgtgcagggacagggcagggtcttcctcaggcccagtgtcctgggaaggaggaaagccagggctgggtgagatgaggctcagcctgagggagttcatcaggaccggagggctgcttgcggcccatctcaacaaggactcctcactgctcggtgtcgtgcaggtgtgccactgcgagccgggtgggcagcccagccccataggtcgtaggcagagagtatgcatggcccacatgcagtaccttctcatatgatacaacagccctgtgatggtgccatttacatttttttgaatgaagaaactgaggctcagagagactaagtcctatgccagggtcatgtagctagtaagtggcaaagccgggtcagtaggcctagtccccaagcactaaggcactctgtggttctgtcttctgagacacctgtctccctctcccactcctcctcctccttcccccagccccatcgacaggctctgctgccacttcaggcttttccttggtaccttgtgggtatctcagcctcctagccagccatggtgggactcccatggggtggaagaacctgcgccttcaacccacaagggttttatttctgcccctgccacctgcctgtgctgtattccctatacaagctgctgtccctgtcagagccttgctttctcacctgcagaatggggagggcttgtctcccacctcctggggccatggaaggaactggttctcccctgagctgttccctcacgtcctgcggagttcaccagactctggggctctccacttcctcccagagctgctgagtgttggtctggggagaggcctggtaggtgctaggatccttgcctcagggatgggccagtcacctgtctcccctctctcgtggctgaccccacaggtggtccagctgctcacctgtgacctgctactgtcgctacggacagcgctctggcaaaaacaggccagtgccagccaggctgtgggggagacctaccacgcgtcaggcgctgaactggcgggcttccaacgggacctgggcagcctgcgcaggctggcacacagcttccgcccagcataccgcaaggtgaggcccagctggctggtggggcagggcagattggagcctgtggggcctgagcccagaacccagcatgggcaccagcatgtggttgtggagttggccctctgaggtcagcctggtgacctgtcgagcacctgcttggctcgtgcccaacactgggctaggcgccatgtgtccctgtgttcagcacacattggttgagtgcctgctgtatgcctggccctggagctcagcagggagcaggccacactttgctgccacagacaggggccagcagggagctgtgcctccccaggcacatgctgggtgggagggctctgagggcaatggtggcaagtcagggctcctggcctggtcccgagctccacgttgactttcattctttttcacagtagctagaggcttcggttctgctgctgggtaacatccccttggcagtggccacgtgatctgaactaagtcacggaggaaagttctatgactgggcttgccaggctccagctatttccttttttgtttatttgtattgctatataatgtattcaacatatttgtacctgtatttttttctaaaaatttgagtgagatgactcaagtgtcattgagggggcacgggctgggctggaagaaggcctcagagcgaggctgctgccgtggagcttgggattcagcccccacacccatcaccctgaggtgctgcggggcccacccagggttgcactgtggccactgtgtgcagcaagccaagacagacacaacagacagtatcatcggagagccattccttactgtggagaagagggcatgtaccccaggcctggagcggcacccctgcctcctggagcccactctggtcagctctctggtctgctcacagcatggctggcatcagtggcctttttttcataatagatggggtcttgctatgtggcccaggctggtctcaaacccctagcctcaagctgtcctcctgcctcggcctcccaaagtgctgggattacaggtgtgagccacctcgcctggtccaaaggcctcctcttaaataccatttccattctgctgctccctgctgagagcccatcagcggctccccattgcctaccaggaccagaatccacttggcagcactgaagaccctccctgaagactgagatataaaggcatcaaaaagagcttgagattttaagaaatgacagacctcagccttgcccttcacccaccagtggctcatacctaagcgctgcagactttacccgcacacctctagactctcttcctttctaaagatacggaaagaggataccaaacctctctggtaccagcccaactgtccctcctcacccctctgtccctgtcacacctgtccttttgtcaaactgcaggcagcctccagggccttggggcttcacccagggcacttgtctaccagccccacgaggtgcgtccagggctttcttgtcaccagttgggaaaagcaggccttttgcctctctctcctctcatcctgctcctgctgttcagccaggtttcctgcctggctcagggtcagagtacgggacaacagaggttgcttttcaggggtgagcaaggcagggtggtgtgggaagggatgtcatgaggtggcaggcgagatggctcagggagagctaccctgggcatagatgggtggggaccaggggtgtgatggatgtcaccccggcacctccccaggtgttcctgcatgaagccaccgtgcgcctgatggcaggagccagccccacccgcacccaccagctgctggaacacagcctgcggcggcgcaccacgcagagcaccaagcacggtgagtccacccctccccagctcacaggctgggccaggccctgcgccctaggaagagaggagaagaggggccagcccagctcccacatctggcattggtgcccagcacacctctcgcctctctgagaatgaaagaagcccgaggccgcccttggtgggttgcaggggttggggtggtcatgggtcatgctgtgatcagggaaggagggttggggtggcgtcccagcacaggtgcaggcatagaagcagaagctcgagccaggtcatgtgggcccatctcagccccaccacgggctggccgtgagaggctggacaagttcacttcttttccgtggattgggtggggcagcagaccccacctcccaggatggatgtgagcgttcagtgaatgagtccaggtaacgccaaggaactgcaccaacttcatggtagattctcggttgtgacacacatctccttcccacaggagaggtggatgcctggcccggccagcgagagcgggccaccgccatcctgctggcctgccgccacctgcccctctccttcctctcctccccgggccagcgggcagtgctgctggccgaagctgcccgcaccctggagaaggtgggcgaccggcgctcctgcaacgactgccagcagatgattgttaagctgggtggtggcactgccattgccgcctcctgaccaccaggctcagcccacccctccacctctctctcgatttctctctctccccctcagcatcttcccgctgagagtggtggggaagagccttgtcttcttagctgtcacctgccgaggcttctgggccactcaggccagtgcacccctgggcagagccccttaaagctgctgtcactagatgcccatggtccagggcctggtgggcgtgagaggataggtggcagggcagaaactgggcagccctgacttgatagcagcagggggagctcccaagctgccaagcccctgcctccagccttcctgagtttctctctcctgaaccctactctctcctttttgcttcctcagtttttatcaggctttctctgggggacagcagtctctgagcaccagggagcagttgccctcaggcctgtgcccagcatgccctcccctttttatacgaatgttttctaccagtgtgcttgggtttgccatgatgcgaggctgagttgctgtagcgtcttgattctctccctgggtctgcgttccctcccctgggcctgactgagcctgctcattgtttttccctttattacacaggacagccaggggaggaggggggcccagccctgggaggctggtgggaggcagggggcaggcctgcggatgcatgaaataatgttggcattattttttaattttttaaaaaataaatggtatcttatttaattgtcctgttccttcccactccccgcctcctaggatgttagcccaagctcagggtaggcccagggggctgggagaaatgaagccacccatggggactggggaccaggggccttcagcatggcttctaggttccctcctccccctaccccatctcctacctccacagtacagactgtccccaacttaacagtggttcaacttaaaccatgtttcaactttacaattggtctgttggggtattaaatgaatttgtgacttaggatattttcatttatgatgggtttatcaggaagtaaccccatggtaagttgaggcatatctgtatatatttaaacctaattaattcttgagctgaaaataaataaaccaggatggcagggaccaacccctaatccctccccagcggcaagcccctcttttcagagtgggcagagggttgcctatggtgggcactaggaatgaggtcccctgcctcgatgcgggtcctaggagaaaaagtcctacttttctgggtccccaggtgcagcacctcccggagactgtttctcccatggcctcctgagtgatgggccctgcctccctgtgcctcatcctcaggctggttggagcagagggtgggcaggagccccagcacagactggggggtgctcacagcagggccaccttgatgcaggctggaatgttatccctggggtgtgcttggaccccacctgctttctttctctcctgcccctcccctactctcactgtaatttatggaccctgcccgcctgcgtgttgtgtgtatgtcctgtgccttttctcactattgtttgggtgtgggagggggtggtttttcactgaaaaggggggtacacctatagctttcttgatgttcaatcaatcagtcactgtgtcccagacatattcaataaacacagattggtaccacccagcac

SEQ ID NO: 410 - DNA, 5051 bp, Homo sapiens
cggcgcccgggcgcaacgcaaacatggcggcgggtggcacccgtcggtgaggcggtgccgggcgggggttgtcgggtgtcatgggcggtggcgacggcaccgcccccgcgtctccctgagcgggacggcagggggggcttctgcgctgagccgggcgatggacgacagcggcgagctgggtggtctggagaccatggagaccctcacggagctgggcgacgagctgaccctgggagacatcgacgagatgctgcaatttgtcagtaatcaagtgggagagttccctgacttgttttcagaacagctgtgtagctcctttcctggcagtggtggtagtggtagcagcagcggcagcagtggcagcagcagcagcagcagcaatggcaggggcagcagcagcggagctgtggacccttcagtgcaacggtcattcacccaggtcacattaccttccttctctccctcggcggcctccccacaggctccaactctgcaagtcaaggtttctcccacctcagttcccaccacacccagggcaactcctattcttcagccccgcccccagccccagcctcaacctcaaactcagctgcaacaacagacggtaatgatcacgccaacattcagcaccactccgcagacgaggatcatccagcagcctttgatataccagaatgcagctactagctttcaagtccttcagcctcaagtccaaagcctggtgacatcctcccaggtacagccggtcaccattcagcagcaggtgcagacagtacaggcccagcgggtgctgacacaaacggccaatggcacgctgcagacccttgccccggctacggtgcagacagttgctgcgccacaggtgcagcaggtcccggtcctggtccagcctcagatcatcaagacagattcccttgttttgaccacactgaagacagatggcagccctgttatggctgcggtccagaacccggccctcaccgccctcaccacccctatccagacggctgcccttcaagtaccaaccctggtgggcagcagtgggaccattctgaccacaatgcctgtaatgatggggcaagagaaagtgcccattaagcaggtacctgggggagtcaagcagcttgagccccccaaagaaggagaaaggcggacaacccataatatcattgagaaacgatatcgctcctccatcaatgacaaaatcatcgaattgaaagacctggtcatggggacagacgccaagatgcacaagtctggcgttctgaggaaggccattgattacatcaaatacttgcagcaggtcaatcataaactgcgccaggagaacatggtgctgaagctggcaaatcaaaagaacaagcttctaaagggcatcgacctaggcagtctggtggacaatgaggtggacctgaagatcgaggactttaatcagaatgtccttctgatgtcccccccagcctctgactcagggtcccaggctggcttctctccctactccattgactctgagccaggaagccctctattggatgatgcaaaggtcaaagatgagccagactctcctcctgtggcgctgggcatggtagaccgctcacggattcttctgtgtgtcctcaccttcctgtgcctctcctttaaccccctgacttccctgctgcagtggggaggggcccacgactctgaccagcacccacactcaggctctggccgcagtgtcctgtcattcgagtcaggttctgggggctggtttgactggatgatgcctactcttctcttatggctggtaaatggtgtgattgtcctgagcgtctttgtgaagctgctggttcatggggagccagtgatccggccacactcgcgctcctcggtcaccttctggaggcaccggaaacaggcagatctggatctcgccagaggagattttgcagctgctgccggcaacctacaaacctgcctggcagttttgggccgggcactgcccacctcccgcctggacctggcctgcagcctctcctggaacgtgatccgctacagcctgcagaagctacgcctggtgcgctggctgctcaagaaagtcttccagtgccggcgggccacgccagccactgaggcaggctttgaagacgaagctaagaccagcgcccgggatgcggctctggcctatcaccggctgcaccagctgcacatcacagggaagcttcctgcaggatccgcctgttccgatgtacacatggcgttgtgtgccgtgaacctggctgaatgtgcagaggagaagatcccaccgagcacactggttgagatccatctgactgctgccatggggctcaagacccggtgtggaggcaagctgggcttcctggccagctacttcctcagccgagcccagagcctgtgtggccccgagcacagtgctgttcctgactccctgcgctggctctgccaccccctgggccagaagtttttcatggagcggagctggtctgtgaagtcagctgccaaggagagtctatactgtgcccagaggaacccagctgaccccattgcgcaggtccaccaggccttctgcaagaacctgctggagcgagctatagagtccttggtgaaacctcaggccaagaagaaggctggagaccaggaagaagagagctgtgaattctccagtgctctggagtacttgaaattacttcattcttttgtggactctgtgggggttatgagccccccactctccaggagctccgtgctcaagtccgccctgggtccagacatcatctgtcggtggtggacgtctgcaatcactgtggccatcagctggctccagggagacgatgcagctgtgcgctctcattttaccaaagtggaacgcatccccaaggccctggaagtgacagagagccccctggtgaaggccatcttccatgcctgcagagccatgcatgcctcactccctgggaaagcagatgggcagcagagttccttctgccattgcgagagggccagtggccacctatggagcagcctcaacgtcagtggggccacctctgaccctgccctcaaccacgtggtccagctgctcacctgtgacctgctactgtcgctacggacagcgctctggcaaaaacaggccagtgccagccaggctgtgggggagacctaccacgcgtcaggcgctgaactggcgggcttccaacgggacctgggcagcctgcgcaggctggcacacagcttccgcccagcataccgcaaggtgttcctgcatgaagccaccgtgcgcctgatggcaggagccagccccacccgcacccaccagctgctggaacacagcctgcggcggcgcaccacgcagagcaccaagcacggagaggtggatgcctggcccggccagcgagagcgggccaccgccatcctgctggcctgccgccacctgcccctctccttcctctcctccccgggccagcgggcagtgctgctggccgaagctgcccgcaccctggagaaggtgggcgaccggcgctcctgcaacgactgccagcagatgattgttaagctgggtggtggcactgccattgccgcctcctgaccaccaggctcagcccacccctccacctctctctcgatttctctctctccccctcagcatcttcccgctgagagtggtggggaagagccttgtcttcttagctgtcacctgccgaggcttctgggccactcaggccagtgcacccctgggcagagccccttaaagctgctgtcactagatgcccatggtccagggcctggtgggcgtgagaggataggtggcagggcagaaactgggcagccctgacttgatagcagcagggggagctcccaagctgccaagcccctgcctccagccttcctgagtttctctctcctgaaccctactctctcctttttgcttcctcagtttttatcaggctttctctgggggacagcagtctctgagcaccagggagcagttgccctcaggcctgtgcccagcatgccctcccctttttatacgaatgttttctaccagtgtgcttgggtttgccatgatgcgaggctgagttgctgtagcgtcttgattctctccctgggtctgcgttccctcccctgggcctgactgagcctgctcattgtttttccctttattacacaggacagccaggggaggaggggggcccagccctgggaggctggtgggaggcagggggcaggcctgcggatgcatgaaataatgttggcattattttttaattttttaaaaagatgttagcccaagctcagggtaggcccagggggctgggagaaatgaagccacccatggggactggggaccaggggccttcagcatggcttctaggttccctcctccccctaccccatctcctacctccacagtacagactgtccccaacttaacagtggttcaacttaaaccatgtttcaactttacaattggtctgttggggtattaaatgaatttgtgacttaggatattttcatttatgatgggtttatcaggaagtaaccccatggtaagttgaggcatatctgtatatatttaaacctaattaattcttgagctgaaaataaataaaccaggatggcagggaccaacccctaatccctccccagcggcaagcccctcttttcagagtgggcagagggttgcctatggtgggcactaggaatgaggtcccctgcctcgatgcgggtcctaggagaaaaagtcctacttttctgggtccccaggtgctcacagcagggccaccttgatgcaggctggaatgttatccctggggtgtgcttggaccccacctgctttctttctctcctgcccctcccctactctcactgtaatttatggaccctgcccgcctgcgtgttgtgtgtatgtcctgtgccttttctcactattgtttgggtgtgggagggggtggtttttcactgaaaaggggggtacacctatagctttcttgatgttcaatcaatcagtcactgtgtcccagacatattcaataaacacagattggtaccaccca

SEQ ID NO: 411 - protein, 1129 aa, Homo sapiens
MDDSGELGGLETMLTELGDELTLGDIDEMLQFVSNQVGEFPDLFSEQLCSSFPGSGGSGSSSGSSGSSSSSSNGRGSSSGAVDPSVQRSFTQVTLPSFSPSADQAPTLQVKVSPTSVPTTPRATPILQPRPQPQPQPQTQLQQQTVMITPTFSTTPQTRIIQQPLIYQNAATSFQVLQPQVQSLVTSSQVQPVTIQQQVQTVQAQRVLTQTANGTLQTLAPATVQTVAAPQVQQVPVLVQPQIIKTDSLVLTTLKTDGSPVMAAVQNPALTALTTPIQTAALQVPTLVGSSGTILTTMPVMMGQEKVPIKQVPGGVKQLEPPKEGERRTTHNIIEKRYRSSINDKIIELKDLVMGTDAKMHKSGVLRKAIDYIKYLQQVNHKLRQENMVLKLANQKNKLLKGIDLGSLVDNEVDLKIEDFNQNVLLMSPPASDSGSQAGFSPYSIDSEPGSPLLDDAKVKDEPDSPPVGMVDRSRILLCVLTFLCLSFNPLTSLLQWGGAHDSDQHPHSGSGRSVLSFESGSGGWFDWMMPTLLLWLVNGVIVLSVFVKLLVHGEPVIRPHSRSSVTFWRHRKQADLDLRDFAAAAGNLQTCLAVLGRALPTSRLDLACSLSWNVIRYSLQKLRLVRWLLKKVFQCRRATPATEAGFEDEAKTSARDAAYHRLHQLHITGKLPAGSACSDVHMALCAVNLAECAEEKIPPSTLVEIHLTAAMGLKTRCGGKLGFLASYFLSRAQSLCGPEHSAVPDSLRWLCHPLGQKFFMERSWSVKSAAKESLYCAQRNPADPIAQVHQAFCKNLLERAIESLVKPQAKKKAGDQEEESCEFSSALEYLKLLHSFVDSVGVMSPPLSRSSVLKSALGPDIICRWWTSAITVAISWLQGDDAAVRSHFTKVERIPKALEVTESPLVKAIFHACRAMHASLPGKADGQQSSFCHCERASGHLWSSLNVSGATSDPALNHVVQLLTCDLLLSLRTALWQKQASASQAVGETYHASGAELAGFQRDLGSLRRLAHSFRPAYRKVFLHEATVRLMAGDTRTHQLLEHSLRRRTTQSTKHGEVDAWPGQRERATAILLACRHLPLSFLSSPGQRAVLLAEAARTLEKVGDRRSCNDCQQMIVKLGGGTAIAAS

SEQ ID NO: 412 - DNA, 5232 bp, Homo sapiens
cggcgcccgggcgcaacgcaaacatggcggcgggtggcacccgtcggtgaggcggtgccgggcgggggttgtcgggtgtcatgggcggtggcgacggcaccgcccccgcgtctccctgagcgggacggcagggggggcttctgcgctgagccgggcgatggacgacagcggcgagctgggtggtctggagaccatggagaccctcacggagctgggcgacgagctgaccctgggagacatcgacgagatgctgcaatttgtcagtaatcaagtgggagagttccctgacttgttttcagaacagctgtgtagctcctttcctggcagtggtggtagtggtagcagcagcggcagcagtggcagcagcagcagcagcagcaatggcaggggcagcagcagcggagctgtggacccttcagtgcaacggtcattcacccaggtcacattaccttccttctctccctcggcggcctccccacaggctccaactctgcaagtcaaggtttctcccacctcagttcccaccacacccagggcaactcctattcttcagccccgcccccagccccagcctcaacctcaaactcagctgcaacaacagacggtaatgatcacgccaacattcagcaccactccgcagacgaggatcatccagcagcctttgatataccagaatgcagctactagctttcaagtccttcagcctcaagtccaaagcctggtgacatcctcccaggtacagccggtcaccattcagcagcaggtgcagacagtacaggcccagcgggtgctgacacaaacggccaatggcacgctgcagacccttgccccggctacggtgcagacagttgctgcgccacaggtgcagcaggtcccggtcctggtccagcctcagatcatcaagacagattcccttgttttgaccacactgaagacagatggcagccctgttatggctgcggtccagaacccggccctcaccgccctcaccacccctatccagacggctgcccttcaagtaccaaccctggtgggcagcagtgggaccattctgaccacaatgcctgtaatgatggggcaagagaaagtgcccattaagcaggtacctgggggagtcaagcagcttgagccccccaaagaaggagaaaggcggacaacccataatatcattgagaaacgatatcgctcctccatcaatgacaaaatcatcgaattgaaagacctggtcatggggacagacgccaagatgcacaagtctggcgttctgaggaaggccattgattacatcaaatacttgcagcaggtcaatcataaactgcgccaggagaacatggtgctgaagctggcaaatcaaaagaacaagcttctaaagggcatcgacctaggcagtctggtggacaatgaggtggacctgaagatcgaggactttaatcagaatgtccttctgatgtcccccccagcctctgactcagggtcccaggctggcttctctccctactccattgactctgagccaggaagccctctattggatgatgcaaaggtcaaagatgagccagactctcctcctgtggcgctgggcatggtagaccgctcacggattcttctgtgtgtcctcaccttcctgtgcctctcctttaaccccctgacttccctgctgcagtggggaggggcccacgactctgaccagcacccacactcaggctctggccgcagtgtcctgtcattcgagtcaggttctgggggctggtttgactggatgatgcctactcttctcttatggctggtaaatggtgtgattgtcctgagcgtctttgtgaagctgctggttcatggggagccagtgatccggccacactcgcgctcctcggtcaccttctggaggcaccggaaacaggcagatctggatctcgccagaggagattttgcagctgctgccggcaacctacaaacctgcctggcagttttgggccgggcactgcccacctcccgcctggacctggcctgcagcctctcctggaacgtgatccgctacagcctgcagaagctacgcctggtgcgctggctgctcaagaaagtcttccagtgccggcgggccacgccagccactgaggcaggctttgaagacgaagctaagaccagcgcccgggatgcggctctggcctatcaccggctgcaccagctgcacatcacagggaagcttcctgcaggatccgcctgttccgatgtacacatggcgttgtgtgccgtgaacctggctgaatgtgcagaggagaagatcccaccgagcacactggttgagatccatctgactgctgccatggggctcaagacccggtgtggaggcaagctgggcttcctggccagctacttcctcagccgagcccagagcctgtgtggccccgagcacagtgctgttcctgactccctgcgctggctctgccaccccctgggccagaagtttttcatggagcggagctggtctgtgaagtcagctgccaaggagagtctatactgtgcccagaggaacccagctgaccccattgcgcaggtccaccaggccttctgcaagaacctgctggagcgagctatagagtccttggtgaaacctcaggccaagaagaaggctggagaccaggaagaagagagctgtgaattctccagtgctctggagtacttgaaattacttcattcttttgtggactctgtgggggttatgagccccccactctccaggagctccgtgctcaagtccgccctgggtccagacatcatctgtcggtggtggacgtctgcaatcactgtggccatcagctggctccagggagacgatgcagctgtgcgctctcattttaccaaagtggaacgcatccccaaggccctggaagtgacagagagccccctggtgaaggccatcttccatgcctgcagagccatgcatgcctcactccctgggaaagcagatgggcagcagagttccttctgccattgcgagagggccagtggccacctatggagcagcctcaacgtcagtggggccacctctgaccctgccctcaaccacgtggtccagctgctcacctgtgacctgctactgtcgctacggacagcgctctggcaaaaacaggccagtgccagccaggctgtgggggagacctaccacgcgtcaggcgctgaactggcgggcttccaacgggacctgggcagcctgcgcaggctggcacacagcttccgcccagcataccgcaaggtgttcctgcatgaagccaccgtgcgcctgatggcaggagccagccccacccgcacccaccagctgctggaacacagcctgcggcggcgcaccacgcagagcaccaagcacggagaggtggatgcctggcccggccagcgagagcgggccaccgccatcctgctggcctgccgccacctgcccctctccttcctctcctccccgggccagcgggcagtgctgctggccgaagctgcccgcaccctggagaaggtgggcgaccggcgctcctgcaacgactgccagcagatgattgttaagctgggtggtggcactgccattgccgcctcctgaccaccaggctcagcccacccctccacctctctctcgatttctctctctccccctcagcatcttcccgctgagagtggtggggaagagccttgtcttcttagctgtcacctgccgaggcttctgggccactcaggccagtgcacccctgggcagagccccttaaagctgctgtcactagatgcccatggtccagggcctggtgggcgtgagaggataggtggcagggcagaaactgggcagccctgacttgatagcagcagggggagctcccaagctgccaagcccctgcctccagccttcctgagtttctctctcctgaaccctactctctcctttttgcttcctcagtttttatcaggctttctctgggggacagcagtctctgagcaccagggagcagttgccctcaggcctgtgcccagcatgccctcccctttttatacgaatgttttctaccagtgtgcttgggtttgccatgatgcgaggctgagttgctgtagcgtcttgattctctccctgggtctgcgttccctcccctgggcctgactgagcctgctcattgtttttccctttattacacaggacagccaggggaggaggggggcccagccctgggaggctggtgggaggcagggggcaggcctgcggatgcatgaaataatgttggcattattttttaattttttaaaaaataaatggtatcttatttaattgtcctgttccttcccactccccgcctcctaggatgttagcccaagctcagggtaggcccagggggctgggagaaatgaagccacccatggggactggggaccaggggccttcagcatggcttctaggttccctcctccccctaccccatctcctacctccacagtacagactgtccccaacttaacagtggttcaacttaaaccatgtttcaactttacaattggtctgttggggtattaaatgaatttgtgacttaggatattttcatttatgatgggtttatcaggaagtaaccccatggtaagttgaggcatatctgtatatatttaaacctaattaattcttgagctgaaaataaataaaccaggatggcagggaccaacccctaatccctccccagcggcaagcccctcttttcagagtgggcagagggttgcctatggtgggcactaggaatgaggtcccctgcctcgatgcgggtcctaggagaaaaagtcctacttttctgggtccccaggtgcagcacctcccggagactgtttctcccatggcctcctgagtgatgggccctgcctccctgtgcctcatcctcaggctggttggagcagagggtgggcaggagccccagcacagactggggggtgctcacagcagggccaccttgatgcaggctggaatgttatccctggggtgtgcttggaccccacctgctttctttctctcctgcccctcccctactctcactgtaatttatggaccctgcccgcctgcgtgttgtgtgtatgtcctgtgccttttctcactattgtttgggtgtgggagggggtggtttttcactgaaaaggggggtacacctatagctttcttgatgttcaatcaatcagtcactgtgtcccagacatattcaataaacacagattggtaccacccagcac

SEQ ID NO: 413 - protein, 1129 aa, Homo sapiens; identical to SEQ ID NO: 411

SEQ ID NO: 414 - DNA, 81789 bp, Mus musculus
  misc_feature (1)...(81789): n = A,T,C or G
tcgcttatgtcctccgcgccaccacggtcgcccaccccgcgggcccccaagatgaagaaggacgagtctttcttgggcaagttgggcggcacactggcaaggaagaagaagaccagggagggtgagtgtgcccctgcgtccctttggcgccagccgggtgccagcggtgtcccccgtgtgtccgctccctgcccgcctcggcggcgccaatgagccctcctgtcgcgctcaggctacgcgacctttgggacaggccggtccctgtccgtaagacatttgcagtgctggcccagtgcataggacgtgcgttctgctctggacacaggcctagcaagctactgttcctgtgctcatccttgtcgtgtgacactctcgtcacagtgattggacacatgctggtagagaggaccggctactgtttgcgtgatgcctgcaagcatggctccgtccctaagctgggagtcaatgaaagggcacaggacacacaggccaggagcctggggaagcctggaaccagtgcaagggcagggggcgggggggaggggcggggggggaggtcatgccccctgcgcaggaaagtaattttaaaacgactttttactttcaaaacttttaaaaaacaaaactgcaagggatgtaacttctccgcctctggccagagccctaaggtaccgcagttccctcccctcccctcgcagaaacattcctgaattttctattgttttgtcctggaggctcttgcccttgggctgagattccggcagctcacgaggaatgggaggggctttctgagaaaggacaggtagaaagaagcttcagagacaacacttcctggggacccccaagttagggtgtgctgagggtctcctccagccactggagccacactgactcccagaaagcctgggcctccagggcaagccctgcctaagaggtgactgataatcaccctgtgggcccaaaggaccggcgtgaggtatttactcataaagggacctccaggtcctaaattatgggcagactcattctggcctttcaaggtgtcttgaaaggcagggcatgtggggaaatgctgaacttctttgatagaaccggtgaagacactgtgggtcccacattctgcccagacttgccttcccaggccttcaaccccagaatgccctttaccaacctagattgtccagggggcaggcaggcctggtcttcttcctagggtttattgctaatcaaatgggctcttcccctctcaagtcttccattccagacccttcaggttggcctgcatctccatcagtatcctaaatgagaccgaagtccttgtctcccttggtcacccactgttgtctttggtttctcagtgccgacgttgccatcctgcctagaaatctattttcttttcaggagttaggacagtggcagacctgagttctttccatcacctgttttgttttgttaaattttgtttttgtttctttgtttttatttttagtttttttgagacagggtttctctgtgtagccctggctgtcctggaactcactctggagaccaggctggattcaaattcagaaatcggcccgcctctgcctcccaagtgctaggattaaaggtgtgcgccaccaccgcccgacagtttttgtttttgagctggcgttttgctgtgtctggactcagccctgggttcaagtgatcctcctgcttcagtcttgcctgtgtcaggaactgcaggtgtgtgccagccttttgtggcttaccatatgtgtgactatgatgtggcgtggatacgtcaaggccttggaaagaaggggagaggctcagtcttccagggccctgggaatgggcgccacagtgtggaagcctatgggaatccccatgatcctaagctgtagctgtcaagagggcccgggaatggggggtggcgatgttggagataaaaacctaagaaagaaaatctttcatagaaaagcatgcttaagagtatgaatggttacagctgctgtgtgtttcatgtgtgtgtacacgcgtgtacaggccagaagtcaatggtgggtgtcttcctcggcttctcactattatctatgaacccatcatctatgtatctaccatctatgtatctatcatctatgtatctatgcatctatctatgtatctataatctatgtatcaatgtatctgtctacgtatgtatgtatatatgtatctatcttcttttttttagattattatttatttatttatttatttatttattccatgtaagtacactgtagctgtcttcagacacaccagaagagggcgtcagatcttgttacagatggttgtgagccaccatgaggttgctgggatttgaactctggaccttcggaagagtagtcgggtgctcttacccaccgagccatctcaccagcccttgtatctatcttctatcatctgcctatctgtcatctatgtatgtatgtatctactatctatcatctatgtatgtatctatctactatctctctctctctctcttctctctctctctctctctctctctctagctcatctttctacctacctaccccggctggcctggaacgaccaggatggcttggcacttaagagacctgcctggtgttgccttctgtgtgatggtattaaaagtgtgtacttctacactgggttccttcttgtttgtttgaggcaaagtcactcactgactggagctctttgactgcaatcagcaagccctggggtcctctgtcgtcacctcccctgacttgagattacaggcgagcaacacttggcttttgactctttttttttttttttttttatcaccagtgctggggatggaactctgatcctcatgcacgcactttgccaactgagctgccttcccaagctgcccctgttacagcttttctcaggtggtacttacactattggaccacaagggcggcaccagtgaggtaatgagctggcctcagtttccaattgttagtgcttctctgctttgcttttatgagatcttgtatgacccggagatggagggatgggctggcccagtttaaatgcacctggaaccccaagcaacaccttccctctgcttgctgcttctgctggtattgccatcctgtgagttggcttggccctctgcctcagttctcaaggttagagagcctgtcacccctataaccagaaagccacaaaccctaattggtctctgaggcagggatggagggaaggcttagcctgggaagggctgagtagcttccttgtggtcctctggggaatggaggggctaatgtgaatactgtgtaatgaggtcttgaataattgagcactgagagctgccagtatttctgcagacctgttgccttggaaactggccctcctgactgctcttggccttgactttgggccataggagcttaagtaccgatgcctactagggaatgaccagttggagggcatggggtttcccagcctgcccgtccaaacacttagctgtgtttcctcctttgttagaaagtccagggtggactccggacatttcctgagctgaggacaccggagggggggggcggggatggctggtgaaattcaaggtttggggacctatgggcatttgaccccaccctgccttgcagagtggcaaagaggggagggaccaactgggacaaatgctttgtcccattccaggaggtgggggtaggatgtagggtgagctaggatacccagcacaggaagtgtctaagaatgaatagggcgtgattcagcccagcggagacattgtggtgtcacggggtggcctggtcagaaaagggaagtgtgactaactgtgcacattggaaaacggaagggaacgcctacaacactcaggcctccctatggggagtctgagcccgggccctgtgaggtcaggagccagcttaaacctctggaggtcagggtgtgtgtgtgtgtgtgtgtgtgtgtgtgtgtggacggactagctattgaaatctaccatctatctgttctatcaattgtgtatgtatgtatcgtctacgtatctactctatcaattgtctgtctgtccatccatccgtccatccatctgtctttccatccatccatccatccatccatccatccatccatccatccatccgtctttccatccatccatccatccatccatccatccatccatcttatccgcatgtacttttgtttcctagcaaaattagcaaaatggagtgaagactggagtttgccctccctacctccattctcccaggcactgtggaacttcatttcagttctaaaccagcttaagaagtttttgtctcctatagcagacagtagggctgctctcacggtgtataatgaagggtccctgctccattgcctgtctggctctcccattcccaagacccccaaactcttggatttcatttatttatttatatgagcacactgtagctgtcttcagccacactagaacagggcacgagatctcattgcagatggttctgagccaccatgtggtgggaattgaactcaggacctctggaagagcagtcagtcagtcctcttaactgctgagccatctctccgccctggttttgtttttttttgagacagggtttcactgtgtagtcttggccatcctggaactcaactctgcagatcaagttggcctcaaactcacagagatctgactgcctctgcctccacctcccagagtgttgggagccacccctggctggtaacgcttggatttttttttttttttttttttttaatttttaacaatctccacagttttgccttttcctagaatcatgaactggaatcctagtgcttgatgtgaggcttttcatactggcctccttcactcactgcccagctaagtctcctccctgtgtctgtgggccactgcgcctggctcatgcagtgctgagagtccaatcctgcacctagtgtatgctaggtgaacactctacccacggagctatatccccagccccgaaccctgaacttctgaaatttactcagtgctgtgaaagaagaaaatataatgcaaccaacttgtcagatgtccggggggaggggaaggaggagggggggtacttgtaggaaagggggaggggaagctagtgtcccctgaggagaagagttgctcctagatctgagggcatcaggaaacaggtggcagacagctggctgtgtacaggggacctcaggagccaacctggctcaggcctcctactcgggacagctcctagaagccagacctgcctgccacagtggctcgagccctcctgcaccagtcatcaacccagacctctcacagacaggtcaatctgatcaaggcagttagttcttcaattaacgctctctctgcccgggtgtgccaaggtcgacaatgaaacctaaccaggacatgactttggttgagaataaaagacggctgtaattaggcagaggaaggggagagtgtccagagaagaccctttaagaaggcccgttaggggatgtgcaagggggtgccttgtgtctgggctgtggtttagcgtgtggggccacagtcagccacagagggagatccctggggggtacagcaagaatgacctatttgggtgacactcattagaggcctcgaaggccacagttttgaggccaactgatgtggatggaggagaagtctgattcaccgctgtagcctcagtgtgtgtgggggggagggagcaggtggatgtcagcaggtgaggaatgggggggcatatgcgctgtggtttctagaatgttctggtggaaaggggaacagggagctgcaaggctctagagacctaggcaacatagagaaagaacctgctccacagagcctttctccaaacctagacctgggtactggggatggagtcagggctgggtcatgctaagcccttgcagtaccacagagctgagccccaacccttttcttccctgatgatcattaaggaggccatcttgctgggaagcaggaggcagctcctgcttcatgaaggaaggtccagttaggtggaccaggctctcatgcctgtgccctcaggcacgcctgctatccctttgctgagctgaagtccccaatacacagccagtgctatctgtcacttgttttcctgatgctgtcagatccaggagcactgctgcccctggtgtttgggcatctcctgagaggacacgagggggatttgtatgggggctgtgtgtgtggcttcatcaattttctcgtcgttacttttctgaccataacatcaaacccagggattgcttcaagtgtcctgttgagttctgtggtccccggggaacatctggatcggtagtgggtgcttttcttggccgcctcttaagacttcaaaaaaccaggcttcagctaaaaaaaataaaataaaaggtgcctcttggccctgagaagttcgcctctttccatctctacctctcagacctaggccttttcttctattctaacaccacgattctgctgcctactggtcccgggtttccccagaaagtcaatcagccatcacatccagtgatccttaggagcaccgtgctttgaattcccatctcacctctctggaattagtgtttactgaacactccgaagctgctcacccggttgctctcatgcagtcctcagaataattaacgggtgtttagacagtgtaatggtcccgcacctgctgagcgctggttctaatgtgctcctttgatcgattccaccctgccgtgcctggccgaggtcaactccatgcacctagctattttcttcttggcaaatatgagattcatcacaggaaaaagaaaaaaaaaaaaaacccgcactcgaagaaaacgcgtttttcttctctttgcattggctgcgtgtttcactttttaggaaagcgagtgcctaatgagtgcgtttgggctggaaaacatcccagttgtatgaagtggaatataaactcagcttggcttaatggtgttaatcttgtctatgcaaatggctgttggggtaagagagtgcagacgtgagcaatccattgctggcatctgcgtcattaattcttagtaacacatcctcaaaagaggggcttctggttagaagtaaatacagactgagtttgcatctcgagcacgtagcatcagccacgtgcccagaccaagcccagaccaagcccagaccaagcccagaccaagcacgactgtgacgtggggacccacactccatgctatgggatcttatcattcttcattcttaccgggtgggggcggggcggcgcggggcggcgaggccggtggaggtaaatgaaaactgttggcaaaggtagaattactgccctgctgagttggttctagttggtttgtagaggtgcagctgttggacctccaggatagcactgtggggggcggagggggggaggtacacagtttacagcctggctgcagagatctgtgacttcatctctaggagattctgtgtctgccatcctgaacacagtagcctcttccttaggatttgaggaaggagccaccaagccttgtcagcatgggatggcggctgagaggtgttaattactgatggatactgataagtggtgctttggtttggtggtggagcaaggggtcaagtggacttccgcttgggagcaaacttggctcgataaaagaattctgagggtgtgtcagagcctatgagaaaagaatgctgggaacccagggtctccctacctgtgtgagtggccttgctggaacagaaaccttcctgggctcagatcaactcagtaaccctggcagcgctgtccttcagagctccacccggctgcagggggctggatgctgagttgctaaaatctttgcctcaaggagtgccgggacccttactctattctagtcacatttctgttgctctgggaaacaccgtggcaaatacaacagaaggacccattctaggtcacaattgagttacagccctcactgttgggagtcaaggcggggtcttgaagcagctaagggcagagacgcaacaccagcaggcttggtgttttagtcagggtttctattcctggacaaaacatcatgaccaagaagcaagttggggaggaaagggtttattcagcttacatttccacactgctgttcatcactaagggaagtcaggactggaactcaagcaggtcagaaagcaggagctgatgcagaggccatggagggatgtgacttactggcttgctcagcttggctcttatagaaccaagactaccagcccagagatggcaccacccacaaggggacctcccaccttgattactagttgagaaaatgccttacagttggatctcatggaggcatttccccaactgaagctcctttctctgttgataactccagcctgtgtcaagttgacacaaaactagccagtacacttggtcttcagctttctcttgttaatggctccaaccagggagtgatggtattgcccacttacaggccgggtcttcccacatcaattaaggccaccaagacaatcccttacagcagtggttctcaaccctttattacagttcctcatgctgtggtgccctccaattataaaattattttcgttgctacttcataactgtaattttgctactgttatgagccatgatgtcaatgtctgtgttttcccagtggtcttagaggaccgactcctgtggaaggggttgagcaacccacaggttgggagccgttgttccatgggactagcgtgatggctcagtggttaagagcatcagctgctctcaaagaggactgggttctcagcgtcctcgtctgcagcatctaaccaccagtaacaccagtttcaggggttctgacgccctcttctgatatccatgggcaccaacacacttataaacatgcagtatcccttgcaccccccccccccagacagtcccctacagacacacccacaggccaatgtcgtctagagaatccctcactgatactctaaccaggcaatttagagtgtgtcatactgacaatgaatcctaaacatatgacccccgggcactctgacccgtaagcactctcttcttggaagcccttgctcagtgcctttgatgtgtgccgcaagcagcagatacccaaaccctgtgctgggtaccacaacttctggctggtgccaggaaagctggaggcatttgctccagcctggctctccactggggtcagcccagccagagggtcagggagccttagcagactcggggttatttcctgggcttgtgtgttggttgtggaacccaggggtcctcaggcttagctcttctgaaataccgacctccgcttggcttgttatttgaactcttccttgttggccggctagcacatatccttcatatgggtttccccaggcagtgcccccttgggagttaattctttttaaaaagtgtcgctctttaggaaaagttaggtctttttacacttcttcttgtttaaaaacgtacaaatcccaagaatctaggctttaatgccaagttatcgaaaagttaaagaggccacaaagacttttttatatctcctagggcttgtgtgtatcacgtgcttaagtctagaggcttctgcaagcagctgtctggttcagcgacccagagctgcctgctcggttgcctaggctcaggttactacagggagctggaaccccccaggcctaagctctaaatatatggatggagtggcctccagctcagcccatgtggtgtgggttaactgttttagtatcaatgggatttcagggacatcttgcccaaagcttaatttgtacttcttcttcttcctcctcctcctcctcctccccctcgaccctcctccctctcctccctctcctcctccttttcaacattgtccttcaaagtgaggattataggtgtccatatttgaagtgtgagtgtgtgtgtctgtgtatttgtgtatgtatgtatgtatgtatgtatgtatgtatgtatgtatgtgttttagtttcatttctgtcactgtgatataaataccataaccagaaacaattaaaacaattcaaaggtttatttatttatttatttatttatttatttatttattttggtttttcgagacagggtttctctgtgtagccctggctgtcctggaactcactctgtagaccaggctggcctcgaactcagaaatctgcctgcctctgcctcccaagtgctgggattaaaggcctgcaccaccaccgcctggcttcaaaggtttatttgacttataattctagaaagtttcctaattgtgtggcagccaggataactggccacatcacgtcacatcacatcacatcacatcacatcacatcacatcacatcacatcacatcacatcacatcacatcacatccacagtcaagcgcagagagagaacaaatgcatgcgcacttagcgttcagctcaatttttttattctcatacagtgcagggcccaattctagggcatggtaccactcacagtggactgtgtctccttacgtcggccattacaaaccaccgccacaatgtgcatgtatataagcttgtgtatttatgcttatatgtataaatgtatgcatgtgtgtttgtgtactcattttttttatttttttactaattcatttatttatggagacagagtttttctccgtagccttgactgtcctggaactcactctgtagaccaggctggccccagctcacagatccacctgactatgtctctcgagtgctgggatcaaaggcgtgtgctaccaccacccggctttattcttgatagaagaacctaaagcaggagagaaacaacacatgaattcaaaagcaaagcaagctgaaacagaagccacgtgtgcagtgggcagtcacagtgacagggccactgagactctgggtcccttgacattcatggtccatgctcaccttgtgcatggtgccttgagttattctacatgtctggaaagtgatactgtgcagtgattcctgtcttgtgggagagcagaggctgggtgaggtgaaggtctctcatctctcctcagcatggctagctgggaatgtaccttctcttttactcgctccagccctctatttgggtgacacttagccccagagtcagaaagatgctatggaggagactgactgcttgactgtatttttttctcctaaaaagatttatttatttatttattatgtatatatctttctgtctgcatgtatgcctacaagtcagaagagggcatcagatctcactacagatgattgtgaaccatcaggtagttgctgggaattgaactcaggacctctggaagaacagacagtgctcttaacctctgagctatatcaccagcccgattgactgcattctgtgctgagtgatgtggaggactggaccctggtggtttcattctgctacgggctgctgcccgagagggcctggtttggtcctgcaggccccacagtcttcctggtctcagagccctgactgtcctgccctctctccagagctttctgtcttgtcattttttttaagtttcattttttttttaaagatttatttattttatgtatatgagtacacagacacaccagaagagggtataggatcccattacagatggttgtgagccaccatgtggttgctgggaattgaactcaggacctctggtagagcagtcagtgctcttaaccactgagctatctctccagcccctgtcttgtcatttttatgtcacaccttctgtaacatgggacactatgatagcatcctgacaatgtctgccttcatgaggggttggcttgagacctatgttcccactaggtgaggtcatctgtgtcactaggaggccatgatgggacgtactcatccatttccatcatttgtacttatcaagcccaagcctgggttctgagaaatctcaggaggtggccaagaaaagcacccaccagatgctccccggggaccacagaactcaccaggacacttgaagaaacccctgggtttgatgttacggtcaaaaaaataatgatgagaaaattgatgaagccacacacacagcccccatacaaatcccctcgtgtcctctcgggagatgcccaaacaccaggggcagcagtgctcctggacctgacagcatcaggaaaacaggtgacagatagcactggctgtgtactggggacttcagctcagcaaagggatggccagagtgcctgagggcacaggcgtgagagcctggtccacctaactggaccttccttcatgaagcaggagctgcctcctgcttcccagcaaaatggcttccttaatgatcatcagggaagaaaagggttggggctcagctctctggtactgcaagggcttagcatgacccagccctgactccatccccggtacccaggtctaggtttggagaaaggctctgtggagcaggttgtctttgttggctaggtctctagagcaggtccacaagaaggttcttgttggaggagagtgagaggtggcaagcagagagggggctatggagggtgccaggagctgaaatgaggaagccagaagccagagtacctagtggtgtcccatgcctgttccatcccctatctcaacctccccctgctcccagcccggaaagcttcagctctgtagacaagtagtgtttagtcttctgacatccaaaactccaggtttttgttttttgtttgtttgtttgtttgtttgtttattattatatgtcagtacactgtagctgtccttagacacaccagaagagggcgtcagatcttattatggatgtttgtgagccaccatgtggttgctgggatttgaactcaggacctcagaagagcagtcagtgctcaactgctgagccatctcaccagccccagaactccaggtttgcaggtctgtgtggttttaagtctgatcatttctcaacctagtcactggacaccagtgactgctgacaggctgatgggtgaatccagagccgggagctggggaatatgtcaaccgtggcctactgcagagggcgagggagtcttctgtgttcctacaggctgtggattttaacataaggctttgcagggaggggagaatgtcacatgagtcacccaggtgccaacatctttgtgttagcatttcaccctcagtcagtccagtgccacccctccccatccaacagagaagaggtgccaggagagaggaaaggctgagcggcagtccttggagggaagccataaagatacaatgggaccacccggcatggcgcttttgggtggctgctttcctgtgggaaggcttgagtgtgagggctgaggacagagagcaggagctgggtgcccagggctcatctctctctgctttctccttcccgggataaccgtctccaggcatgtgcgcgcttccacagagacaaggggaagatgtgtctctcttggggacatgaggacgtccttcaacttcctgtgtggctgtttgaaagccctttgccagtgggggagagagtgttgtcctgaaatgtatgcaagagacttgttattagtataatgagattttaatgattcgagattttgttggagcagcacacatggaattctaatcttgttgtaggcagctgctggtgtttttgttttatttgtttgcttgggcctcattgtgaggatgcgtttctacaattattatttagttatgctctcacagagatctgcttttatgctgctcttaatgttcatgttgagagagtcttggggatgggaggagaatatatacttaaaattgtgtatatatattataaatgtatttatgttatatataaaacatatataaaattacatatagtctttttaaagctgggggctggtttgacagaactgagatgtgagggtttcaatttctgttccttattcgtaattgccacagagtagaaacaaccccagggccattaactgatcgtggggaaataaaatgtggtataatcacaaaatgaaatagtctgtagcagtgaaaagggagggctacagcatggatgaacctggaagatgctaagaatctgttcacaaaaggatgaacattgtgtgatggaaaaaaaatccagagtagtcaaattcatgggtcccaaaggtggacaagtggtcgctagaggctgggggttggagagtgagtgctcgctcgtagatacttttgggggtgaggtggatgtttttaagttgaaggtggtaatggttatgcactctgaatattctgaaagtcactgacttgggtcttcaaataggggaattatacagagtggtgtgaatcctgtcactgttgagcaattaaaatgcagaacaaagacgcggagttctggcttgctagcatctttcttcagctgtgtgtgtgtgtgtgtgtgtgtctgtgtgtgtgtgtgtgtgcacataggcacatgtgtacagaggtcagaggtgtctttcaggtgttgtacactgtgtgtgtgtgtgtgtgtgtttgtttgtttgtttgtttgttttgagacacggacagtccctctggaatccactgattgtactaggcaagccctatggatcctgttgtctccaccccacctcaccccatcccccagctggtgggtgttttacactagccagaggctagccttgatgctgagagtggatgataatattcacttagcgtgtggctttaagcagacgtgatgttctctctggggtctcaggacagggaaaccccagacatgacctgcttcttcaactctgtgctggtggtcagaaactgtaggttcagcactccatcaaatatagacagtggctgtcaccctccttccctgggggctctagagcttatgctggagcacagcagagcttgccttcgaggcaaacaccagaccccgagctgcgtccccacccagggacctagcacaccagaccctaagctgcatccccacccagggacctagcttttttctttttttctcttttcttttccaaaaaatgataaatctcaaacaaacaaaaaaatcttttccaatcatatatttatctaggtctgtctgcggagccccgccaagtgcagaggtacgtacgtaccttaatcccagtattcagaaggcagcaagctgggtctggaagcttccctcaggccaggggagggtggggactgtgccccagctgcagtgggtacaggtcttgctcattagacagataggagtcacggagaatatggaattagcctcaggagaggctgaccagagagggagacagaggcactttcttcactggacagggtatccaattctctgaggaatgagctagaagggcctgtctcttcgtgggtagaacgaggcagcatggccttcctgggtggccattccatctctcttgttcctctggacatttaattttttatgtgtatgggtgttttgtctgtctgtatgtctgtgtgctgtgtgctgtgtatgtgtgtgttgtgtgtgcagtacctgtggaggccataagagggcactagatcctcagagaccgaaatcacaaacagttgtgagctgccatatgggtgctaggattttaactcaggtcctagggaagagcagccattgctcttagccatggagccatctctccagccactgctgtgggatttttttggggtggggtggggaggcaatggagcctttcttggttttggtgccctcaacccagagagctagatagtagacattcaccaaagatgctccaagccagtggtgtcctggtttgcctgatcctcaaaaaacaactctccagggttaaagagtgatcagcgatcagagtgagatttattaaagttagaagttccaggagtaggaggggccttagggaggactgctgagggactgccggaccatggcttttaaaggtttgccgcagggattggactgtggattgactgtcttcaggtctttattgagattagtcaatttggagcacatcacaggctgagtgagtgaggagtccatgtgtcctgtgcatgctctctgagaccaaccggagtggtgcccccattggggatggggtcacatgcattatgtgactaactcatgacctcccatgggcccttggccttcacttcctataggatgctaactcctatctgaatatgagtccggctatttgaaattttcagagaaccaatgacatatttaaggggtcttgggaatcttaagcatgcctaccctcacttccccctcttctccctcctctccactactgcctgctgtggagcccagctgccagtctaggcctctggtccaagttctttgctgccttcttcagcctgaaatgaatctcattttacagatagggaaactgaggccttgagagaggcaagaagcccagtctctcgttgagtgatctcacagagtcttgtccccaatggagacttctgtgaggggtcggcggtgacagtgaaggacaagcaactgtgacctcaggcagcatgggcactcagtctgagcccaagtttagcctctgtctgataaattgacactttggaggggatggctgagaactggatgggggctgtcacacaggccagccaagcaccaggacactgagctgtgtgcccattccatgggttctacttttttttttaatatttatttatttattatatgtaagtacactgtagctgtcttcagacactccagaagagagcatcagattttgttacggatggttgtgagccaccatgtggttgctgggatttgaactcaggacctttggaagagcagttggcgctcttaaccactgagccatctcaccaggccgggttctactttttagcaggcgtatttacccactgcatgatggtggtgagggccacacagggtgagcgtgtgctgaggttgatgggagagattggattcttctagcagtaaagagccctctgaggccgtgtccctgaacggtcaaccctgtttgctggttattattttccttgtgttggagtgatctaattttaaaaactgtttcagagcaccttctagggagcccaaggggcccacaacagccctaggaaaggaactggaaatcaaacccaaagtggctccttgaatctgtgagtggagacaggtggctgcctgggaggtggctcatcaggggcttagccatgcacaacgaagaaggatgagtgttgttgttgttgttgttgttgttgttgttgtttttcctacactagagatcatgcaccaggctctcgtgcaagttagggagcatccgcaccattgagctggctgcctcctgtactttattttgagataggatctcacctcattcgaggtagtccgggctgtccttgaacgcccctgtcctcttcctcagcctcctgtatgatgggatcgcaggggtgtgcacacctcctgagctgagggggcgtgggcagaagagttaggaagtttgcctttccatctgttccaccaagaaccaccccattggacctttggggttctatttcgtgtgtgctttggcttctagtttacacacaaggccccaggaacctgccagcttctggactccctgattctccatgtgtgtagttatcagtgtgaggacagtcgatctcactggatttgcctctgggcagggtgggactaatcaagaggtggtctcaaggccgtgccttcttaagtttatgttgctgtagatattggcctgtcttttttttagctcagcttcttccttctttagtctttatctacagctggggtcttctgtaaaagatgcaatcttcaaaatgcatgctggctcttttgctgccactgaactgtgctgtggcaaccatagatggtgtggaaactgaggagtctggctttgtttcaataaagctttattgacaaacaccggctgagggccagctgccctgaagcatcatcggctgagtcttggtctgagccatagttttgatgccatagatcagaggctctagttagtcccctctccttttcagtgtgtgtgtggttccatctgtctgtctctccgtctgtctgtctgtgtttctctgtgtgagcctgtgtgtgtatctctctctctctttccttctctctctgtgtgcatgtgtgtgtgtgtttaatactcctacctgtgtgtggccagagatcaattgcaatcttcttcctctactgctttccacagtattaattaattaattaattaattaatttttaaacgaatgtgtgtattgcctgcatgtatatctttgcaacacacgtgtgccccggtgcttatggatgtcagaaaaaaagcctctgaccccctggggctgaagttacaggtgctgggagtcaaacctggctcctttggaagaacagttagtgctctcaactcatggtcatctccccagccctccaccttattttttgagacagtctttcactgaatctgggcctgggtgtttaggctgggctagtcgaccactgaaaacccaagatcttcccgtctcctcccctagcaatgaaggagtgttgtgtgagccagcaccggctttcatgcggttactggagatctgaactcaggtctatgagcttgacagcaagccttttatcaactgagcatcctcccagagtgtgggtactttttgtggattgtcttcagtaattccaaggcttctgtgtgagtcccctgcctgctgcaagcatggtacgcatgatccttggttagaagttcaaaccatgcagggcatggcatgcaagcatgaggacctgagttcgaatctccagcacccaggtaaaagccaggtaccactgtggcatgtaatcctctgacccacttcccagccacctctatcctgctcacctagtttttaaaaataagttccgacagctctatccctcacactgttctccgaggcctcacgtattccagcctgctggctcagtgatctaggtggggctcagtctcattccacctccctcgcccttggtgcatctttatttgttgtgtctggagacagccttaccatgtagcccaggctggccttgaactcacaaccctctagcttccgcctctgagtgctagggtcagaggctttccctccaacattatctcttttcatttctttgctgcctgtctcagcacagcagcaatgcctggtttcggagtgtgtggttctattatgagaaaattaaacacatttaagagcaaattaaattagaggattcatgatcattagctaagtaaattatttatttttttaagtaatgagccaggcagggtacagcgtgccgtggcatgctcaataagtatttgttggtgggagcgatcgtagcatgagcctatcaagttgcactggagggaattatttccctctgaaactaatgggatagctgaggggcagtaacggctactaaaaataccccgtgtgtttataaagcctccaaagacagagcgctccatgctggatcttggccaagggagaagtctggggacagctggcacactgagcccgtgtcatcgaagtggctttgtgaccttggttggggctgtccttgcggcccttgagcatttgtcagtattatgagcagacttagccccgcaacggctctcccttggccacgcagggacagagctggtggctaaaactggtgctctggaaggaggaggtagttaaaactgtgtgataattcatatatggggcagagccattcagaatcaagacctgtctggtagaggagggaggtccggggccagagagcctggggttggggcttgcgatccctaagaccataagtttaggttctagggagtcacagtgcagtcagatgtgtggtgtgaggtaggacccagaatggtgacccttctgtccagtctccctattgcccccttgcctaggataggggtcattcttggctatatagtgaggttaaggccactatctttcagctaactggaatcttgaaaataataagtttagtcaatcccagtgaagggaactgaggcccgagggtcaccacaagtcaaagccagcctgcgctacacagtgagtgctgaggccgtctgatctacacagtgagaaatccaacagcaaccacaaaaccagcctggggggttgcacatacctataattctagctctcgggagggaggcagagacaggagaattagagaaagtacaaagtcagcctgtctacgtagtgatttccaagtcagtctggactgggcagcgagactttgtctaaaaaacccactgatgtataggctggagagcaggctcagaggttttaagaggacctgggttcagtttccagcacccatgtcagatggctcacagcctcctttgcttctagttctagagggatcaagggctctggtttctgaaggtactgatactcatgagtacacacccctctcccacatccacataattaaaaataaaacaggtctttaaaacagtgtttcacaacctgtggagttgagactcccttgacaaacttcttccccccctcccccaatatttacattgcaatccataacagtagcaaaaaataaaaaaatcacagttttgaggtagcaatgaatataattttatagttgggggtcacctcgagacaccacgaggaactgtattaaagggtcgcggcattaggaaggtcgagaaacacctcttaaaaaaatccacaagaaaaataacaataattagaaaaataacaagacattattagctctgcattagcacccagcactgctatctggcttgaagagtggggctcgctccattcccccttctgcggtgaccacagcccagctatccagggagaattcttcctgtctcttccagctgcagctgttgcctgaagtctgcctttttgtgacatgtcttccctgtgtacctctgcctctgtcacgatgtgtctgtgtgtcttttgactgtgacagacaacaactttctttttttggggggggtggtatttctttcagccccactctggccccgctcgctctggtcccggccatatttacttcatatatgtgggtacactgtcactgtcttcagacacagcagaagacaacatcaaatgcccattacagatggctgtgagccaccatgtggttgctgggatttgaactcaggacctctggaagagcagtcagtgctcttaaccactgagccatctctctagccccaaaggccttattttcaaatgagtagattctcaggtcccaagtggacgagagttccaaaagacatttactcaactcacagtgaccagggctttgttagtgactaaatcaaatcactcccaactctagtgtagccaggatggccttaaactcacaacaaagccaagagtgacctccttctcctctctgccgctccataggttgacaggtacctattgtcacgctcctgccttattatcggttttcttgctgttattacccacaggcgagggaatggtgggagatagagatagtcaaaacagctgcttataattatctgggttctgcgcccagtggttcgtttcagactcttgggctccaaggggaaggagaggggatttgcccttgtctaatgaggaagactcagaggccctgtttgcattcacagggcccaaccacagatgctgttgggttctgttaacttcccaccactgtgttgttccatgggatatggtttcagcatctgacatgcacgctgttaaaatgaagagcatccatctcgagcctcggggatctgaaggaggttaggatacccctaaccctgacatgagggtgttccctgttgagggctgagtgccacgcactgcacgtggatggcctcagcttaagacttcgtgaacagcttcctctcagaagtctcactgaacttctgagaggttgtttgacaggcgcagcctgcgtgtcattaaacatgggcgagacctgctgtcgtgcggctttaaatagcgcttgacatcttgtccgtggcatgcatgctgagcagaggggaggggtagatgtgacatcccatgacatactttcctcctttctagccttcctctgcttatcctgttggaagctctgttcttccctgaatcatagagggcggaagaatggtcagagatacacagagctcagagttaggacgtcatggctgagtgtcatagaagcgtcatgccaatatcaggctaagaggaactgcaccaggactgttataaccagcaatcaccaacccaaagcacaacatgttcaaagaccacggcactaaggaggcagtgacgtgggtactttcttagaagtaaaggctgaaaagccaggaggcagagggtgtccatttgactgtagtggggtgcttgtaccccaggaatttaaacttcctgattcactgcatgctccccagtgactgactaagtactgtgagcatgcttcttcattcagccttagggatttttttttttttcttttttagcgagtgggtttgtaaactcaaaactcgcagaatgatttggacagcatttggccagtttgatgggaacttcaggaaagccactgcacggacagatggctacacatggttctgtgtctctgtcgccacggggaggtgtgtgtgtgtatctcttaccacacaaagcagctctctggagacaccaccagcacgtcctccagctcactgagttcccagggaacatcagagctgagggctgaggctcagcctgcaagtccaccccacttccacttcaggcacaagcgcaggctttagcttgtgacgggactgctggcacttggattgggttcatttgtggaaccctgggaaatggttctctttgctttttttctattaatattttcttaaaaaattgtttatgtatataagtacactgtcgttgtcttcagacacacccaaagagggcatcagatctcaatgcagatggttatgagccaccaccatgtggctcctgggaattgaactcaggacctcaggaaaaacagtcagtgctcttaaccgctgagccagctctccagcccttctttgtttaagaaagatcaggatgagcaggggaacgaggaggccctgctgagtcactaaacatcctttcttctggagttcagacaggccagcgtcccagcatcagggtgcgccttgtgtcttgtcaaccagggagccctcccaaactgccacacaaagacgggacaggtgaggacctcgggccccagttcctctcctctccagaagacatggggagctggggtttccgagtttctagtgcttccctggtctttctaggaccaggaacctccacaagttgcctccttagaacaacaacaataacaaaatgctcctgttgcttagggaatgccaagggttttaggaacttgggtcaggaacaggtacagactatgtattaaggcaaaaggggttttatcacagcatcagggcacagccctccaggctctgcagtgcctgagctactgctcccaaccttgatcttgtgcaggctaaggacgccgtaaccatcctccctattcttctccccctcccccacggccaactcatgcatttctcctctggatgttgtgtgtaaatgttctcattccaccaacaaaacccctgataggcagcctaaggtaggagaggtttatgtgggcttgtggggcagaggattttgtccacggatgagggaggttgcaattgctaccttgcatgtcttggtggactctcccaccctggtcctgatctgccgtgatgctgctttggaccgccagtcccgaagctagaggatgttgacctccccgaggggtggctccccctctgcttgctgaacctacctgggctgtggggcatctgaggagcactgatagcctgctctaggctgacaggccagaaagaccctgcagctgttacggtggtcctcatggtgtcagagtgcggcactccttggcatctgggcagaccccatgtgggcaactcccgctcttccagtgggatgaccacacagcatatggtcacgtgtgatgtcatcgaagttctgtcaatgctgcacttgggtcattagtgccgagtgtgtctgctgatcagggacggctgactgtgaacttctgggggcgacactgcagcctagtgtgtttgtctagcatcctttggtggctttgggagatcatgtggagtaatggatccatgatgcctaggtgttccttaagcgtggtcctcagtctgaaactgcccaccagggtagggaatacacaccgctgtagttatacttacaatcaatagcatctggcagtcttctgagatgccaggcattatatgagttcatcggtcacagaccgcccgagaggtgcatgggggggggggggtgttaccatcttcactctacagttggctgcagagtggcaggaagggctcagagcccagagttttctgcgactgcagaaaagcggatatattgcaggcgaagagcgtagagttctatagtggcttcctcttctccacttccagaaccttcttttgcaaaagacaaaagcagaaccaagaagccaggactgctggtacataccagtaatcccaggctgaggcagggggattaggagtttcgggccattcagagtttatatagcgatctgtccccacaaaagcaaaacacaaaacaggcagttctgcttggcttgaactgctgctcagatttgatttctgttgtcctggtaacgaatgacaggcgttcagcaccctctagtttggtcttctgtgtacttgacaaccaggagatgcttgctgtctggctcttcgtgcctgtgtcatgtcaccttctattggggctcatagagctgtccctgagataggacagacctctgcccttccccagcttgcaacccagaccccaggagacactcagagttgggattttcctgttcactagagtttggtgagtctcaagccaccccatggtgcgattggccctctccatactcagtgccactgtgggcttatggggccagtgggtggaattgccactgtggttctgaagttgcacatgatgtggccagtggccctcactatcttatcaaacaaccctggcctctgtggcttcctcaggggctccgcgattgcaagtcatggtgatgccctgggatccttatatggtacatgtgcatcccccgtgcctgggcagtgccagtagctgcttgctgcgggtccggagagtactgacatccccttggctgcacgatcctgacagtgagttgtcctcctcctcagcagaggcctcagcctcagccagccctgctgtggccctggtctgtgggagttgctttgcaagaatggaccctgggctgaccttttcctgggaaggtggtgggatgctagggtcggggtgacggggaaggaggacccgtggtctcttgtggcacccaagggagatgaggacctgacttgttggctgaagcttttgtcactcgggtgggccatgtgggtctttagggcgagaagaatgggagttgggacattgtcagggacaagtcattgttaggatgactctgtgtgtgtgcatgctaccacaagcatgtggcagtcagaggggactctgttctctctaccacagaggtccaatagacagaactcaggcttggcgagtacgacattcctctgcagagccatctttccagtcccatcttgtcattggagtaaccagtgggaggcatttaggaaggggtgcagacctgaggagaagcctggcctctggtcccattgtaaagtagcccagcatttgtgtttttttttttttcttttaattttggatgtgtgagagttggcccagttgatgtgcagagcactctgagaccttgtaacagtttttctttcacagtagaggaaactggaacccagaaaggttaaacaacctgactcaggcccctcaccaagtgggaatgggggagtaggtgctggttaagctaactggctctcaggaggggcaccaaacttcccttccaccctgaacccaggctgttagcctgttgtgtgactatgcctgcttggcctatgaaatgcttggtgttcttgttgctgcttcggagtccctgacaaaagccactcaaggaagggttattttgagggttcagtccatgatggcaggaaagcacccataggcaggaagcaaagagaagtactcagctcttacttgttaggatgtgtgtgtgtgagtgtatgggtgtatgtgtgcgtgcgcgtgcaaagggacttcagaactgacttggctgaaatgagggtcagcacttccctgccttccctgggcacatccctgctccctgtcaagtggccacactcttccagcctgctgcagtcaataacgcagaggaagtgggtggcaggcttggatagagaggtctgcttcctgctccatggagctgtccctgaagtctctggcctctcccacagcatctctctggactggggacttacttccagctggatgctgaatgggaccagatgaagaaagaggagaatgaagatgggctagctttctcatggggacgacggaggagcagtacttcctgtccctggtttataacacccctgcaggccacaggcccttacatcgaaggatatgtttgccaggttgttcataagtaccccacatggcagaaacaaaaggatggaatctcatcttcctggcaggccagccaccttcaaaacacggctccggggccacctcctccagggtctcacagaagctagtggcttgtgtgtggatttgaaaatgtccacagttctcaagaacttgttacccggggaatggagcagaggagagaatatgcttgccctgttggtcaggggccaaggaggtggccttggggacaaagcagagaagacaaagcttcaggaggagggcggcttatggggctcagctgtggctgcaaagggcaagcaattagcacacctccgactgctcctgtgaaaactattaaatggccaggcagtgtggaaagctggaggtagcctggtccccaactgccttcaggccaaggctgctgggtaaaccttcggagaggctagctcaggggaggtggcttcaggtgctgcgggtggccgtcctgtggtgtctgcccataaaagccaatgcctgttgggaaatctgttttctagaagaccccccaccctgacctctgtgtcaaggaccagtggctgccttgctgtgtggatcagggaggggcggtgctctctacagtgaggtcaaacagctcttcctttctgtctaaagttctgctgctgagtgacccaggcttgtctctttcaacagctcttgaaaggccagtgggagagtctatctggatgtgcaaggcttctggtagccaccctccttgtttgtttttttcctttctgtctttttgagacagggtctctctatgtagccctggctgtcttggaattcgctgtgtagaccaggctggccttgaacttacagagatctgcctgccttcggagtgctgggatcaaagcaacgtgccccccatgcccttgtttgtttctgtaggactgtggcaatgaggcaccagaacctcattagttagaacgggagtctgtgtgttgccttacagccctgaacgtcatcagtcaggatcagggctgggctttccagccttctggaggcttcgatgagttttcatctctgacctcttccagttctgaaaggacccgtgctgtccccgccatccccccagccatcagcacactgcatctcccagtctgtctctgttccaggcttctcttcctgcctggagaccccatggggttgcttgtactacccaagctaacttcagtatacattcatttttttcatcacagaaggggaagcaccatgcaaccataaaagatgtaggagaaagaggtccagggagttacagcgagaatccccaggcaggaatgatggcagatgcctgtaatcccactcagcaattggaccaatgaggcaggagaaggcctgtgagtctgaggctagcctgggctacgtatcaagattgttctccaaagaccaaaatagggaaaataactgcaaataaatgattgattaaagctgcagattgctggcccagttgctcctgaactcactgaggattagccagctgttctctgagcagtttgctctctgcctgatgccctgaggagccaggagacaagcaggtgacacgcctgccctttacagaagtgatggcagctaaacctttggcgcagatgtgccaaactgtgacaatgcctcgaagaaaggagctgtcaagggaggccaatgtgttggggaagtgcgtgggatccgtgggttccaagagtgtcaggggcagggagcgtgtctacataggctcttagccctggctcctcatctgccaagcttgcagagtccagtgctagtgttctgagcacccctccccccgtccccgccccccaacccaggtctttgctttttatctcagccaaagaagattaaactggacctgcctcccgaacgaagtctcgtcagacagccatagtacagatgaccactagagggcgccatgtacatagcgttcctgctctcagcccagtttgggggcggggggagtggttctccccgtggcaggtgtacagtagagctcttttgttgttgttgttaatggcttaatgatttaatcttcttattttctcagcagaaccgctttggacttctgggtatgtgggaacattaccgatcagattaattaccgctggttccacagctgggaagcgggcctcgccggctccgctgaggagtgactctcctgctgccatttctgctctcattcctgttctacacagtgcatttctctatctgtattgagcttgaccaggcttgttctgccgcttcgagcgaccagcagatttcattcccagtctgccttggtgagcaagcaacctgtatagctttctcagagggatggcacgatgtgtgttcaccaccggcagggaaatctgcattttgctcttttgctgtttatttgtttgtttgtatttggggtgttgcacgctcttctctctccgaattcttctgcacctcccccccaaccatgattaaaatcacttgtcgaaaggcagtggaattgattgaaaggaagtgggatcaaaagcaacccttcctaagttggggactccaaggcttgcggcaaaaggcctgctgtgtggcctggggttaagagtcattgatcatcagcacctgagctgagggtctgagccaagagaacagatgatgatcaggggagcccttctgtgcggggctggggtgtagggtgcagcttcaaaagcagggaatcaagtcatagggctgaagtcctctagactagccagtatgctgtgtgactctgcagtggtgacactggctggacatggtgtcacatactgtagtcccagcactttgggaggcccgaggcaggaggattgagagttccgggacagcctgagccaccgggctggctagttttatgacaacttgacacaagctatagtcatctgggaggagggaacctcaattggaaaaaggtctccataaggttgggctgtgggcaagcctattagagcattttcttaattagtgattgatgggggagggcagtgattagtgattgtgggcagggccatccccaggctggtggtcctgggttctataagaaagcaggttgagcaaggcaggggaagcaagccagtaagcagcacctctccatggcctctgcatcagctcctgcctccaggttcctgtcctgcctgagttcctgtcctgacttccttcagtgagggactatgatctggaggcataaaccaaaccagccctttcgccatagcaatagtaaccttaactaagacagtgtccaaaaggaaggactagggacgtaattcaatggcagagcatttgcctagtgtgtgtgagtccctgggtttgaccctagcggcaacctggggtacctgaagttgaggttccagcagtctctgaccttccccagtggcctgtgctgtttgctggccctcactgctccatagctgtggtccacacttcctttccccctggactgggcctgcattttcagctttaccacagccctttgagcttagatggccctgagcctcccataggcactgtgctggtttgagtctgacacctgctctttgcagggactttggagggcctgtgcctctgcagcgtcgtctgcagccagggatgagccatgcttcatcctgcttattcccgtagccttggtgtgcatgtgcggagatcttacaacccacacctcaggagcctgggcagagattccaggagcttccgaattggttgagcctcgtctttagggtgggtgtttgacatctgggtcctttgagaattggtgacgttggtacctgctctccgaatcccctgagcattgtttggtgaggtcctctgcccttggcactggcttccaagctgagccttccagaacatggatttgactcagttctcttcaggtgagctcaggtgaagtgagtaagtgcccaaatgtggcccagctatgtgatggggtgaggagtgggggcagagagacttaaatcttatccttagccactctccatgtagcggaaagttgttacaacggccctgtgatcctgcctacctactattatctgtcccctgtggtaagagatgcggtgtccacagctgttccgtgaggctttcctccctgtttctctgtctggattgtagggaccttcagaactggaagatgacttccgggcatgcataggcagatgggaaattctggatgcagttccaacagtaactgtgggacgtggtgccagggaggatgcccaggctgagtaaaggcaccgtggtctgagctcttaggggaggcagtgtctgccagagggggcagaacaagaggtgctagaaaagtcagttggctggggacactgtggcaggtgtggaccggattctggaggcagaggaggactgtgctggggggatggactggatgggtcagtggttagggagcacactggcttgggttagaggagggcaaacccaaggtgttagagaccagtcaaagctcacatctggctgacaatgggctcacctccagaattctccctgttgtgtttagggcagtggttctcaaccttcctgatgctgcgaccctttaatacagttcctcatgctgtggtgaccccccacccccgcaaccaccaaattatttcatcgctacttcataactgtaatttcgctcctgttatgaatcataatgtaaatatctgatatgcagggtatctgataatgcaaccccaaagggggtcttgaccctcaggttgagagcctacaggatagagggtggattgaagaagcccatgaggttttgcatgtgaggagacagctaggctgccttttatccttcaaggaccgtgttctctgtgagcgaggccgccttggctctcccacccctgattcagcctgcccagggagcctatatggaaagcttgacattttattgtgaacccggaaaccttcttcctattgaagttattttttctgtagttctaaaattttcctgatcaccctgggggacagaggggaagaaaaagactgtgtgagggctgaaggaattgtctgtttaaccctagctccgagcttcagcttcacacacacacacacacacacacacacacacacacacacacagagagagagagagagagacacacacatgatatcaggcattgtgcactcctcagacctagttcctgagacagatgcattctgcctggcatgggggaggggagtgtctctgtgtcagggaaacctgtgtgaatacttggtctgcccttcaaagtagaggaggctgagggtggctcaaggctgcctcccctgcccccactcaacccctaatctcctggcagcatccttcctcttgcctctataagactgtgttgtggtaattgggttcttggtgacccacgactgctggactaatgtgagccttaatgggagacctcttttccatcagtgaaatggccagaggtgatctgtaggtgacagccactgtctgtgctctgggtagctatccctggctgaagtctctttgctctctctacttgccatgcatcctctgtacacgaagcctgggcctggctttgtgctggatgcatgaccacggggatgatctgaggcctggtcctgggtatgagtatgtccccaggctaagagtttgccgctgtcacatgaatggtgaatcatgggaacctagaagagtggccctagttccttccagggtggcgggtacactgagagggtattctaggcacttttaaagaggtaagataagagtaggcctcttccagggtccgccagtatcggggtgtggtctacaggacctggctccaactggctttgaggaaggtacaggggtggggaaggaggggatactgctagatttatggaaggccagtctctcatcaggaatctctgggaacccccaagggctttactctggagctctccaccctgggcaatgactgggacagcttggggtgctgagaagatggctgagtctgatgggatcccctctgtttaacatgatagttgaccgaaaggcccagagtgtcccggtgtcaggtatggctctcacagacagttacatcacactggtacctgtggagtgagccagtgcaaacttggctattggagctggagtatgatggcagagagtggccatccgcaggtgagctggaggcaggctccaccctccaacagccttcctggatcccagaggctctcgggatcttacttagacagtctcaactgggcgcatctgcagcagtggctcctgatgtggggccactggcctccttttcaatgtacctcattaagatgcacacacttttatttttagtgtctgaacctatttttttcttgtgaagtagaatggaaccttatgccccagcagaacaagctcatacatcaatggttcaagtccccgttgcatcctcttcctagaccttgccaacgcagtgtggaaattaccccctcttagaaattactgagttaacacactggagtatcctgtggtcacgatctgtgtgagaagaccggacccatctctcatgagcagcagcagtccaactgggcctcttgatggtgaagaggccatttctctgatgtttaccacacaatgattaaacatcattccttctttgccgtgtctgggtcagacgctctccctgggctcctagccttgccccaattcacgctgggtgtggccttgtccatcctgcctgttgtcctcacgtttggcgctgaacctggtgggtagagagcagcctcgtgcatcaaggtcttctcgtgtgcaactgtcaggaacaattctccttctggagtcccgtccctcacccttggcgtgtctgtggatgccaggaaggtcaccagcagcagtcagccccagctgcccagcctgatggtattttcactcttacttagatcttatttaggtcagaccttggcttgtctgagctggaggagcctcacgagcagcccagtttgattgctcttcagagccgctttgaagaagcccttcctggatggtgaattagaacgtctccggagttagaaaattcacggcaaactcttgtttcctgggcttgtttatcagaggtgtcctggggtctctgctgcccgctcacaaagcggggggggggggggggggggcactgcgcaccccttgctgagagcagagatggacaatgggctttttgtcccctccattcttctgaggctcccgtagagtgctctgtctttgagcagatctgtgcagggcattgctgggcgccagcctgtggtgggctggttaagtggcccaaattgaggcagctttgctaccggtttcaaatttttcttttgatgtgcggcaggtgtggcatggccctttttgtgagatttttttttttttttttgctttgatcctggcttagagtgggtttgctgagattttccctgccatggtcctttgttctctgtggacaccaagatgtgtttatatgggtatacaaggtcccagtgagatgaagttgctacgtggcccatcagtgaatggagtcaccatggctctggttcccaggtcctgcattcctgagccccctttaggcttttgtgtcctagtagacacttccttccacagtgagggtcttgtaccccacttctcccttggagtggaaagctgagagcggctgaggtgctggcctgccgacgtttctcctccacctagagggagggaggcttgttcctcaaccagcctgctttcaaagtcctgttttcctaataatgtcaaaaggaaacaaaaaaggctgcaccccccccccccaaaaaaaaacccttttttctttttccttaagagcctgggtataaataataaataaataaatggagctacacaaagagaaggataaaaaaaataaaatcaaagctgtaagctctgcacttggcctgaggtataaatagcaggctcttaggaggcgcctgggtgagcgtctgaagtcatctcttccgtcagtgactgcaagtcaggagaggcggctttttttcttcttcttttcttctccaggttgctttcttttaagttttaattaagaaaaaattgagacagggtcttcagtagcccaggttagcccccaactcattctgggtctgagaatgaccttgggctgacccttctgcctccatcttctccacggcaggattgaaggtgtgcatcccccacgtctaactttttgctttatcagccttgccaagtctttggatacccgtgggtagacaagggatttgtctcagtcacactctggactctcgtttcttctctgtcctcccctctcccttccctggcctccaaactccatccctctctggcccccatctccctcctaggttcctccttttggtcctcagctggtattttggtacaaccagctctctccaggccctggagactcggtgcagtaagagggccccttggccagaaggagttcgttggtacccactcctcagctctggctgctgggttgctcgtggacaggacgctcacctcagaacagggaggatgcttggtgaaagccaggccagcaggctcctgtgagtgccgtcattagcctacctcaggactgggcctgggcacggccagcagcatctcgcatccttgaagtgtgaatccttctggcatctggaccataacttgaaacatctcagctttcccgggattcgctgaaatccgccagcttgttgggctggttgctgatggggtagaaggcactggctcctggcgggtcctctgaagctgcccattggcttaacactggaaactgttcaatgcagcacgggagacctggaagatacaggctggggcaatggacccttctacccttggtgtgggtgggtcnnnnnnnnnnnnnnnnnnnnnnnnnnnnnnnnnnnnnnnnnnnnnnnnnnnnnnnnnnnnnnnnnnnnnnnnnnntccctaaggctgctcctgcttctggccttctttcattcattggattcattgggttcattggatgcctcccctagggagtttcccatggttctcctgcatgataggcgggcacctcttccttgttcttccacggcagtggctcttctgagcctctttgggtacccaccatcagtcagagctgaccctccaggttataccatgtctgtaacctaagggattattaaaggcatgcaccaccactgcccagccctctaaagactctgtgagcagggacttctcccgcctttgtgttctgatggggaaactgaggcttggtgaggtgaggaggcctggcatgtggcagagtgaggtttgagccgggacttggtgggtttggccaagttcttagtacttttcctggactctgagtctgtgtttccccaaggccttgaacaggaaggaccaccccaaggagagcgtgtgtatcacagcctggcaggctctggagtgtttattaaggtcacgcacgcagtccctggccctgtttagtgttgtttttgatgttcaagggcagtgtggaaatttttgttttctgtgacctagtttcggtgctttgataatggcattccattgcaccccaccaactctgagatttcccaatcagggtcacagtcccacccatgcaccccccactccccagccccaggcttcctgcccctgcctaggtagggcgctgatgcgtgtcatagctcgagggtctttgttgctgttgctttaaatttcatttgtgttcctgtgtttgggcatgcacaggtgcatatgcgctttgagggccgtccatcggcctttgagggcttttttgtgatgaggtctctcactgggactggggctggtggattaaggtaggctggcctgtgagctccagggatccacctgtctctgcctccctagtactaggattacgggggccatcatgcctggctggttttgtgtgtgtgtgtgttttcccccggagatagagtttctctgtgtagccctggctgtctggaactcactttatagacaaggctggacttgatcacagagatctgcttgcctctgcctcctcagtgctggggtcaaaggctaccactgccagctacgcctgggttttaaggttgggcttagtccctcctcatggcttctcagcaaacactttgcccaccaagatagctccctagctccctagccttatctgggagacccttatcccagggtctttctgagaggaatggtgggctccttcatgtgattctcctgtgtggctcactgacgtctctctggacggccttattctcaacggaaactgtcttttattcttctttgactgttgccctaagcactgaacatggcctcagcataggggacccgctgtaactctgagaagttagctcgatggactggggaagagctgggcacctagctggtgtggagctgaacttccctggagagttttcttccttccggacactctccgtctcacctacgacatgcaaggatttgctggaatttggtccgttttctaaaggagcctggtgccccaggatggatctttgggaagtgggacaaagggagtccacaagcccttggtggtcaccggcttgtgaagctgtttcatgtctgtgtgcttccttctagagacgtggcgaggattaggggattaagaaatggctcagcggttaagagcctttttcaagactgagtcacgtttctggatccccacgggtgtggctgtcacagaacatttgtgttgtttatcgcttttggctgttgtgaatatcatggccttgaacatgggtttacaagagggtgtccttttccaaaaaaaccctgaacatctacatctttgatgatgttaggagtcagcatctgtcctttggaggcagaggacgggttgtccccagagttgcatccacagtcgtgccaagagcctgttgtgtgtcctgttccaagctgggtactggtgttcttcagcctgtctggagacctaagagaacaaacaggaaacaccacctgaggcagtaggtcagagggcttaaccggactggcttggggtctcccaggcagcagggcaggggctcctgtcccgaagcctttgtggtattcatgacactgtccctatcacctgctgttgtgggtgctgggtgaccaacacataaggtgctaaagcgttgaggtgactggtattccgggaagaatttagaggggttgtctctgtataagttccactgggaaatcacaaagtcgtgggacacttggccctggagagatctcctcaggcaagatgtgtggtcagcaagtgacagctctctctctctctctctctctctctctctctctctctctctctctcggctgtaagaagtggcaggtggtgacctgtctctgtcacctctggatctggggggctagagtctggagactgaagtccagtggtatagaagcccttatttctggtttcagggcttcagattaggtgtggggtgtgtgtgtgtgtgtnnnnnnnnnnnnnnnnnnnntctatatatttatgtaagcagaaaaaagccaagccctgcatctgtacaggctcttgtgtcacattgggttgcccccccccccccgcccccatggctgtgaccaagggccatcagagtttctgcagagatgaagagctcctgtgtggtgccataggactggggtacacactgactgaaccccataactactccctaccccagcctataaacctactgctcatgtgcagttagcagtctctgggcccatagactgtcagcatggaatctgggctcgcttccttagtctgttctttttcctactggccctgatcccagtcctgttaccttctatagagatttaagatcttaggaggaagcgcgcctgtccaggggccaggagagacagagatggtaataaagatttcgtgacttatcaccaggagcccatgtgtgtatatacctgcagagtttgtagagaatctggggagagggagggctgtggaccatgcctttgctgggttcaggtcatggtccaagcagacttccgtgcaggcccaagtctcagcaagtgagggctggttgttatgaatctgtggtgtccaggtggaaagtgaggcgagaggcgacatccaggctgtctgtggatggatgacctctgggaggttaactattcccagggcagagagctgaaagggttgtgcccagctgggaggaggcatgtgtccagctgagctggcttcaggtctgagactctagcctgtttaaaaatagattcgaggaaagtgcaggatgtaagagttcaccgaatcttcatcagacttctgtcccaaaggacatggcacactttaaattctgatcacccatgtatgcaagtgggcctgtttacacctcgagtctagatgtccccccaccctcgggacagctctgcccgagagagatggaacttccatccatcttctggggtctaagccttgtctaccaaagaagcctcaggcaggtctggaaaccattagaaacaaccagaagcttctggaagcttccatgtctcagtcacatgttctaaagaacagtgtggacggactggtcacgattgggaggcatcaagagctgcttgatgtcaagaaaaatggcaggtgttctgggctgggaatactttccccagcctctctgggctgcccaacatgaaggaatgccaaacaagtgacatgttcgacacatgggacttttctcttgggttccctgcatactgacctggtctctctttgctcaacagtgactgacttacaggaagaaggcaagagcgccatcaactctccaatggccccggctttggtggacattcaccctgaagacacccagctaggtactgtggccacttggcatccttcggtgtctgtccctggtgtggcaccccacatgggtgggtggtgtttgagaactggagtcttattccaagatctctagggagaagccagcttctgccccagtcttccagtgcagatttgattggcatccaggtatagatgattagcattgggaacgtggctggttatcgtcacagatccagggagtggctaagcagggctgagcaaacagtggaggagacggaggaagagttggcttggttactgagctgaggactggatagatgactctaggagctccaggcacaaggttctggcttgagatagctgatagctggcctagaagaagaggaaagatgagtattggctcagggtgtggaccccagtagtcccctagaggaggaggctaagggacagcctcccctggaggacagtttccctgggacgagtgggcctgtctcagtcagggtttctattcctgaacaaaacatcatgaccaagaagcaagttggggaggaaagagtttattcagcttacactttccacattgctgttcatcaccaaaggaagtcaggacaagaacttacacagggcaggaacctggaggcaggagctgatgcagaggccatggagaggtgctgcttactggcttgctttccctagcttgctcagcttgttttctttatagttatttcttttttcttttttgttttttcgagacagggtttctctgtgtagccctggctgtcctggaactcactctgtagacgaggctggcctcgaactcagagatccgcctgactctgcctcccgagtgctgggattaaaggcttgcaccaccactgcctggctcagcttgctttcttatagaacccaggaccaccacccacagtgggctgggccctcccccattgatcactaattgagaaaatgccttacagctggatctcatggaggcatttcctcaagggaggatcctttctctgtgataacttcagcttgtgtcaagttgaatacagggccctaaggccccaaagtataaagaaattaataaactaggcacaccctgtatatctccttggctgccacaaagatccatccatgctgggcctgcggctggccatgtgggaactgtggttggggaagacccctggctccttgcaggttgatgatagggtgtctgtccgccagggtactcactctttcctggctctgtgttttggcagcaagccaatgtggaagaagtcaatgtggaaggcatgtttgggacactgcttatttccaaatcctggttcagagggagatccctgtctaccccgatttgccatgacaaggccattaaggtctcggggtggaatcaggagtggcccaacctgtggcccagagatggcttggtacccaacaccactggtccgtgatgtcttttcccacagaagggcatgcccctctcacagcttctgcaggtgcttcctggctactctttgcctaggaagccagacttcccagttccccactgtggtcagcgggcccacggcatcctggcttctgtgggccactggtcttttctgttctggctcctgtgccttcattccctcctcaccttcctgtcccgctctccctgtgaacttcactggactcttgtctgttagaaccagacatggaggggaaacacacaggggagatgggtaaaatgtcacctctctgtgtgttttggctatttctagtacttctgtgcagatactgttttgtatatgacactgcctgcccatctgtttccttgtgtgtcccgaggccccacacggcctcctgtggattggtgaatggtgtgattcagttgctcaaagctctcttcagccctctggttctggcagggcacttttgagaacactgtgggtgcaaccctgtgtcttttttctacccatgccatcttggcttagacttgctgctagagcaattggagtctagcttcatcgcctcctgctgccctgtgtgatttatctctgatcttggtgtctggctgacaaagctgtgtgagctgttctcacagagaacatgatggtctctgcttttccaccagcttcctgactcatgtgagagagcagggagtcctccactcctagcacccctgtcggcctcccccaacccccattcacgctgatcctttctgtctttggcagaggagaatgaggagcgtaccatgatcgatcccacctctagagaagaccccaagttcaaggagttggtcaaggtgagttgtagtctgatgtggtcggaacatccctgttggttccaggtcttcttctggggggaagcaagattcctgtggacacaaggaggacctgagcctccaggctcctgaaagggccattgaggctacattagaaaggggtggtgagggctggtgagatggctcagcgggtaagagcacccgattgctcttccgaaggtccggagttcaaaccccagcaaccacatggtggctcaaaaccacccgtaatgagatctggctccctcttctggactgttggaagacagctacagtgtacttacatgtaataaataaataaatcttaaaaaaaaaagataaaaaaaaaaaaagaaaagaaaagaaaggggtggtgaggggtagagtgggctgaagaatggatggaacatgagtcttctaggtgcttccatgtgctagggtatgctgcccaaggcctttatgggcttcacatggttttcacaagagctgtgttgggtctgttttgagccaatataccttacctatatgcatggttgtctgtagcttcatggggtgtggatttaagtagttttggggaggaggttgttgtctccctctactatagcctcatctgaagagcctttggtgtcctagttagctgtaactgtcaacctgacccagccctggagctacctgaaaagagagtctcaattgagggatttccaagatcagacttgacctgtaacatgtcggtgggagatggtcttggttgttaattgatataggtagacacagcccactgtgggcggcaccattcccttggcaggcagtcctagattatattaggatgctagctatgctcaagccagtgagtgatccagcaagtagtgttcttcccaggtttttgcttcaagctccctcatgagtttctgccctgagttccctcggatggactgagctggtagtgtaagtcaataaactctttcctcccttaaaatgcctttggtcagaaagttttcacacagtgacagaatgaaactaaaacacttgaagaccatgtgtggtagtgtgactatcagccaggtaggaaagcaaaaggctttgttctcaaaggtcacagtcacaggcaggtgggtttgtgactcagtggctgccaaagatacctgtctcctctttagcacatggctgatcctgcccaggggcagcctgaggctttgattgctcagatctaagccacagtcggactcctgaaggccacccatcagagacagaggcaggcagatggtatcctgccttggagacccagaattggcttgggtgacctaggtgctttgaaatgctgcaggtgacagacagtgtcctgaaatagatggctctctattgtctgtcctaccttcactgcagcagagcctgcagccacccccttgtgaccgagctttcataagggctgattcaggggaatcagagttgcttgccagctctgcccttgtagaaacatatggaaatttctgttgcagtcatctaaagacagagattaatttttctttttcttcttcttcttttcctctttctttctttctttctttctttctttctttctttctttctttctttctttctttcccttcccttcccttccttcccttcccttccttaccttccttcccttctttctttctttctttctttctttctttctttctttctttctttcttttttcacttttccttttcacttttcttttgtattttttaccctcataaaattttggaaaagccatataaattgaattcctttcaaaattatttttgaattctgctaagaacacaacaatcagttaggaggctagacagtaaaactcaattgacaattgagaagtcaagaacagagatcctcccaataagtaatgtagttattttgttctgataattttatgattagacattctcatgtctcaatcttcctcatatgaagacataagtgatattatgcagaatatttcaaacaattaataatattgttctaaaacaacagaggaaaaaacatttatttaattttacttagaacatttctgacaaattagtaatgaaaactatggcagattacattatgagatttgtagcaactccccttgataccatggatattgcataatatgtctattatgaactttaataattttaggtctcattctaaagtaatggtaagaattggcaaagatagagatttttgtcttttcaagcctccagaacaaagaatggtattttgtaagtctgagttaaaatgtgtttcaaaatccctttattgatcatgcctgctatctgcctctcttaaaggaatacattagacattggatcatacaagtaatttaatttgactgtatacaacctaatagaactgtataacatttcatcatagcacgtgtcaattcaaaaacatctatacaaaagtagaaatacaataaccctgccttatctcaggttgtgtgtgtatgtgcatgtgtctatgtgtctgattctgtatctatggtctctgtgtggtttattttttagttacttgtagtcaaccagtattgaaaatattggatggaaaacatgtatacacgtgcatatgtaagccacatttatgtaacttctactacagtatgttattattattatattnnnnnnnnnnnnnnnnnnnntgagtttatttagtttgcagttcttggttacagtccaacactgtgggcatgccaaggtggcagggtcttgaagcagctagtctcatccacagtgagagcagagagaatgaatgaatcagcttgcctgatgtgtgcagctgctttctccactcttatcctatttggaaccctataggtctaggggctagtgccacccatagtgggctcagtcttctcacatcaactaatgagatcctcacagacatgcccacaggccaacccaatgtaagcattcctttcaactaattctcgattgtatcaagttgataattaagattaaccagtgcactgggcgatggtggtgcatgcctttaatcccagcccatgggaggcagaggcaggcagatttctgagtttgaggccagcctgtgttttagagcaagttctaggacagccagagctacatggagaaatcttgtctcaaacaaaaacaaaaacaaccaagagagagagagaaaaaaaagacagaacaaaacaaagcaaaaacaaacaaacaaacaaaaaaaagtcaaacaagcaagaaaagacagaataacggttgtgcctgtgcagaggggcctaggctctctgcaatcggagacgtcaaggaagggggaagcagggccccagctgctggattggatgaaggacgaaagctgtgtgccaaagtctgtgggagcttccagaagctggaggaggttgggaagcaggtagggtccttttagagtctccagaggggccagttctcctctcctgacatttgacctcagctgtgtaacaggacagggcttcttgcctccagcatatgagagagtccatggggtggttgcaagccaccagagttgtggaagtccctggagcagccataggaagagaagcctccccattgtagctgaccatccacacgggccaggcagagtgtctccacacccgcagcagtgcctgagttcctacaaccatcccgttggctgcagctatacacacagagaccaaacttctcgaaccagcctgagatctcatctcagagcaggctggtcttgatctagcactttcttttttttttttttaaaagacttctttattattatatctaagtacattttagctatcttcagacacccagaagagggcatcagatctcattatggatggttgtgagccaccatgtggttgctgggatttgaactcaggaccttcggaagaacagtcagtgctcttaacccctgagccatctctccagcccgatctagcactttcaaatatgaatgtaaataccatggacagggggagcaatctggggacttgggggactcatcagctgattttgtggctatgctggaggttgtacaaagtgtcaaacttctcagccagggagggttctgagacacgtgtgggtatagggttatacccctaggtataaggttagaagggacagtttcctaaagacccccaggcaacttcagggggcccatgctatcttagggttgacaattcaccaaaaggataccaggccccacaggaagctgttgtccttaaggtcacagttatatgggggctggggggaagacatgcttgggaccaggaaatggattgtgggagaagaggagaaagggtgggctctgggtaattgctcctctatgcaaatggttcgagaactttagtgcccagggtcatcatatgcgtgccagtgtttcaggacattgtctgtgctgcagaccagtgacccaacttctagaggttctctgtgaggatcccccgtggggatacactgtgagggggctgttcaggagcaggttttgtgttttgtcccttgccatttcctacagctggtggtggcacccaggactcggctccatggccgaaccatatgcctgtccctacccccaatgtattttaaaacttaaacctgtctggtatgttggcctgagcaggtcagaggatgatctagctggcaatcttgccttgctggacactcagatctcattgtggcgtctgtccttcacagactctcccagtctttggggccagggctgaggttctgaggaagcctggctgaccttgtttctccccttcccggtgtctgccctctccaacttccctctggtgtcttagtggccttttctgtcgcccactactttacgatacatctttgcagtgctgcgggctgccctctgccttttgtctgaagtccctggccctggctgggcaggcactggaatgaggttgactattaaaaactattttgagcatctgtcgtgcttattgggctattaaggggcgaaggtccaatcccaactcaggggaaagtggagtgcctcaaaccacggccattcattatctgatgatgggcacagagagggaccaggtctggtggggagctgcacattggccagttgggcatcactttagaagtggacctgtattctgcggtcccaggagcctccaagaccctggtgtcctttgctggggtttcttcctgtggccatttactctagtgtctgctggaatcgactagattccctgttggtggacagtgtattggagctcacagctgagatacttcacgttcactggtctgttaaaagtgtcctgcacttttctgccagggagaggcctctgtgctcagtgtctgatgcggagtgccgtttggaccttgtctccagggtctggcacagagctctgaaactctcaaagttatccgagcgtgagatctcctctacagcacgcacactcttggccacacctgggtcacagttaatgagggcatttggatagcccccagttagcttccaatgcaggaggatcctaaggggacccacccatgcatggtcaagggctccacactgttgatctctgggagggtggttctttttttctgatgaccagtgactgagcttgtaacctgggtactcgactttgggcagtgagtgtcacagcgctctgactacagacccctgaggtcagagaattgctgttggggtgatgcatcctggagctggaaaggaaaactcagtacaaccacaccgcccttaaatgaagcaaactggccagaagcatctagatgcctcatgctggggtgagtctccttccaaaaccagatttcacatctcactcttcagttactgggcaaggcttacccttgtcctgacactgttttctcccctttgggtccgggtcctgtggaggggctctgccctgctcaggtctcacagactcccacccccttcactaaggcgcatctccatccccttggggacaacacagccaggtctctgtttggaagtgattaaaccgtaactgtcacggccctggggaagacagactgcaggcccgattataattcagagggaactaaggggaaagtaattttttattctggttagagcaagctcacagagctggccatgatggagtgccgtgtaaggatgtaattaatatatgtcctccttattcgcccgcaggactcggagctcgccgatgagcgcgtccctaaaaataatggctgatgctatctttaaaagctcttttgtaaaatgaaagattaaggaggatggccgggagcagaatgatgaggtgatgggtggtgtccccaagtcagctccacctcttcagggttggcggtgacctgagagcctggcccgttgtgtagacttttttttttttcctttgagcttttggccttctgttcttgcttagagcaggtcagagatctagctttagggattttttgttgttgttgttcgttttgtttttcttctctaagttttggattctcatagaggaagcattctctcgagatttcctagcaggactgaagaaggaagcatccggaagcaaagtcctatagaaaggtctaagccctttctagatgtgaatttccccaggccgttctttggtttgtttgagaccttgagtctgctcttgttgtagccactggggacaagtgtcgagcccagcagctcactcatcaactcacacagtgtacctgggagaaaggcatgacgtgggccaagtgaatatgcaatgtaatcaggtggcaaggaggtttctccaagcctcacgcccttctgccattccctgcagagaagtcagggaggtagcatttaagcagacctggtcaggacctaggcaaataccatagccaactgcccaacaggaggtgcaaaggtcctgtggcatacatgcttggcatgttctagtgattactgcgatgggtagagtgacaagagcctcgagcatgccggggagtgaccagagacacggtggtagatgtccaacgtgtgtaccttccacatctgcacccttctcagcctaacacccatgacgggtaactgcccttgtgggcagggactgtactacgtcactcttcatccttactgcccagcgtggcacctggtgtggacactcattcatgttttatcctcaggggagaccctggcaatgaaggctcagcagcgttcgcagctggaggtggggcaacaaatcaagcacatgctaccccgcccccgccatcttggcaacaggctgagaagattcatccttccccgacgtctgagggtttctgttgctgtgacggacaccatgaccaacagcgtctttggagaggaaaggcttacagcttgtagtcattatctaggaaagtcagggcagggactcaaagcaggaacctggaggcaggagctgatgcagaggctgtggaggggtgctgcaccctgacttgttcagctcgatttccagggctacctgcccaggcgtggcattattcataatgggcggggcccttccatgtcaatcaccaatcaagtaaacataccacaggctggtttacaggccaaatctagtggaaccattttctctcttgcggttcctcttccaggcgactctggctctgtaagttgatgtaagtccagccaccacagtaaccacggcgacctcatcacaccatcattttttttcattccttgtgaagttgagatcttaccgtttttgtgacttggaaatccttgctgtggtttgcagcccccagtgtgagaacaaaccttagacccttgagcatgaggacaagcaggcatccaggatgtgaccctttgcaacctgttttctccagccaggcctggcatcctggctttcatcgcccactggccagagagcacaagccagactggagcccagtcagccagagagctggagagggctctgactctgtctccctgccccttgtgcttggacactggggcttcaagggtggccctttaccccagacacgggtgagtcataggctcggcactccctgtgagtgtcggtctgggccagtcttctgtggtcacttggaagctagtcaggacttgatgggtcaggactttgtgacgagatttttcaggtcactgcttcggggagtcatgagacactgcttttggattttgtgcactttgattcttctgagagtggtcacagatctcccccgctcaggggctaaggggtccgattaggtagcttagttcattttgctggcaaggaaaagccacaatctgagtcacagcggcaccctgggcaggcatctgctgtatattctgggtgttgacagtgaatgggtagcatccttgggaagcccctgtccaagagacactcgacagtacaggtgtcttgcttccacagcatgactcccaatgcacggagtggaaaaacctcttaagaaaagccttctggtggtgggtctggaaagatggaaccagacactttgaccagtgttcacagcagtgtgatggacagaaagtgacaggaccccccaatggtccggcagtggggaagacaaataagatatacctacgtttatgtcatgcggtggtaaagcatcctggcagaagttgggggaaggtagggtttacagtggagatgggtttcaaacactgtgctaatggagcagccaggcgcgagggaggagttgcatactgtgtaatctcattgactacaagagagaggggggagcagagctgtggggggacaggcctgaactctctacagggacaggagacaaagtggattggggcgaccatcgcacagctcttgggatctgaggggtgcaacaggttgatttgacattggccaaacagtctacagggtgcgttgagcagaagccatgctgggacttcttttatgagtctgggaccctggctggactcagggctgctaaggggcaggctaggagtggacaagagggggggtaatggctcatggtccccttttctctctttccccagcacttactcatttagcgcctgtaaatggaatatctttaatataaatattagcggttaatgaatctggcagctgtatttctttacctcatactattccccaataatcacgcagaaaatccaatatttatttaaaactgcacctcaatagctgagcagttaaatggtgtgatcgaaacttctatgctaatctggctatttcctagatccatcccatgatacttgcatatcattattgatctggctctttgggcttcaggtgtgtttccatgatctttctccagaccttttccttatggcttcaaatcctccatcctagctgatctgactcttcctctctccttcctctaattgatggacatcccaccctattcttaactctgcccacccactggggtgatctgcatttattgacaaggcagaggataaatgataaggattgtttacacaaacttgagacaggagacgtttggtgtaagcattacaatgccacgaaatgggatctgagagcagagaaatcagcatttgaataacccaagggtcaactcaacccagtgtacaagaatatggcgcctccaagcgcccactgctcgaaggtgcacctgcgagttcttccgctaggagataggtgtcatcctctctacccatcctctctgcaggttcccagcctacccgggtcctgccaggctctgctgggggctgttaggaagtcctagcttcatgtatggatctagttctccactcttaccttggccacggaccaagagacacctgttgttttccgtggtcaccaggcaggtgtctggtagcccctgtgcgtttgggccgctgcccacccgagcctgctctgaccctggctttatttagcaactctgtgacaatgcctctcacctgccccaggtgcttctggactggatcaacgatgtgctggcggaggagcgcatcattgtgaagcagctggaggaggacctgtacgatggccaggtgctccagaaacttctgggtgagtgccaggatcccgccatgtagcaccatccttcctgccctggggctcttgggaacagacccagagcttggcgtacacctcctgctggccccatttggggtttcattgctgtccgtctccatggtttctctgctggccagtgcatacccagccttggggctgcagcaggtcatctcagatgctcatgccgtcatggaccaaagaaacagcgttcagtgaggattcaggccccttatctcatctctcaggccacccatgtttcatctagttataaacactgttaggatggggtgggagagagggttggtctccaacaaacccatctgagaggacatgtccttgtcctgactcagaacatgtcattgtcctcattcgtgcttccaggctttattgtccccccaagttctggctaaggatgattgagtgtgttctccagagagatgggtggaaggaaagatggtcaggtggacagcctctccatcaaatgatcctgagctttcctgaacactggcttctaggtcagtgagtcacgaagcagacatcgatctaccccgcccttctggagctgcagtctgtctgagcagacagtgacagatgctgtgggtctcaagggtagttaaaggccatacaggtgccatatggctaaagtgggtggccttacaaagcactggggtctgagcctcagggggaaatgagggaagagtggctaggagaatggagaacagagtcggtggtgaggggtggcaatgttcacgatgccttaccctggggcagtgattcatgcctgtcatcctacacctgggatgctgaggcaggaggattgctagtttaaggctagcctagcctacatatcaaaagcccccctctctctctcaaaaacaaaaacacccacaatggatgacagtctcaggaccagctctgatggtggctggccctgttgtgagcatgtcttgtaggctatgctgtcacctctggccacctcgttgccagagggaggtggtgaggtattggctctctggcttccgaaggcttttctctcagctgtttgtcaggtgccttgggcacaagtcctgttcgttcaggtcctgtttttccttaccttagcaacccaagggcgggaccagggactcagcatctccaaatgcctttttatccagggcattttgccctgttcttttctgacttcttccaacaccccacccccacccccttttctcttctgcctcttggcttgggcatcttgaccactcttctaattttctttttgtaagcgtttatttgttttgattttatgtcatgaatgttttgcctgcacgagtgtctaccacttgcatgcagtgtctgtggaggccacaagagggcaacagatcccctagaactggagtttatggccggttgtgagctgtcttgtggatgcagggaattaaacccagatctcctgaaaggcagccagtgctcttaaccactgagtcaccactccagccctgaggtgctttccttagtgttaccaaatacgcctttgtgccaggactggtgcagagtccatcgctttacattgcctaaagtgctaggttatcggtggtgatggggaaggtcatgtccttagacaaggtgatggctggcaaaagaggtgctgaacatctgggtggccatggtaacccatccgagaagcttacggtccagcagagttccttgtacaacctcagaggcagagggtctgtggccaggcaagcaggatccagaggctgaggcagttttgtgagcagggaaggagattggatctagaatttggctgggctggtagacaaagggtttccttccagtctgtcacaagagccactaggggtttgaacaaagccatactatgacctgtgtttacaaaggtcacttaggcttttgggtgcagagtgggtaggatggagggtttggggttggagctgggtgagtggtgttagccgagccccaggcttcagaaatggccagagtggaatgcagaggtagactcaggaatggagtgtggaggccagagatatggacggggcagctagtgaatggtgggtgaggatttgggttgagtctaactgtgtggagcctgttgctggggcaggagtgctcccaccggggagcagccacctagagctggcatttagcaccatgggactaaccgttccctggagtggggtttcaaactcctcagtgggctgaataccaaatagtcaagagtgaatgtggatgtttggttaagaatcccagaccttaaataaggttctgtggcttaaaaatgaagctgatgagatgctggaagggtgcttgccctaagctgatggcctttgatgcctgagacctacgtggagcaagcggggaactgacttctgaaagctgtcctttggcttttacatgcatgctgtggcacacatgcctacaaaacacaggctctcccacacctaattaattagttaatttggggtgggaggttgagacagggtttctctatgtagctctggctgtcctggtacttgctctctacaccagactagcctcgaactcaaagatccgcctgcctctgcctcccaagtggtgggattaaaagcgtgtgccaccactgcccagttaataatttgatttaaagaatacggctggaccgtgaggatggttttgtagacacctaggttttatcacgaaaacgtcagagctcggctttgctctacaggcactggtgtgctggatactgtggtacactcaggcttggctctgtctgctgccagctgcttaccatatgttcagacggagcatctgagatgactgacccccagctgaggctaaggctgcacactgagctctgaatggtgtgccacaaggtcacagtggatggggcggctaccctgggtggcccacctgcctcctttccagggcttggagtgtggcaccaacttaacttttttctgactcttggacatggtgattgggatggtgatggcaaggcatgcgtgtgcgtgtgtgtgtgtgtgtgtgagtgaaggtcagaggtcagtgtcagatatcttcctcagttgctctccaccttcttttcttgaggcacagtctctcactgaccctgaagttcaccagtgaggcaagattaactgaccagtgannnnnnnnnnnnnnnnnnnnnnnnnnnnnnnnnnnnnnnnnnnnnnnnnnnnnnnnnnnnnnnnnnnnnnnnnnnnnnnnnnnnnnnnnnnnnnnnnnnntgggtgctggaatctgaacttggtcctcatgactgaacagcaagcactctcaacctctgacccccatccccatccccaccccacccccgccaactcacatggcaatgccttttcattggagcaatcctccagttggtgctgcatctcagcatcacagggcacgctctgtctttgtgtctctactactggccatggttgagcatcaacagcattgatgtgtccctggtccatctttgagagcaggtgttggtcacctcttgggcacatcttttttggttccgtcttctgcttgcctggcagatacaatactggcctgaagctgaaggggctgtgaatcccaccctgttgcttctccgggccctgtaaagtgaggctcgaggcttgcccaggctctgctgtccttgtattgtgaagtggttgttattccctctcatttgaatatctccagtcggtacttgaaagaagcagcttgcaagcctcttatgtcaagtgggctggacagagaaaaggacaatgggaagagtattcagggctgaagaggacatcagtgcatctttgcacggttgtgtgggcagcactgtttctgacaggatgcagtgataactcacagggcccccggagaccagagattccagaagtgaccttgatgtaagtggtggcgtcttgggctttctgaaagcagagctagatcaaataaagtggtgctggccgagcagcagggccacaaggctgatttcagtggtggagccaggcctggtcaggatgagggggtagccagcaaagaagtccagtgagatcagcctgtgggaagggaccccgaggagtgtcacatgggaggaggaggaggaagaggaggaaatattccttagttatttgaattatatatttttttgcatgggtgtgtacatgtgagtgtgggcatgtgggtatcatggtgcacgtgtggaggacaacctcaggtgccatttctccttcctccttggctgtgtgacactcatcaagggtgagccgctaggataccaagaggagcccctattcttgagaaggaatgctggaagcaacaattcctgtggcaggccaggcattagggttttacctcaaggccgtaggctgggtgggatgtctctgtaggatgctgaggggctccggggccagctggtactcactgggacatctttagtcctttcgagttacgctatcgccctcggttgcatgctgtgctcgagcgtcaccttaacctttcactgtctcttctgggttggaagatgaggccgtggcacatctaccgccccaaccacatcattatgtgattgataggcagagaactctctctgccctgtcttgtggagttacggcatcatggacacctagggcaagacaatggggatgcaagaccggcttttagggctaggtcatatcctctaatcccacgttcgtatattgacaccagtgctggctactttttaatgtcagcttgacactgggtcgaatcatctgagcagaggtgcttctgtaagattggactgtaggcaaacctacagcgcagtggttctcaacctgtaccttgtgacccccagcagcaaacttctagctccaaaaaatatttacattgtgattcataacaatggcaaaaatcacagctgtgaggtagccgtgaaagtaattttatggttggagggtgggagtcacagaataaaaagggtagcaacatgagagaggttgagaccccctgctttaggacatcttcttaattagtaagtaaggtctccagggtcttgccctgtttgaattccggccctgagggaggactatgattgggatgagtaatgaataaaccttctcctctcaagctgcttttgggctttaccacagcaataatagcctcaactaaggcaacatccaaaccctcagaccttagaatgtggctgcatttagagacatgcctttaatcccagcactcgggaggcagaggcaggcggatctctgagttcgaggccagcctggtctacagagtgagttccaggacagccagggctacacagagaaaccctgtctcaaagaccccaaaaaaaaaaaaaaaaaaaaaaaagaaagaaagaaaatcttagcgctgcttccctgcactcacaggctcccttctccccgtctctaacatttccacacagtaagaagtttgattggagatttgctgagtttgtgactatgtcatttctaagagcaagcaggaagaactctggtgagaattgtcacattcacttcggaattcaattacctggacgagacccagccgccttcaatttcctttgggaatgggggaggcagcaggtgagagcaggcagccaagatgcagcagccagcgctcctgaggctcctgctctgagcaaggagccctgttccctcctagtctttaattctaagatgtgatgtttcctgacaggtctcctctgccaaccagcaaaggcccagacccagggtgactggaggcaatttcctagaatgtgattaccgcatccttagtcgaggatgcacgcctgccatcagccccattgtcgctgagactgtgaaccccatggaggtcacacaaagctctgttcaactcatgttaaccgggcccaggacttcagtgtctttgtccccgaattctggctcctgcagttagcagggtcagctcttctgctgtctgcaggatgtggcgggcggtggtggtgctcgcttttaatcccagcactcaggaggcagaggcaggcggatttctgagttccagcccagcctggtctacagagtgagttccaggacagccagggctatacagagaaaccctgtctcgaaaaacaaaacaaaacaaaacaaagcaaagcaaagcaaagcaaagcaaagcaaagcaaagcaaagcaaagcaaagcaaagcaaaacaaaacaaaacaaaacaaaacaaaatgaaaatctgcagtgtgggacctcactgggacaccccacctccccagcctcaggatctgccctctgcagccaacccagtaacttcctcttttgcatccctcactgcacctttgactttggttttaaaattattatcagtagtagtgttattgtatggtgtattaagggagtgtgtgtgtatacctgtagaggtcagatgacaaccttttgagacaaggtttcactgtggaaccctgacacacccagagtttgaccttaaactcacagaaatccacttgcctaaattgctttgttttgttgttttgagaattctatatatatgagtactatcttcctttttaaaagatttatttatttttcatttatatgagtacactgtcactgtcttaagacacacactagaagagggcatctgatcccggtacagatggttgtgagccaccatgtggttgctgggaattgaactcaggaccatctggaagagcagtcggtgctcttaaccgctgagccatctctccagcccccacatgagttctatcttaacatcatttctacctttccaactcttcccatgtcccccagtccctctcgagttcatgactgcttctttattatttttatccccgcccccggtctctgtctgtctgtctgtctgtctgtctctctgtgtacaacctaatgagtccatttcctgctgtttgtgtgtgtgtgtgtgtgtgcacatgtagggctgaccactcggtactgaataatcaggtagggggaatcctccttcctggaggagactggtattccttctctcagcagcccatggttcttcatctaggggtgggtggggctttgagatgtctccgtctgtgttggcatgtcacctggcgttgtcatcgttgggtcatgaggctgaggtttcccgggcccagcttttcaggcacacctagaatgttctagctagcagcaggccagaggacaacttttgagtcatctccctccttccactgtggtttctggtgcctggctgtcaccacgcttggtccccatatacatcttgaaggtttctttcccacttcttgcacataggctgttcccagcctccatccttatcgtcccctttcaattgcagcgtaactttctcccagtagaaacggtctctcaagtcagcttcctggctcagcgtagcaccactggcccacgagtgggctaagaggctggattcctagtgcctctgctccagccagggtacaggtggctccagtccctcctgctctgacactctgcttagtgacacgtgtccttgtctccacagaaaagctggcgcactgcaagctgaatgtggcagaggtgacgcagtccgagatcgggcagaagcagaagttgcagacggttcnnnnnnnnnnnnnnnnnnnnnnnnnnnnnnnnnnnnnnnnnnnnnnnnnnnnnnnnnnnnnnnnnnnnnnnnnnnnnnnnnnnnnnnnnnnnnnnnnnnnnnnnnnnnnatggtcctgagttcaattcccagcaaccacatggtggctcacaaccatctgtaccgggatcagatgccctcttctagtgtgtgtcttaagacagtgacagtgtactcatataaatgaaaaataaataaatcttttaaaaaggaagatagtactcatatatatagaattctcaaaacaacaaaacaaagcaatttaggccccaccccccaccttcagaggcacagctctaggagttgtttgttttgtgtgggtctgagtgcacatgcgtggaaggtcagaggtcaacctcagacagcattccccaagaagcttgccccttgtttgttttgggtcaggctctctcactgagacctgtagcttaccagtgcggctgcccagcgagcttaggatccttccactgccgactctccagtgctgggattattaggctgtggcatcacagttggctcgttttaaccccaacatgagtcctcgtgcttgtgtggcaggcattttaggaacctgagtcgtcttcccaggacttgttttggagagtctcatgtagcccaggctagccttggactcaatatgtagccaaggctgaccttgaattctcgattctcctgtttccaccttctggaggctgagattgcatgtctaatccaaggaattcttgttgggacttgccaccagacacccagtacatacagttgtacaaagcgaacctatctggcccattgtgggtggcccacagaggcagatgcccagggacccatgatagctcaggaatgttacttgccagctggcttgagggggctgtgtcaccacagagggagcaggaagggatgagttgactaaaaaagccgatggcttctgtcccatgttcctacctcctctggttctttgcaaggcaggtgtgatgtggtctggtgcccgagactgctcttcagggctagggctctgtggcctgcatagagaacccagatcttggctgtggagatggggctggttctgtccttgatttcttggcataactttagatcgacccatcctttctccccaggtgctgggcctatgggtaggagatgtcccaccaactgcaaagatttgctccaactcagactgaaactttacattcagagagcatcagggcaggcagccaggactgactgcagcctagagcagtccctatccttgtcacccatccccatggggacagccgattgcctaggagcagaagtcagaagttagcccagtgccaatgataatggcatgtgttattatggtggatatgtggctgtgacaggcccttttctctgcaacctgcaattcccctctttaaaagacagtgctcttaaaagtggctaccagggccctgcatggtatcatacacttttaatcctggccctcaggaggctgaggcaggtgaatcactgtgagttttaggccagctggtattggcctgccagggctatacagtgagaccctgccttaaaacaaacaaacagaccaaaacataaaaccatggttgtcaagttgccttggagcaacaggaaaagaatagagagaggtcaggcatcagcaagcagaaggcccctgggaccttagcatccctgtctatctgaggtctctttgtccttccctagagatcttcttaagagatacccttgagggctggcaaaatggctcagcaggtaagagcactgactgctcttccaaaggtcctgattcaaatcccagcaaccacatggtggctcataaccacccgtaatgagatctgacatcctcttctggtgcgcctgaagacagctacagtgtacttatgtataataataaataaatctttgggctggagcgagcagggactgagcgagtggggttgactggagtgagtagaggtcctaaaattcaatccccaacaaccacatgaaggctcacaaccatctgtacaactacagtgtactcatatacattaagtaagtaagtaagtaaataaataaataaataaatcttgaggggcttagagaggtggctcagcggttaagagcactgactgctcttccaaaggtcctgagttcaaatcccagcaaccacatggtggctcacagccatctgtaatgggatctgacgttcccttaagtgagtctgaagacagtgacagtgtactcatatacataaagtaaataaacctttaagaagaagacatacccttgagatgggtcccttgctcgctaccccgtctgacctgaggcctctgtttgctacccccccccccccccgcagctatccatgggaagaacctagtggccattctgcatctcctcgtctccctggccatgcacttcagggcccccattcaccttcctgagcatgtcaccgtgcaggtggtggtcgttcgggtgagtacgcagggccattgtctctctgtccatctctgctggcgaggcaagccgacgttttcttcttgtagttttccagccttttttttttcccgcccccctgcatcccaagagcctaccttttatttttccctcttgataaaatgcatatctcaccctggtgcttcaagaaatgattggagcagggacaatggcgttgattttgagagcggcacacgggcgttgaggtttaatttcccagatttctggagagagcgttcatttcttcccaaagccaccgagtcggaattcaatccccttgaacgtgcttattactcactggaggaggctgtgaccggcagaatgaaatagacgcccaaattaaaggctctccacatttgctccgtattataagccatcatcctccattatttctttttttaggttcatttctcttgatttactcagagaagggagccaggacctggggtcctgctaacgggggagtgggggacaggcatggatctgctgtgaggactgtcttgtgttttagtgttcaagcacacaggtgctggccgggtttggttcctgtgcacaattttaccaggaaccacgtattaagcacctactgggtgccagacatttgcctgaactgctggggaccctgggtgaggataatcagttttggcctggaagagacaccttatctgccaaagggctgaggtcacacttgggacctgtatgtcggtgtttatgtgtctggagacattcagctacactctgttctctggatttttaacttatctgttttgtggtctgtggtccactgggacctggctgagcctgtgttttctgaagccattccgacctctctactgccctgggagcttagtggtaccctgccgggaaagccccgtgtctgacattaagcggaaggtcacctgccatttctccctgcttccttccccatcaggatatttgtggtcagcgagagtgacgcaaactcagggggaccattcctgcggccctagacttggctgctggctcctaggcagcgggccgggaaagtcttcccaaggacacatgggaaaacggttcctaaacctacctacgtcagtccaggcctcaagagtactgagcgggctcaccatctgggtattttctttcagtcttgcacactggtccaagacaagctgggggttttttggaaaatctgactgcccttgcaagccccctccagcttgctgcgccttgactgggattccggggttgtctgcactgagtccaaaggaaaagaaactgggcaaggagattcaactggatggcagcctctcagcctcccagtgtctactgcctctcctgaggtcctccagactgtctgtgtgctcgctcgctcgttcgctcgctccggtggcccaccaacttatttgaaatgaggccaggcgaggctggaaggcatgagatccaagccttgcttacccnnnnnnnnnnnnnnnnnnnnnnnnnnnnnnnnnnnnnnnnnnnnnnnnnnnnnnnnnnnnnnnnnnnnnnnnnnnnnnnnnnnnccccccgcccccccccccagcaatggaaggatttctcatggctgcggtgatcggcctacagactcggagtgatgttgctaacctttcaattatccggttcccagtttaccaaagcccggcaaccaacaggcacctcattcatgcctatgcaaataagcgaacccaatacccagagtcttccttggcaggctctgttgagtgccagtcagaatgagactgggatgagccatatgacgtccccagttgcatttacttgttcaccaggaccagtctacaagatccctagagccagctcagggaagggtgagagggctgcctggataggactcaggttcctgtccctcaggagcttcaagcagggacctgcggttatggctactttggctggcctctgggaacttccagtgtatgcgggctgctatctgccatcatctctgctgtcctaccactgccccgtgtgcctgccagagttgccgggatgaaggaccactactaactggagcttccaatggcgggtggatttctcctcccagcacttccggactttaggaaagcagctctctttgccctgttctgtttctgccaaggctggctgtgttcagtgtccatgttcgtgcactgccacggccctctctgtttctactttttccttttggggtatcccactcaccccagctgcagagctcaccactatgtggccattcttaactagtattggaagccgagaaggaaaagcaggttccaacatcctgggtagacatgtttgggggatcccgtttgagcaagtgcccacatgttctttctctggagtcctgtccccccacccccaccccacatgactcatgaactacccatctctcctgcctcaaccgcagaatatggtctctagttggtgtttcttgcctggaatgtttctcccaagctttgcttagtgaccatatcccagggtaccacggagaacaatgtgagggtagtccctcgtgtcgtctggagtatacccgtccaggcgtgaagtgtgcactggggcacatggttctccctttctaggctggcgtcctgcccagggtcaccatgaagggatttcccatgagatcagtgtttgtcctctgtgttgcccctgctccgtggtctgtctgtcttgatgatttgtttgctttggggttttcagaagcgagaaggcttgctgcactccagccacatctcagaggagctgaccacgaccacagagtaagtggatggcagccgctcctcagggttctgtacctcagggacccatgcctcatgcaaggcctcaggcccaaggccctggcttcagcccgggacactagcctgggggagcctgtgttcattcctccatactctttagtcttagtgtgtgctttttttgtggagtgacttgcctgccttctttctccacacagtccctcttgggcttcccatgtcagtctctcacctcaaagagagtctctcattccttattttaggaggtgaactgaagggatgggttagtcagtgaagtgctcactgtgtgagcatgagggacccgatactcagcacctatgttaaacacgcgcgcacacacacacacacactcatacacacacaattcagggacagggttatgtatctataactccatcatgggggtggcagagacgggtggatctctgaagcccattggttagtctttctacccaaatcagtgtgtctcaggttcagtgagagaccctgcctcaaaaatacaactcacacacacacacacatacaacacacacatacaacacacacacacacacacacaccatatacattatacacaattaaaaaaaaattaaaggaatgtcagggtgccaggtgtgttagctcaggatagccaccgagactcacgctcacactggccagtcaagtcctgcttgttttctagttttcctctccccttgtctatcaacagttgctctcttagagggagctaccatgtgatcagtcagaactgtccacaaggtggacactgttgagtcctctggtctctttgagcaagccatacttttcaaaagcctagagaaacttgatcctaatagccaaccagatagtgtaccatgtgtgagggcccacggtaccccaggatggaccggaggaactcgacacctctgatccttctgaagaaaccggtttcagtgtttaaaacatggacggtgtcagctagctcaccaattctgttcacagagacgctaagactgactgtgtattcagtatggcctttccacagctgactggaacagaatccatcaggcatggagagtgggctgacagataagctgaagacatggcagtgtgctctgggatgtgtgtgtgttctgttccatgtagttcccaggggaaggcagatagttggggagggggttgggattgggggtgttgggaggaacgacaggctggtgtgtgttgtgacagcaccgtgggcctatggctgcagaagggcaagttcaaggaacagggggtggggtaaggacttggtgggggcttggtggtctgtctcgtgagacatcacccctaagttcatttcctttcctcacaagcccgcactcagctatgaatgggctcagccaggcagttcttgctgtgcctggtcctgtgatatgtacatctgagggcttgctggcgtctgacggaccaaggtagcctctcttatatattactaaggccagatgccagcccccaaggcagcctctggaacacagcgtctgtggccttgaggagacattttcccagatttcaccttaatggtgttggtgtcctgtttatcacagctgatccttcggtcccagctgaccagagtcacggattactttaaaaatattgcataaatagccccatagagtatttgaaggcctcttaaaaatcccctctgaaacttcaccagccaggttcttccagcctgttttccaagttctcacaaatgctcatttatcgttaagcattcaaatggcttttcaagccggaagttccagactccttccacattagccctctatctcagtggttctcaaccacactaatgccgagaccctttaatacagttcctcatgttgtagtgacccccccaaccataaaactatttttcgttgctacttcaagattgtaattttgctactatcatgaatcataatataaatgtcagatgcaggatatctgatatgtgatcctggggaaacggtcatttgatcccctaaaaggatctcagcccacaggttgagcaacgctgctctatctgctgggcgtggctgccagaatcaacagactcccagttcccacgatgcaaatgatgtcccctctaaatgatacaccagggtggtcactgtgttgggaatgagggtagtttgctgtcactcttgtgctgattagtcgcctgcacgtgtccctcacttttgttaggctagagcagggtgtgtgtgtgtgtatccattcctattgggggtggggggaagggggctgagtgctagggtctggttggctctgagacttggtctaagtgtccatctgaccctttcttcttgttcacaggatcatgatgggccggtttggtaagtaccctggtttggggtgggacaaggtgagatccctgggtatgcaccatccaacacagaaagctctgcggttctcaaggtcatgcgtgtgatcttgtgaacttgggcaggaggagtgagcttgtagggacagaggggccagcctggagaacatctctagcttacctgcaggggagggagggagggagaaaagaaggtaattactctctcacctgaccctgtcccctgggcaagagaggacagacaaagagatcaaaaacctacagctttgtttaaattctcagaggtgattctggctccctgcgcgggctgggagggaggctgatgtgggcagaagtttaaaacagaaggaagtggagaaggctgaggaaaaatggaagccagatagaagctcccagctcatttccagatacatgtctgaccctggggaatccttgggggcggggccagtgccacctccaaaacccaatgcccttctctgacctggaggttgtaaagaagggctgaaggatgagcatgcagcatgctgaaggatgagcatgcagcatgctgaaggatgagcatgcagcatgcagcacgcagcagttctgacagtcaggaaggtcttgagtttgagagaaagctgtggccatgtagcccctgagcccttctgatggacaggtgttatgcttgctgggaaagttcccaggggaagtggggtggcaagcatgggtcatgtgggacccctgcttggggtccaggtgcaggctagtttagggatatgtatagtttagaggctctgaacccctggggatcgcagaggcgggaggatgacgaatggggacctgagagtgtggcgtggtaacttatgagtttgggttggctctgtttcaggttcagaggatttgaaaagagttggcttggctgggggcgtggggggagggaggcaatcctgggctcggttggtatcttgggagccctgacagctgggaaggacacctggtcaggtacacagggtgtgtctcccaaggggagagccaggtgcaccagaactcagtcacggtgctggggacatctgaggccacaagaaacctcctctgaggctgtactcacttcacttcttgcaggctctggcgtaagatgaaacaggctattagctagtgacaggcaattagttccgcccccgcctcgcacttctgctgacgcaaggaggtctcctggttacgcggctgacagccttggttttggtgcagtgagcccctgggctcccaggcatcctcttgggggagcagcagatggctatcccaggatttctggtcacttctgacctcactgccccgccagggtctggtcacactggttcccacccagcatctactttctggcttcagcacaagctttgctgaggaaggtcaaagcatcccttgtcacgtctgtttcctgtccacagtccaggatgctccagacatcacatcccctgtggccttgatctctcacctcctgagtgtccaggtctaaccctgccccccctccacccccacttccactactctcggcctaagacaccctcctgctaaattacccagggttccctcctgcattggctcaactgtcactcaccagggatccccagtcacaaaccagcatgcacccgccctactaccctctggttgtcttcgttatgtctagaaccatctgacaaacctggagccagccctgctcccaggagcctcagggtttgtgtgtgtgctccccttgacccggaacactggtgcaagtgctatgcttgtaggcacacccatgccttttcctttgttcagggatctccaagtatcctggaggcagccgctcaccccaagcctgtatgatctcagcagccctccctgcaccactgtcaggcgtgaggaggttccaagacctgagcaggctgagtctcctaggctgagtcttgcttgaacccgttccctcagcctccttggccttcgagtgctgtgcaaaggtggagcgtctcctctctggtcactcttccctaaggccagcaggttgaggggtgggtacccagcctcttcccaccagcgtcttgtcctgcctgaagtacaagctggtttttctctccctggaaaccagtctcctgggagctgggaggttagagcctgatctccatagcaacgcctttgccagttgccttttctctagctagtggcccttcctccctggttccccctccccaccccccactcaggagccctttctggtgctgacaggattgggtgggcaagggtggagtccccctcctagttccaggctcagtttgctgagacccaatctctcccatttgccttcccagcagagcctgtgttaaattaaaactctgacctgacgttcacacccctggtcattgtgcacgaaggccactgcactaaaggactcagctcctgtcagcctccctcccagaccaccctgctcttgaatccactctggctccctgtgtttctctttgcatgttctattcactctggctgcaatgcccttcctcttctcatctctccagccagcctggctcagacggcaagcctctttcttccaacctcttgtccatggctgcgaacttgggtgctgccagagaccagccggacagagttgctcaaaccccagaagctgaaggttataggaggagaactgtggaaaataggagccccccccatccttgtcctgggggtggcaccttgatgccaggtgccctgtagctcactgtggccccagcctctgctttcaagagttggaaatgtagattagggaaaaccttcctattctaaatgaggctgagttaggctccaggtacagacctgggaccctcctgtctgtgcctttccaaactagtgacttctccagtacaggagggaaattgatggggtccccagacatgggaattgggcttgtccctgtgtccccaccctgattcttgatgctcacagaggcagtggggaacagatgtggttccatttagctagggaagggacctaaagtctgtgggctttctagtcacacagtgaggatttgaacccagctctgccctgtccccaccatccctggtccttcctcttggctatggagccacattttgtgtcctctaggccccaggtaagcagccagcgtgggaggcgcccaacagcctcccacgcggcactctgccagcccagcagtggcccagctaaataaaccggtgacgtcaatatcctgagctcttggggctttgcctaagccgctttgcagggctgcacttcttctgagaggagtaaagctccttttgcccctttacagattgttttctgggggataatctgacttagctgattatggaagtgagtgacatctggtgctaactgagggtggctttttgtccccaccagtccttagagggaggcactgcctttccccccttccctaaccaccccccctccccccagacacaaaaggtcccttctctctgtttagcctctcaccttccccaaggctgaggaaaaggccccaggttggatggagctgcctccagagcctggctggaatctctggcaccttcatcttggggctaggttggtagggggctaactttagaccgtcctgtttggctcttctccccagaaccctggctctctcagctcaccccagccttctttgctctcctccttcctcttcctcagcagccccagtctcctgaggtgggggaagcccccctgtgccttacccctagaaccaagaagacagaagtcagggcccgggtcccactcagtgcctcccctcccgctgcagcactgttggccccagagcccccaggcctctacttgacctgggctatagtcatctatcccaacaacttctgtgcacccagtcttacagacgtaaacagacatttgggttcagagggcacctccagagggattccaggttcctgtgtccctgaacgaagagcagagcagagacacacagtcgcagccagagcagactaaggagcatccacttctgagggagaatgtgccgcccccaagtgcagagctgggctttcaccttagagcctggctttcccttcctttgcatagtgaggatattttggttcatttgaatagagtaggcttttctgagtgtgtgctatttgtcacatgtagttcacacaaattcatgtgtcagcatgtctcattagcatcttaaatctgcccctaggggtgtgccacacggttacaatgagtcccaggccacccgcagacactttggagtgcatgtgtgtcctgagccagtgacataggcacattttcatatttggatttgttttcctttgtcagccctgttgggctgggaggtgtctgttgtggttagggaggggatttgggggttccagtgttcctctttgccaacttgttcctttcagatgctaattttgcagaggctttctgttctctggtggcctcaagtagggagggatggggacttctgtgctgtttgtttgggtggcagcttgcacagatgtgagcaggtcagagtgagcaggtcgtggttcaccaaggaagagggaggtcatgggctacctcaggttgaaataagcagccttcaggcttcctgccgaggacaccaaaggctcaggtgccttccccctgagctcctccgctgagcttgccctgttgctggagtcagaggcagggcaggagtaggagaaccatccatctctcccagagagttaggagctgaaggtccagcagcagacggtactgcaaggagaaactatattttcaagatgtgttatgcacaagcctgggcccttcagaagaggtgaccttggagagcaacctgggggacttgcgggggggggggcagtgaggctctgtcaaaggcatgttagtgcttgagggatgcaagtgtgcagagaggccattttgtaaaggctgggagatgtgtgggagcgtggccatctcatagccacgggagagaggatggaccacagtctaagagccgtgagaggtaggggtttgaggggccagtggcgagaagttgcccagttgtgcattcagagattctgtatgctgagggggaggaggctggtggagctagatagaggctgtggtcatccagaggtaagaggaggtgagccaggcatgggggcagcggagctggccaagagtagaagaagggggagtcacagtcagcgataacgcttagggaaggagagtcagggatgcttcaaatgcttaatcaaaacttgcaggcacccaagtacgacctggtatcccatacccaaagcgttactgttaccaaggaagccccacgcagctgttgctcgttaaggcaaccctcacgcctcctgctgcactcctacggggcagtgtcaacctgcaggctcctctgctctggcagaaaccagggggatcaagcagaaccccaagggagagcaaccagagagggctatttctagaactgagagctgaaaggttgggaatcagggccgccaagtcctttctagaactctctgtgttctctcttgcatgtcctgcagagcgggacgccttcgatactcttttcgaccacgccccggacaagctcaaccttgtgaagaaggtagattatctccctccctccctccctagcctgctccccacccccacccccgtgcctggtgcctgtgcagactctgtctagactctctgcagacccaaggcaagccgagatggggatgagagacatttggaatattctaaagtgtgcccttgtgtattgagacctctcccagcaatgtgtgctgtggcgatgctctcttacaatactgtgctattaactagagcctagagtttgacacagccttttggcgatagccatcagaggagggtttggagtatgccagcctgccatattgggggctcgggtccggggggtccagagaaggttgctggtgtaatgttgtctttacctctctgccttgacagtctctcatcacgtttgtgaacaaacacctgaataagctaaacttggaggtgactgacctggagacccaggtaggcagggcttcggtggaggctccctctggccaatgcttcttgcagctctcaactcaggtggggtgtgggaataatcaggaccaccttgtttctctcaggagaagctcccagagtgtagcttgtggtattgctccagcccgaccaagctggctgcttagacccttctctgtgtttcctgtaactgtggcagacagagatggaaggctgaagccagggtgggagtccagagttacagtgtgggcgggctggctccttcccactcttgctgtggctcctgctgcgtttctgcaggcaggctccggtgttcttgcatctgtagatatattacttccatcttctgtggcctcctcctgtgtctgcatctgagtctgcatgtctgcgtgttgcccaaggctctctgtgccccgtctgcttcccagagctagagtctagaaatggatgcctgagagcaaagaaatgacacgctggaatagagcccaccctgatgacacaaggacaactgagaccctttgtccaagtgaaggcacaggttaggattctagcttatttaggagagaaacaattcaacttttagtgcccacccccaagactccatctgaccctgccactggccctttgttgtgcgggtctctgggtctagaacattctgtgccctctgcttcagtggtggagacatggcagcctcacatttgatcccatgacaatatagagacaatgtcccatccaacctggggccagcaagatggctcagctggtaaaagtgactaccaagaaaacctgacaacctgagtttgatcccagggcacttacatagtaagagacaaatggctccttcaagctgtcttctgattacatagggactataacactaacctgatgccccgtcctacacgtcaaacaaattacaggaatagtaataaaattagcatccatttggggactagggacaaaactcttttgccatctgtacctcaaacactccttcctcaagctagagtgcccttgtagtggtgacagtctctaagcacacaacatgccttgaaggcccgactgaattttcccctggcttagttgtgtggttgagttttgggccggaatccttggtgcagacatccctaatacgcagctgatccatcctaaacccctgggcattttcttctattgcttcctctttctttaacttcttctcatttgcttttctaattaaaaaaagtaattcaggttcatcgtaggaatgtctgaaaatgaagataaggaaaataaacaaaagttgccctaatctatcaccctgagggcgctgcaccctgggctttgttccatatacttctgggtattctgggtgtaggcagtatagtctgctttatggagcggattttgtgtgagcgtgtgtgtgtgtgtgtgtgtgtgtgtgtgtgtgtgtgtgtgtgagagagagagagagagagagagagagagagagagagagagagtctatgtgcacatacgtgtgcgtgatttgcaaatgcatctcttattcttggctgtttgttcatgcagcatgcttgccgggtgacactttagatttcctgaagctccggaagctaaagtgaaaagctgcttctctcgatccctgatgtcccccacccccaactccgcctgggtctctttcaaagtgctcatgcataaaacaacacactccctttaataacagtcgatcacactggacagctgttgtgtaattcgttgttatttttttttctccctaaatacatgggcatcttcttgagagagatggatatctctgtctgaagctatttcgcttttcagtctgtcagagggctcctccctccctccctccctccttccatctcctccagacaggggattcacctttgccttagattcactttgtagcttaggctggccttaaacttttggtcatcctcctgtctcagcctcctgagtgccagggttataggcgtgtaccactatgcctggcactggtctctgttaaccccaaccttcttagattgggaggtgcggctcagtagcatagccatttgctgagcatgctcaaggcccttggtcccttacccagcactgttaaaatcattcccttcccttcaggtgtgaggctgcattggcgttaagcggccctgtgattggacccccttcctgttcctgtgcatgctgcctagcaggtgctctgcccgtggctattcgtgccccgtccgtttcctgggggtgggggtgggggggtgtttaacatctagaaatgaaatcagacatgaggttgtaagtacaaagcagcatgcaccatgaggcctgggaaggtctgatcatgggagctggcaccagccatgtgggcagctgacctgtatctgctgtcatctgcctttcttatgtgatcctgcaaaatacacagccagggcaccttagatcaggggaaaacctgcatttttgcttgttttgttttgtttttttcttctgggctatcatacaatgtacaatttaattggatggtgctggcatccaattaaatctatgcttggtggctggtctccctaaaaggcctgccacccgctaacaaatgacctgatgccctttgcttgttagagacaatctccccacccccacccccccgatcccggtttttaaaatcagatatttctgatgttcccttttctacgtaagcctccaaaggggtgtctggccttcttcgggctcatttacatatttggagtcgctagtctctgcaagctgaaggcctccaaggcttcccatccatccccttacctctccaggagtcctgcctgggaatctcagaagactggtgggggtcttctgtggacttgccattcactcctgccatcgctggccatgtgtatggaggttgaaatatgtctggtaccattggaagctaccttttgtattttagtaggtttttcaagggccaaattcagggcccagcaaaatggttcagaggatgaagacgcttgtctccaagcctgacaacctgaacttgatcctgggaactgcatgatcgagggagagaactgactcccccaaagtgttctctgacatccacatgtgcagcatggtgtgtgtgtgtgtgtgtgtgtgtgtgtgtgtgtgtgtgtacaaataaataatgtaattaaaagagaatcaaggggctggagagatgactcagccgttgagagcagttgttgctcttgtagaggaaggacctgggtttggttccccgcacccacatggtagctcacaaccatctttaactccagttccaggggatccaatgtactcttctgatttccatggacattagacatgcacattgtgcatatacgtacacacatacgtacatacataggtacacacatgcatttatatgtacatatacacttgtagatagaacgtccatacacaaaacatctaaaaatttttaaaaaatattcaatctcaagacttttgactattacttgcacagtagtgatgttatcagctgtcttagtcagggttttactgctgtgaacagacaccatgaccaagacaactcttaaaaggacaatatttaactggggctggcttacaggttcagaggatcagtccattatcatcaaggtgggatcatggcagcatccaggcaggcatggtgcaggaggagctgagagttctacatcttcatctgaaggctgctagcagaatactgacttccaggcaactggaatgagggtcttaaagcccacatcctcagtgacacacccactccaacagggccattccctgggccgagcatatacaaaccatcgagcatatacaaaccatcacaccgctgtctactttgagaggtgatgacatataaatcgccacagttaagatggttagacaggggacaaagtcaacagaggttgggattgagagggcaggtgccatgtgacccccatgtgtgagatcccccaggaataaaacccctagagacagaggctgatggcgtatattcctattatcaactcccagtacccacacagcggctcacagctgtatgcaactctagttccagggtattcaataccttctttggacctctgtgggtacatgcggtacacatacacatatacacacattcatataaaataaatctaaaagagcattcaagttgtgttaagggggttaagttggtaaattttgtgtaatatatttcaggcactcattgctacctctgcaaacaaagctattgcctcttcctttcttgctcaaggaggaacaataggtgtcaagaatnnnnnnnnnnnnnnnnnnnnnnnnnnnnnnnnnnnnnnnnnnnnnnnnnnnnnnnnnnnnnnnnnnnnnnnnnnnnnnnnnnnnnnnnnnnnnnnnnnnnnnnnnnnnnnnnnnnnnnnnnnnnnnnnnnnnnnnnnnnnnnnnnnnnnnnnnnnnnnnnnnnnnnnnnnnnnnnnnnnnnnnnnnnnnnnnnnnnnnnnnnnnnnnnnnnnnnnnnnnnnnnnnnnnnnnnnnnnnnnnnnnnnnnnnnnnnnnnnnnnnncccctccctttccctcctctcccctgtcctcccctcccctcccctcctctcctcttcttttcctttctttttcttcaatgaatttatttatttattcattttacatctggattgctgccctccccccctcccctcccctcatcccatggccttgtttcttgagctctgctaagggttcacaggacagggttgggttgctggataaaggtgaggtcctggaatgggcactgcaaccaatagagcagccccacattttcctgcacacacgcagggggtctgtccactgcacacatgccccagaattgccattgagttttctctgtagtttgcagatggtgtgtacctagttctacttctgggccttcttgaagactactttgtcccccttcacaacttctacctgactcctgacagctttgaccagaaggtaagtgccttatttcctgggagcgggcccagccatgctgcctgggggagatagaagggatgtcccttggtgccgatgggcaacttcagctcctcagtgttctttagaatgtgaagccacgtaatatctgggattctatctgagctcctcggagccagactgagaaaccccttagtagcatgcatgccactgtatgaggcaagtgtgtcgcttggtcatgcccccgacatgtctttcccacaggctaatattgtttttaatgacgctggtcgcagcaccctgggtttctctgttttgggagccactaaatgtcatgtcccggtatgacacacgtgtggctttgcagcgtgtgcctcctgcttcccgagcctggctacgtcaatttgcttctatttttcctcctggcacattgggctttttctcaaatatttacaatagttcttctgactctgctggggacgggttccagggcccccttgggtaccgaagcaggcagatgctcaagtcccacatgtgaaatgtcgtatacagcacaaagcctacgcatttcctcctgtagatgtgaaatcctgtctggtggcttatgatacttaatgcaaatatgcagatgatatggaaagtagctgctttctgtattgttagggagcaatagtggagggtgcttgttcagtatgctacagaacccccagacacggtctattcagagttggtgtcatctgaagctctatgtgtgtgtgtgtgtgtgcgcacacgcatgtatgcacactcgcgaatgtgcatacatgctcatatttgtgtgtgtttatctgtatgcatgtgtctgtatgtatgtctgtatatgtgtatgtcccactctgtgtatacatacatgactgtatgtatgtcagtgtgtgtacttatgtgtgtgcatatgtatatacatttatatgcctgtatataaatatgtgtgtatgtgtatatatatgtgtgtttgtgtgtatatatatacacatatgtatatgtatatatgtctttatgttcatgagtgtacacatataaacatgtatgtgtattcatttatataaataatgtatgtttatgtatgtgtgtatatgtgttcatgtattcatgtatgtgtgtgtatatatatatatagatagatatgtgtgggtgtgtgtacatgtgtgtgtgtatgtatatgtttgtgattgtgtgtatacatgtctgtatatatgtgtgtatgtacattttatttctgtgcctggttttctagaacattccttctgcagaagcctatgggctggcccttgagtgtctctgctcatcctgtgctccctgcagttaggtctgtcactgcagagttagtgcctcacttctggggacttggcaaagactagcctgggttgcttgggactcatggcacctgccactttatttttccaaagtgcgaggcccatgaggcacggaggcagacggtggcaaccgcggtgggagccagggtgacagcagagaacgggccagtgtttatcaatctgccggttcctggcaccaagcagtctgtctgcttgtggccaaatggcgttcctatcgtgcctgcagagatagaattggacagattagaggggtcttggcatgctggagtccacactggggatggagggagaacagatacagtgaggaatgagcagtacagagctcgttaggaccatggagctgctggaattgcagacaccagaggttagactgtcagaggtgaacaggtttgtgcatatccaggcccctatgtggctgtattatctccaggaaatcgtgtctttctttaaactaataagaaggccggtgagaacagtggatttaatcagtcgaactgggtctttgtccaaacaaggctttgtacagatggcagaagtccattcctcagtttggctttctctttgaaaccaggatggacatctatgcaggccactgccctgacctacaaatcaaggacacctttggtgacgagcacacagcgagagggtcctcccactctccagggagatgggaggtcagggtgttggactctgcaggcacctggggcctcctcctcaggcaggcatgggaattgggtccctttcttacatattcccgtgtttgttctgaccttttcctcctcggggtagtggtgagggtcgtcacagcagtgattgccacgcctctatgaaccctgacctgtgtatttgtctcctagtcgtaagggctgggaggaccatgccctgcactgaagcaggcagtgcctctgatcagctctgtggcctgaagctgaggctcctttgctttggtctcgggcatcttggtgacatctcaagagtgctgaaggagcaaagatttggcaagcagagtagggagttgtacaagggggtgctccctcaagcgtagcagaagcaggtatctttaaccaaagatatcaggctggggagtgttgttcagtcggtagagtgcttgtctcgaaaacacacattctgggctccgtccctggcaatgtgtaagcaggcacagtgataaacaccggtgactggtggaggcaggaagattagaaggtcaaagttatctccctatacttagaggatagcctaggctaaatgagactgtctcagacaaagacaaaagcaaacagtattaggttggaggactagctcagaggcagagcttgtgccaactgcacaggggttaactctcagcactggggtgggagtgggggggtgggggnnnnnnnnnnnnnnnnnnnntggggtgagccacaggactgggcagcccggaccctgtggattcgtgccttctgttaattcataattgacattgtaagggagattatcgctggcattcctggctcactcatagtggagtggcagacagtgctactactagagagacggttggtcactatgaaccctaaggcccgtccagctggcgcctgctatgtccttgctggtttgatggtccatctccccaccctccttggctcagggcagatggaggctacacatggttttgttggtcttgagccctgtagactttaagtaagacaaagaggctcccactcagggcttctccagcagttagcagaaaggaagcctcaattccatgggtagggtagggtagggcagggcagggcagggcagggcagggcagggcagggcagtcaggtaggcagatgttagtggccagggccagggacctccatgctggcccttgagctaacctcaattccaacagggtcccccaattgcctgaaggacagtgtaccccacagagacacagtccaggcatgcccggcttgcccagctccttggttatctgacaaggtagcatgaagctgccctgtgctcagaggagtaccctcaggggctgagtgcctttgcaagggacttgtcctccctcagactcagtttcccgatctgtcatttctcaccatgtagtagatgctggctcagaggcagcacttggatctgagtcatgtgtggaggagggcagactgggagctgctattcttacatcattctttcaggtccctggcaaggggaagagggactgttgtgtggtccccatcgactccctgtgccctgtcctgtgtcctagtgggctttgtacaaagaggaagagtcagtcctttctatacagaaaaaaggattgtgtggacatggccgggtgttagggacgtggaccttactggcgctgaccctgctcctgtcttgtccctgacaggtgcacaacgtggcctttgcctttgaactgatgctggatggaggcctcaagaagcccaaggcacgccctgaaggtaacaccccaccagagcagctccaagcataagagagggacagcaggggtcagggtcccaggcaacctgtatgtcctgtggatagataggtggcaggcatctttctcctacgcgggtggcaatagagcctgtagttcctggagtctggcctcttcagtcaatgctgtttctttttgcagatgtggtgaacttggacctcaagtccactctgcgggtcctttacacgctgttcaccaagtacaaggatgtggagtgatggagcaactgatcctccagggacaagtgctaggccagaaaaatgggtgtatccatccacacagtccttgctt

SEQ ID NO: 415 - DNA, 1117 bp, Mus musculus
tcgcttatgtcctccgcgccaccacggtcgcccaccccgcgggcccccaagatgaagaaggacgagtctttcttgggcaagttgggcggcacactggcaaggaagaagaagaccagggaggtgactgacttacaggaagaaggcaagagcgccatcaactctccaatggccccggctttggtggacattcaccctgaagacacccagctagaggagaatgaggagcgtaccatgatcgatcccacctctagagaagaccccaagttcaaggagttggtcaaggtgcttctggactggatcaacgatgtgctggcggaggagcgcatcattgtgaagcagctggaggaggacctgtacgatggccaggtgctccagaaacttctggaaaagctggcgcactgcaagctgaatgtggcagaggtgacgcagtccgagatcgggcagaagcagaagttgcagacggttcctatccatgggaagaacctagtggccattctgcatctcctcgtctccctggccatgcacttcagggcccccattcaccttcctgagcatgtcaccgtgcaggtggtggtcgttcggaagcgagaaggcttgctgcactccagccacatctcagaggagctgaccacgaccacagagatcatgatgggccggtttgagcgggacgccttcgatactcttttcgaccacgccccggacaagctcaaccttgtgaagaagtctctcatcacgtttgtgaacaaacacctgaataagctaaacttggaggtgactgacctggagacccagtttgcagatggtgtgtacctagttctacttctgggccttcttgaagactactttgtcccccttcacaacttctacctgactcctgacagctttgaccagaaggtgcacaacgtggcctttgcctttgaactgatgctggatggaggcctcaagaagcccaaggcacgccctgaagatgtggtgaacttggacctcaagtccactctgcgggtcctttacacgctgttcaccaagtacaaggatgtggagtgatggagcaactgatcctccagggacaagtgctaggccagaaaaatgggtgtatccatccacacagtccttgctt

SEQ ID NO: 416 - protein, 345 aa, Mus musculus
SLMSSAPPRSPTPRAPKMKKDESFLGKLGGTLARKKKTREVTDLQEEGKSAINSPMAPALVDIHPEDTQLEENEERTMIDPTSREDPKFKELVKVLLDWINDVLAEERIIVKQLEEDLYDGQVLQKLLEKLAHCKLNVAEVTQSEIGQKQKLQTVPIHGKNLVAILHLLVSLAMHFRAPIHLPEHVTVQVVVVRKREGLLHSSHEELTTTTEIMMGRFERDAFDTLFDHAPDKLNLVKKSLITFVNKHLNKLNLEVTDLETQFADGVYLVLLLGLLEDYFVPLHNFYLTPDSFDQKVHNVAFAFELMLDGGLKKPKARPEDVVNLDLKSTLRVLYTLFTKYKDVE

SEQ ID NO: 417 - DNA, 172311 bp, Homo sapiens
  misc_feature (1)...(172311): n = A,T,C or G
ttttaaagaccagataaatttacctttgggacagttagatgtgcacaaatgcaccatgtgtttaaagatcaccaaagaggagagaaaaggggattccttagtccagagaacaaaaactggtgagctgtgatttaaacaaaacgaatgttgttaaaatcaggttgtactcagaagtccaaatttctagcttctcttgagaaactggatccgacaaacaaaaaatgttcattcctacctgcagcaggaggctggagctgagacgtgggtgttcctgcagctggggcctgtgctcccaggcactcatggcttctctggctggttcacttctccctggctcagacagatcaggagtggaaacatctgaatatgctcaaggaggaggtaagttttgggggaaaaactgtcagaaagtggatgagggctgggtgcagtggctcatgcctgtaaccctagcactttgggaggctgaggagggaggattgttgcttgagcccaggaatttgagactactctgcacaacatagtgaaaacccatctatatgaaaaaaaaaaaaaaaaaaaaaaaacagctgggtgtggtggcatgcatctgtggtctcatctacttgggagacttaggtgggaggatcacttgagcccaggaggttaaggctgcagtgagccgtgattgcaccactgcactccagctggggtgacagagcgagaccctgtcacaaaaaaaaagaaagaaagtggactagcagtgagcccagggtcaggggccctggctcttgccctgttggggctgtttaccaaatccactcactgctttcctcaggtttttcttctaccaaaggagaagatcttggtgtattcagcaatagattccactcttagtggatgccactcatgagctttctagggctttctacccccaaggtaaaggctagatgatttttaacaccagagattgattgttttgcctgtctgaggacattatgtacaaggagttgaacagtggctctttgattgtgattcagactggaggtgaatcccagctctgtggttgaccagccgtatgaccttgagcatgttctcatgtgggttcaaatactgggccactgtgaatatgaggcacagtcccctgtttcccagtgaagaaaagccaggtggaggagagtggccaacctgagtaaataacttttagaaatacagatgaaataggccgggcgtggtggctcacgcctgtaaaattttgcagatcttttaatatctgtcttcaaaaccagagggattcttgcatctggttctgcattcagtttgttgcatttgaagttgttcgattgacgcatatgaagaaaatgtgttttcacatagatacgtatttggaaaagagagtattttagtagccttttcagataactgtgaacattctttgatacttcaccaaaactcaactaatgaacggttttgaaaggttagttgcagtgtggaatctgaaaccccgtctatgtctttttcacactctgttccattaagatcccctggtctacctggcactgtgattggattgtttacccaggcatgcttttgtaacatcatatgctagtcatttgcaaaatactggttccctgaattaggcacatcttccaaatgtcaacatgtcttcattatgcaaaacagaagatcacatttggccaggtgcggtggcccatgcctgtaatcccagcactttgggaggcccaggtgggcggatcacctgaggtcaggagttcgagacaagcctggctaacacagtgaaaccctgtctctactgaaaatacaaaaaattagctgggcgtggtggtgggcgcctgtagtcccagctactcaggaggctgaggcaggagaatggcgtgaacccgggaggcggagcttgcagtgagccgagatcacgccactgcactccagcctgggtgacagagcgagactccatctcagaaaaatcaatcaatcaatcaataaaagatcacattcattaatatcagcacccgttggatcaggaaaatctaagtacagatgctcgttgacttacatttgataaacccgttgtaattcaaaaatattgtaaattgaaaatgcattaagtacacctaacctactggacatcgtggcttagcccagcctccctggaacatgctcagaacacttatattagcctacagttgggaaaaatctaaaacaaagcttattttataagaaagtattgaagatcttgtgcagtttgttgaataccgtacatgacatagaaattgcaaccatttcacgctgttgtaaaagtcagtacatcggaagtgggaccattagaagttagggaggtattgggaagctgccaagctcatggtgctggatccaagtttccaaaaattccagttttcacttgaagcccgcattttaccattggcagcaaacacttgaagctcactttgtccatttccaaggaaatgtctgccagatacccacgtctgaatcaccatagtttgttagtcgctcttccagggaaaaacaatgttccatgaacacagcggcaattcaggcctggacccaatcacccagggctttccttgagacatatgagcccctgtgagcagcagaagtgttctctgcttaggatgtttgaacacagggtaaaagcgctgagatgtaatgacagggagcattttgctgcttcattcatgagcgaaactggcatttgtgtttccctccccaagcacagtggcgaagaatacaatggccataggggtgtgttgcctctgccattctctgccagggtgcaggcactttcacccacagctgcttttgcatcgtgagtgcaaatgtcaacccagtgaaccaagtaactaagtaatgtctttgcattattataaatatagttttaacccaatggactccctggaggagtctcaggatctccagggggccgtggaccacgcttcgggaaccactgatctatcgttgtccaaagctaattttttcagctttcggggtcctccccaggtgacttgcaatacagtaattgtgagaatgcccataagggctaagctgggacttaagcaccctccttttattttcagatgtaaatcatattcacctccctgccgcagatcctttgtgaaatggggtagtcgagcctatcagtatcgagagaaacaaaagcgaagtgcctggcacgtggtaggaactcagaagtggcaggagggggcagtgggtgttggtggaggggcagaggcgggtgcgtggtctctgcgctccgtggggtgggtaagaacctgccaatcccagtgggttctagtaggagggatgtctttcctgcgtggctgtacacaggagaacactgtaaagagcaaggactggcattaaattctgcattaaacgtgaggcctgtttttacatttacacatacagatttcagtttgcgtagtgaaccgtgggaggctgtctcagtcgtgccttcctggggtcaaaccagttggcctgttttcaagaatgaaaaatgctttgcccgaaagtggggcgaatggtaatcacagacacacacgtctcggtgccagagttgtagctttatacatagtgccttcctgacaagtaaattactggattcctttgccaaatcattagataacttttaagagcaacaaacattcatgcaaaaggagattcagcattatcttgttagaaaaatagtcatgatttttgaaaagcaaggacattctgtgaagtttgaccaactgtgaaaattacagcctttcttccccgtacttcccccgtgcttttcaatcaatcagtttctaatggatgaagcattccctacatttgtcactagatggatgtgccggtcaattaaaatattctgacttcgcagggttgagataatagccagcctggatccatccgttactgtgaaatagaaggtgaccttcctgtattgagtcagagacccaaatacaattgctttgatcttattatcatagccagaaattaccgttcatctaaacgtaatttccctgaaatactgagcgggcagagctactgctggaaataccagaacatcataaagagactgtgatgtggccttggggatgaaaggtgacatcttgacttgacatccattccacctgactgcagaaatcaagtggaatggaatttcctgggatgttctgtatctagtaaaggctaagtaggattcatcaccaaaccttaacccagagagattaagccctgttataatgtgctgcggcagccacgccaggactggactccctggaatctgaccctttctttccattcccacactcccaggccagggtcctagcctttcctgtctgtctgaaaactgctcttccaggggtggggagcaggaaaccttgtgttggggtggaaagagcctgtgtttaggagttggagctggctttggattctcacttcctttgttcgcttattcgttcctccaacatggacattgggccaggtgcagggtgttgtacaggtggctcttctggcaactgccgtcaggtttaccctcctctttagccccagaggtcccacagcctcctgtgtctgcccatcccttgcctccgatgtccccttccctgaagttgttccaaatgacctgtagttgccgctgctgggcctggcttctgcagggctggccactccccttctccagggagcccctagttctgtttggagaactttgccaggtgctggcccttccccactcttgggatggaagcctctagaacaggatggagaggggtgtatccatctgcatgtcattctctggtcagagaaaataagttccaccttttctgagcttgagtgagaaaaaaacaatcaaactagatgtttgccaaagacatcacagcagacacgaagtagcagagccatgggcacagaaaagggagcctgggtaccccctgctggcagaggtgctggggcaggagcaggcgctccaggtcgcgcgcgaagtcagtgaggacccttttgagctccccgcaactgaagaaggaattaataaaatcaactataacctaacagtagtagtaatagaaattttaaaatcctctcaaagttgctgcaaagtgtgaccccccccttactctcaagttaaaagagaatattaacagtctgtcttctctctgtggacagtggaccttatctatactccccaactccacattcctcaaagtttgttacaggcccagcgagttcctgcttacctccctagcatggctgcagggtcacaagaccaataagtttaggtggcaagacatgtttctctcaagatataagaaatgtaatgctgtctttgtttcttgcttctgtaacttgcttcccgcctcacgtagttcctgccttaagatgtttacaagtagaaaaagccctttgttcggggctcaaactttctggacctatgtccggctgagctggtgatcaccttaatttaataaactctcctgaaccttttccgtctctccagtctttgattgtcctgcaacacaacgtccagtttgtgagcatgcactgcttttgtcttctgggctaagccagaacaggcaatagggttaagcacctgaagtacattttaaggagaattaggagccattgttccaaaaagattctaaaaatggatgattgatttaaaaggttctcagggacagtgctgtgtactcaacagactcctgaccgacctgcttatgagccttgaaaacagaaaatctttattttgcaataaaggtgggaaaaatacaacagctctttaaaaatcaatgattaaaaaaattttatagttttatttatttatttttgagagagggtttcactctgtcacccaggctggagtgcagtggcacaatcacggctcactgcagcttcaacctcttggacttaagcaatcatcctgcttcagcctcccaagtaactgagactataggcgtgtgccaccgtgcccagctaattttttctattttttttttttttttctgtagagacagggtgttgctatattgcctaggctggtgtcaaactcctgggctcaagcagtcctcctgccttgaactcccaaagtgctgagattacatgtatgaggtaccacgcctggccgtttttttttttttctttttacacaaataatagcatactgtagttcctgttacatgcttttctctttcttttctttaattttttcagagacaaggtcttgctctgtcacctaggctggagtgcagtggtgctgaggcaggagaatgggttctggaggcagggtacctaaggctgatttgcactgatttcctagagctgaatcaaaaggaaaaccccacctctccacacccaagtaacgaaaggatcagaggctactcaaccctcccacctttccactgcatggcagatgaaaaatgggaagttcctctgattggtcccctcccacaaccaatcagactggtcgcaggccacttcttcatttacatcggttgtaatcaagtaacaacctagagggtatttaaaccccagacaattctgtaaccagggctctcagccactgctagagcctgctcccactttgaggagtgtacttctgtttcaatatatctgtgcttccgttgcttcattctattgtttctttgtttgtgcgttttgcccaattctttgttcaaaacgccaagactcataatcaagaccctccactggtaacagcgctatcatagctcactgcagtctcaactccctggctcaagggatcctcccacctcagtctctggaatagctgggaccacaggcgcatgccaccatgcccagctattttaaaagtattttttatagaggcagggtcttgctatgtttcccaggatggtcttgaacttctgggctcaagtgatgctcctgcctcagcctcagcctcccaaccctctgggattacaggcacaaggcaccacaccaggcccatggaatgctttcaatagtgtatatcctagcatcttacgccactccaagtgtagtgcaggaatctgacgatacattagaaatgcagagtcctggccagatgccgtgtctcatgcctgtaatcccagcactttgggaggccaaggtgggcagatcacggggtcaggagattgagaccatcctaaccaaaatagtgaaacgctgtctctaactaaaatacagaaaatcagtcgggcgtggtggcatgcgcctgtagtcccagctacttgggaggctgaggcaggggaatcacttgagcccagaaggcagaggttgcagtgagccgagatcgtgccactgcactacagcctggtgacagagcgagactacatctcggaaaagaaaaaaagaaaaagaaatgcagagttccaggccctgcccagcccaccctgtggttttgcaagattcccaggtggcctgtgtgtgcagtcaggattgaggagcaccctctaggtttgaactcagcacacttccataccttcagccctctcctctcataggtaactcagctcccacctgccacgtggcaggatctcctggacaggcagccagaaagctagtaacagcaaagctttgttacctaacatttccttctatttgtgtgcagtacctccccctgtcatgccccgtgtgagggcaaatcaccttcatcgctgaatctttcacctgggcaagtgcaggaggggagccccagatcagctgctcccatccatgtgagttctgctgcgcggatgcaaaaggcacaaagatcccagggacccataggaagcttcacaatggttaccatccacctactgtcagtggccactaccttccgttcattcaaccgtttgggggacagcgatcaagctcttagtgtgtgcgaggctgcgtttgcgggtacagcgggcggagatgacacttcaggtctagtggggaagaacaggtcagcagggggtacccaggaaagatggggagggggtgcccagctccgcctatgggaggaaggtgggctggggggagtggagtctcctccgagaagcccatcctttcccgtgctgctttgcagtttagcatggggcctgcatcaggctctgcactcccacgctggaggccagagattcatgtgaatttccagtcgtgggtcatggccagagcatcctttattctctttcccaaggtcgggctctctgttcaccctcttctgcctctgggagcctctggactcatttcttccctcctgcgctcctcagcgggaagtctccatctccttccttcctgtagattcctcttctccacgagaaagttttagaggcttttccaatcccccaaggcaagactttgaattacctttagttttaggccctgatttatgtgggtttgacaacaggctttaaaaaagtttttttttggtaaaatgcacataaaatgtaccatttgaggtctacagttccgtggcttaaatccatttacactgttgagcaaccatcaccaccacccatctccagaactctttcattccgaagctgaacctgcacccattaggcactcactcccaattcggtccttcccagcccctgcagccactgttctacttcctgtcgctattaatttgactcctctaggtgcctcatctaagcaggatcatacagtatgtgtccttttgtgactggcatatcacactagcatcatgtcctcaaagttcatctgcgttgtaggctgagtcagaatttcatgtatatacgcatgcatacaccacattttctttatcccttcatgtgtcagtggacgtttgggttgtttctacctttagagacaggttttttttgttgttgttgttgttttgtttttgagacagagtcttgctctgtcacccaggctggagcacagttgcatgatctcggctcactgcaacctccgcctcccaggttcaagcaattctcctgccttagcacccccgcccgcctccgagtagctgggattacaggcgcgcatcaccacgcccaactgatttttgtattttagtagagatggggtttcacatgttggccaggttggtctcaaactcttgacctcaagtgatccacccacctcaacctcccagcatgctgggatttcaggcgtgagccaccacgcgcggtctagagacaggattttatgattgagtgaatatacctggatgcctactatgtgcaaggaaagcatgcttctgagaaaaaaagattcattttgcatttttcttttagattttgagaaaaccataccatttagttatagaaaagtatttatcttttgcagcatactttggctgactttgataacactcagactgtattagagatagatgcttgggtctgccactctgaggacacgggtccaagagtgctgccacaacctgcctgtctttcttgcttgcttataaaaatagagatgacaggctgggcatggtggcttatgcctgtaatcccagcgctttgagaggccgaggcaggcggatcacgaggtcaggaaatcgagatcatcatggctaacacgaggaaaccccatctctactaaaagtacaaaaaaaaaattagctgggtgtgggggtgggtgcctgtagtcccagctactcgggaggctgaggcaggagaatggcgtgaacccgggaggcagagcttgcagtgagccgagatcgcaccactgtgctccagcctgggcgacagaacgagactccatcttaaaaataaataagtaaataaataaataaagctccatattttaaaagctcattatagtatttaagtagcagtgatgtttgaatagtcttttcatgccttcccttttactgatttccttgcgaatttgaaattttgactgtcttaagataatttagcacacagaattgagctttacattttaatattttcctgatttaagaggataatttgcttacagctgttcagacctctgatctcaattggtaatgagctacagtaggtatgctatgtggatgagcatgggacagattttaacatacaagttgcaaacccaaacccatgaaagtttctatcacttttatgtcagactgagtttttaactgatgataatgcctgtctgagtattcattttctcaatcaaaatgtattctaatcagttttgaaatcagttttgaaatcagttctatttgctctaaataacatcaacttgttatttttttgtacggacagatacaaaggcagagttcaaatcagcaattccccattgacaaagtattaaggtaaagtggcattctgccataaaggtttatatatatatgtaaaaacctatatatatacacacatatgtatgtaatatataatatatgtgatatatgtaatatgtttattacatatatataaaataggttttaaaacctattatataaactctcttgttaatatataaaccattatttaaccctttaaaaaccctcttttatataataaacattatatatgtaaaaacctatatatacacatatatatgctcatatatgcatacacatgtgtgcatatgaatctttttttttttttttttgagacggagtttttctctgtcactgaggctggagtgcggcggcgtgatctcagctcactgcaacctctgcctcctgggttcaagcaattctctgcctcagcctctcgagtagctgggattacaggtgcccacctccacgcccagctaattttttgtatttttagtagagacagggtttcaccatcttggccaggctgatcttgaacttctgacctcgtgatccaccctcctcggcctcccaatgtgctggaattacaggcatgagccactgcgcccgtccccatatgaatctttaaaattgcaaatgtaattcccattagaatgtaagctccgcagaggaggtcttgttcattttgttcacgagtgcaccccacggcctggaatcacacataaactggcactcagtatttgtggaatgaatgaatccatgagtgtgcaaaggagaaagcacaagttgcttttctgcttaaccccatgtgatgaatggcaccacgtcccactaagatcactctgccctttcccctgccagggtgtctcataatgttccctggggcggctgcactgtcctataatttgtgtaatcaaacaggcacatttaggtgatccccattcccctatatgacaagcagtcctgcagtgtgctcatacctttgtataattgtgcagaaactttcatggaataaatgatgagaagtggagttgttactgacgcacttttggaagtactgtgctgatgcattcctaatgaagctcccttagagttcagaacaacagaatctgaatcactgttgttttcaaacatcggtttttggtggtaccatcagcatcaccactattaggactttcaggtaaaatgtgcagtaaatgaattgaattttggttgctctctgctcccgaatctgcatagtatctgattttgtatggcctgcgagtgaaggatgagtttacgttttaaatgtttgggaccaaaaaaatcaaaaattttacgacatatgaaaattatgtgaaattcacatttctgtgttcttaaaaaaaagttttattggaattaggcaccatgcctattttttttttttttttttttgagatggagtctcgctctgtcgcccaggctagagtgcagtggcgcaatctcagctcactgtcatctctgcctcctgggttcacgtcattctcctgcctcagagacagggtttcactgtgttagccaggatggtctcgatctcctgacctcgtgatcctcccgcctcggcctcccaaagtgctgcgattacaggcgtgagccactgcgcccggccatgcctgactaattttttaaaaatatttttcatagagatggactcttgctgtgttgcccaggttgttctcgaactccagggctcaagtgatcctcctgcctcagcctcccaaagccctgggatgaaggtgggagctgcacgcacctggcctgcttacacatcatctgtggctgctttcaagctacaatagcaaaattgggtccttgtagccaggcacggcggctcacgcctataatcccagcactttgggaggctgaggcaggtggatcacttgaggtcaggcgtttgagaccagcctggccaacatgatgaaaccctgtctctactttatacaaaagttagccaggcgtggtggtgcatgcctgtaatcccagctgctcgggaggctgaggcaagaacattgtaagcctgctggtgcttgaacctgggaggcagaggttgcagtgagccaagatcacaccactgccctccagcctgggtgacagagtgagatgctgtctcagtaaataaataaataaataaaatttaaaaaattgagtccttgcatcagagtctgtctggccccttacacacccctgccgtagaccactgtgtcttccctggccacagcaatgttctcatgatgtgctatggccgccacatccttagctccagcatcgtagagcaagttccctcccacaaagccctacacttcagttctcccctacccccgtcatcattctctccttcatccaaaacaccactctcatcccctcactgctctcaaattgggtgggaggagaaaataaaaacctttcattttgcaagcaggtgatacctggatggcaaatgaatggcaaaagaaattcagactaaggtgtgaatgtctaatagacttggcctttgttctcccacccacctaagaggtcctggcatgtttcaaggagcttgctcatcccccattttctcatagctggtcagaggggagtctttttttaaagggggcataatctttgggggactttcccagttttcccccatggaagactaggaaccaataacttggtaccatgttatttattccttcttcatctataaaatatttaagggaacaaaacgcatatgtggtttactctgcctggtatgcaaaaagagaactcggaggaattgctaataaatgaaaatccaacttcccttgtctcagagtttgctgatgcttccaaaatcatttgagtgaaagacggttgatcagtgtagttggtgattcatgttctgctcacacgtggcatgggcagaagtgtttccatcacagttttaaaattctaggcaagtctggtcatctcctcctgctcttagtatttactgtgaacatcgcaggttactctcttgccagatcactaaattagcagactgattaaataacaccatttcaaaatgctagtttagatattatggttacagcgtgcttgaaaaccctaccccaaagtgcagtaagattgcctcaaaagtataacctgggggaaataaggcattttctccatcgcacatcaattaaatatttccatcacttctctacacacttctaactcgcctaaaattgcttggaggtctgaaaatgaacaacacaagaagacatttcacagtcttaagtattccctggaatgagttcccttttctctcccaaagagctacaggcggtttttatttatttatttattttgagaaatatcagcttctttttagttctattaaagagaagtgaaagaaagctgacaagctttatttatttaactttttttttttttaacttttttgagacagtctcgctctgtcacccaggctggagtgcagttgcgcgatgtcagcttactgcaacctccacctcccgggttcaggcgattctcgtgcctcagcctcccaagtagctaagactacaggcacgcaccaccacgcccggttaatttttttgtagttttagtagataaaggtttcaccacgttggccaggctgatctcaaactcttgacttcaggtgatccgtctgcctcggcctcccaaagtgctgggattacaggcgtgagtcaccgtgcctgaccgcttgcagcttttaagaccctctttaagcacttagagtgctgccatgttatccagaaggaaactcacacatgtaaagaatccaaattatcccatccaggggtatcacgtattgactttcttttccccaagaatttattgtggtctaatttatatagagggaaatgcacacgtttcagtggaacgtctgttgacttttcacgtttgtgtacactgtgtgactaccaccagatcaggctgcacatcacccagccagcctgctggtgcccatatgcaggggagatcctcagtgcccctcaccacgccggcgaagccactatcaacacagaacagaggtcgcctgctcttgaacttcaaataagtggattcacgcagtctgtgctcttttgcatctgtctggcctctttcattcaacataatgttttggagatacactacattgttctttttttttctggatggagtctcactctgtctcccaggctggagtgcagtggtgcgatctcggctcactgcaacctccacctcctgggttcaagcgattctcctgcctcagcctcctgagtagctgggattacaggtgcccgccaccatgctcagctaatttttgtatttttggtagagacagggtttcgccatgttggccaggctgctctcgaactcctgacctcaagtgatctgcccacctcggcctcccaacgtgctgggattacaggtgtaagccaccatgcctggctcggtgtaacttctattgaaaaagatttttctcagcactctgggaggctaatgtgggtggatagcttgaggccagcagtttaagaccaacctgggcaacatagcaagacctccatctctgtttgaaaaagaaaagaagagaaaaagatccacatgtaagtggacctgcacagttccagcatgtattgttcaagggtcctgtgtttgggtactatacacagaggaacaatgtttccgtttgttcaaacacactggactcaggtccctctttctgcaggcccagattctccaaggcaagagtgtgggtaagggaggttgactgagatcacacagtgcagcccccagcatggggcacagagtgcgtgcagcaccagctcaggaaatgtttcctccttgtccttaattaagattatatggaactggcctcttcagaagccacagttcaaaagcaaaccaaatggttttctttaataggggcagctgcatgtaatctgattttcataatcattctccaagtgtacaatgtatgcatagccctggcacgaggcatatgtggggagcatattaagaagcaaagacggcattgatggagaaggagctaagttcatatttctgcatctcattaaattctctctttttattagaaagtggcactttccaatcttgaagttaatatttatgtttgctgctctgcaaagcaatttggaaagtagttttagtgagattaccccagagagaaagctagttatgtaaactccacaggagccaggccaggaaggaggaaagtttttccggtttgatcattgtccttccttcctctcaccttgaaaagaaatacaacttagtccacagccatcaagccagttcttgattgtcatctgtagcacatacaagacaaaaaaatcattacaacagacacaacaattttttttttttttgagacggaatctcactctgttgcacaggctggagtgaagtggtgcaatctcagctcactgcaacctccgcaccctgggttcaagcaactctcctccctcagcattctgagtagctgggattgtaggtgcccgccaccatgcctggctaatttttgtatttttagtagagatggggtttcaccatgttggccaggctggtctgaaactcctggcctcaaatgattggcctgccttggcctcccaaactgctgggattacaggcgcgagccactgcgcctggcccagacacagcaattaaaaaaaaaaaaaaagttctaacctgcatttaataatgatacaggagatagaaagaaattatttagacagatagtgagggtgaaagagtccttgacaagatctctcttctaataaaaagcagcccccaaaattattttttttctaacaaagagcagcctgaaaaatcaagctgcaaacatagataaacatgctaaaaacttacatgggtgaatgcagacagctgtgccaatagaaaagggctacctggggccaggcgtacccaacatgaagactccatctttccttttctgttgttaccacgtatacaataaagaaacgaacaacatgacactggccagacagagaatccatctacataatacataggattggggctgggcgcggtgactcatgcctgtaatcccagcactttgggaggctggggcgggcagatcacctgaggtcaggagtttgagaccagcctggccaacatggtgaaaccccatctctactaaaaatacagaaattagctgtgggtgatgatgcacacctgtagtcccagctacttgggaggttgaagcaggataatcatttgaacccaggagacggaggtttcagtgagccaagattgtgccactgcactctagtctgggcaacaagagcaaaactctgtctcacaaaaacaaacaaacaaaaaaagattagggtgcagacagccaacttttaacaccttatacaaatgatacacctagctctaaccagtttttcacgccttatacaaatggcacacctggcccaaccaatcgtttgtgccctatgcaaatcagacaccaccttctcaaactaatctgtaaaatcccctgacatttcaccatggaaccaacaacgcatttttttgggatttctctctgggcagagagctcttctctgtctttttctttttctttctttctttctttttttttttttttgagatggagtctcgctctgtcgcccaggctggagtgcagtggcgtgatctcggctcactgcaagctccacctcccaggtttacgcaattctcctgcctcagcctcccgagtagctgggactacaggcacctgccaccaggcccagctaattttttgtatttttagtagagacggggtttcaccgtgttagccaggatggtctcgatctcctgacttcgtgatccgcccgcctcagcctcccaaagtgctgggattacaggcatgagccactgtgcctggcctagctcttctctttcacctattaacttccactctaaacctcactctctgtgtgtccatgtcttagttttctgtggctgtgagacaatgaatctcgggtatcaccccagacaaatgaggccacttcaataacacatcatcctatccaagtgtaaacatgaaattcgcttatgtttcatatacaccttgtacacagagtctgaaggtaattttatacaatattttaaataattttgtgcgtgaaacaaagtttatgtacaagagatattacagctgaagggggctggaagggtcttttttcccctggggctgctgaataaactgtgtgttatgtgcctggtgcttcaactgtaacctgtcatgtgaggtcaggtgtggaattttccacttttggcatcacgtcagtgctcagaaatgttcagattttgaaccatttcattagggatgttcgacctgtggctgtttttacttccccattttattttattttattttttttgagatggagtttcactcttgttgcccaggctggagtacaatggcatgatcttagctcactgcaacctctgcctcctgggttcaagtgattcttctgcctcagcctcccgagtagctgggattacaggtgtgcactgccatgtccagctaattttgtatttttagtagagatggggtttcgccctgttggccaggctggtctcgaactcctgacctctggtgatctgcctgcctcagcctcccaaagtgctgggattacaagtgtgagccaccgtgcctggccaccttccccatttgagatgtgagaggtaatccaccctaaccataaattagtttttcatagtgttaaataagaaataaatcatcttagtctctagacaaagaggtgcaaggaaaattgagtgaatgaatgcagtgctttgggtctgagaatacaaaaggtgaacgatgataaactttaccaagaaggccctatttacatgggatttcttagtagcgagtaccacgcttgcatttaacataggattccatctgtatacaaattaggtctataaaatgccaggaaccctccagtaacgcaaagcccaagacagttcctcttacaattaagcaccacttggttgtcactagttctgcttgaaatgtggggccactgttctttcacactgtaatggcatattcaaactgtctctgccatgttcaaattagcaataaccaaatgaaaattgtaaattctgtgtgttcactggcaagccggaaccactgacgaaagcttcaaaaatccattatttcctgggcactcaccagaccccccacagatgcatctctgtgtcttcagcctctggacctcggcttttgcccattcacatcccccatgaggatggctcttgtccattttctctcccagttggtgtttcttctccccttgctctctcctggttagaggctcttcactgggggtccgtggggtgccaagggcagtaggggtgtcaggggggccttccaaagcaggctattgtttgagaatgatgttgcatgtcacgtgtcacacatgtgacattgtgtgtgcttctccagactagagggtctgtcccatgcaccagattctcaaagaggccagagacccctgccctagatgacagtctcaccccaggatacagagagtacccggatctctgttcagccctgctatgtcacaatcccactgagatgtcaataaccacatctcggccaggcacagtggctcacacctatactcccagcattttgggaggctgaggcgggtggatcacctgaggtcaggagtttgagaccagcctggccaacatggtgaaaccctgtctctactaaaattacaaaaattagctgggtttggtggtgggcatctgtaatcccagctacttgggaggctgaggcaggagaatcacctgaacccaggaggcggaggttgcagtgagctgaggtcttgccattgcactccagcctgggcgacaagaatgaaactccatctcaaacaaacaaacaaaaaactaaccacatgctcgatgtttctgtgtcttccctgctggttagtgacatccaaggcaggccacatgagtaagaaccctctgagatcttccacccttcacttccctaacctggaatccagtcattctccaggttttggggctcccaactccaaatgttcattcctctttgtcccccacttccatgtgacactgcctgggtgtgtagcctcagcaccccttttgtcgaattggtctctggctctggggtttcctcgcttggtcctccacactgggtcagttctctcaatggccacctccttccttgcacaagatcaagtgcagactcctgacctgggtgctggagggcagtcctttccatcgcccccgttctcctcacccagattctcaggccacatgggcgggcttgccatggttatggttgactcgtgcgctgcccccatcttggtccatttgcattgctataaaggaacgcctggagctggttaattttttatttttattatttatttatttagagacaaagtctcgctcttgtcccccaggctggagtgcaatggcatgatcttggctcactgcaacctccacctccaggttcaagcgattctcctgcctcagcctccccagtagctgggattataggcgcctgccaccatacctggctaatttttgtatttttagtagagacagggttccaccatgttggccaggctggtctcgaacttgtgacctcaggtgatctgcccgcctcggcctcccaaagtgctgggattacaggcgtgagccaccacgcctggcctatttttatttttttatttttgagatggagtctttctctgttgcccaggctggagtgcaatggcatgatcttggctaactgcaacctccgcctgccgggttcaggtgattctcctgcctcagcctcccgagtagctgggattacaggcatgcatcatgacacccagataatttttgtatttttagtagagacagggtttcaccatgttggccagtctagcctcaaactgctgacatcaggtggactgctggcctcggcctctcaaagtgctgggattgcaggcatgagccaccgtgcccggctgaagctggtaattaataaagaaaagaggttttgtcgctcacggctctgcaggctgcacaagcagcatggcacagcatctgcacgggtgagggccgcaggctgcttctcctggcaaaaggagcagtggagccacatgcacagagattacagggcaagagaggaagcaagaaagtgcgggggacggccagctctcaagggagctaacagagtgcaaactcactcattactatgaggatggcacaaaaccatgagggatcctccccaggacccacacaccccccatcaggcccgactcccaacacgggattgaatttcaatatggggtttagatatttggagtcaaatatccaatacatagcactcccaaaagatgctgaaatcctaatccccagtactgtgactgggacattatttggaggtagggttgtatggaaaaatcaaactgcctttcctcttctctcacaccacaagtgtcaacactcctgtgactcctgtgatgaacgggctgaggatttctccccgccagcaagtcggcactcagttctgcagcggcgccagctgggtgtcccccagtccagttcaattccagcatggtccatctgcagacagcacaagatcccacagggtgagggctcagtcccacaagacagtcaccacttttttttttttttttttgaggcagggtctggctctgttgcccaggctggagtacagtggcatgatcatggctcactgcaacctcgacctcctgggctcaagtgatcctcctagctcagcctcctgagtagctgggaccccaggcatatgccattacacccagctaattttttattttgtacagagggggtcttgccatattgcccaggctggtctcgaattcttagcctcaagtgattctctggcctcagtctcccatagtgttgggctctcaggcatgagccattgcatccagccacctgccaccacttctgatgccagtcacaagccccagctagttctgcctgtgcttctgactggctataaattgagattcttacccccctcaggtttgattagctggagtggctcacaaaactcagggcaacactgacattttctggatgattacaaagggtgttacaaaggcttctgatgaacaccagaggaagagactggtagggcaaggatggaggaggggcattaagcttccttgccctccccaggtgcaccaccctcaggaacctccatgtgtttagctatttggaagcttctccaactctgtcctttcttttttttttttgagactgagtctcactctgtcgaccaggctggagtgcagtggcgtgatctcggctcactgcaacctccacctcctgggttcaagcgattctcctgcctcagcctcccaagtagctgggattacagacatgcaccaccatacctggctaatttttgtatttttagtagtgacggggtttcaccatgttggccaggctgactcctccaactcctgacctcaagcgatccacccaccttggcctcccaaactgctgggattatagacgtgagccaccacgcctggccccccttttgggtttttatggagccttcattggctaagcacaattgaagctggacaaccatgtcgaagtgtgattggacaaaaacagtatgactcaacaccatcagtcagagtggtgaagccccgcaaggcctgtctgtatagcatttcttcctcctgggcgggaggctggactcctcctgaaatgggggtcccgtgaccctcagtcagacaaggcaggtcagagaatttctccacggccagctccaagatggaaaggtgggggaagattcaagtatattttcattttctatggcctgacttggggagaaaaaggagcaggtgaaaggagggaaggagaaagaaggtcagaaagagagagaaactacacctgaagcctgcttccaaagatccaacatgataacacaggactatcgttcccctttattgctctgaagctgtttccacactgcttcaggaaccaaggaaaaaagaacaaatattgtaacaaaagatctgcttattgctatagtcactgaggaaataacaagggtgatgggaattatgagccaggcatggtggaggaaaaccaatgcataaatatcatcatctcacagggtctttgcagatgatgaggtgaagatgaatcaccaggatgggctctaatccaacatgactgtgtccctgtaaagtctagactcacacacacacacacacacacacacacacacacacacacacacacacacacacacacagggcctagtagagacggaggcagagacggggcaatgcttctacaggccgaggaacatggaagatttgctggcaaaccccaggagcctggagagatgcagggaacagatttgcccgtgcagcctccaaatggaaatgaacctagcctacaccttgatttggatttctggcctcctgctgaaatcctaatccccagtacacaggggtattacaaggacacggtcatcttggattacagcccactctggtgacttcatcttcacttgatcatctgtaaagacccttgtgagatgatgatatttatcaattggttttcctccaccgtgcctgcctcataattcccgtagaccttgttatttctctccaaactgtgagagaagacgtttctgttgttctgagccctccagctcatggaactttgtgctggcagccccaagacaccccagtgtcctctccctgtctcttctgcctggtgggtcttctcctcctttactgaaaggaaaagggcatttgatccttgttccaggtcaaatgtcccttccctgcaagcctcctctgcccacagcacttctcccccaccccatccacatggtccctgtccctcctccatgctggccacgctacatggccactgtgtcctgtgcccacgttctccttgaccacaaactcctggaggacaaagctctgtgcccttggtcttcacgcccctggctgaggactgggcctggcaccaacttgaccaacagaaacacgtactgcactggggggactggggggcagccagcacaaagggagacagaaaaaccatctcaacccacacacccagagctgaacccacttctccccaggtgccgtcctctgctgagtgatccaccatggcctggcaggacacccagccttcactcctcctacttctttttttttattttttatttttttttatttttggagacagagtctcgctctgtcacccaggctggagtgcagtagcatgatctctgcccactgcaacttccacctcccgagttcaagcgatccttgtgcctcagcctcccaagtagcagggattacaggcatccaccaccatgccccgataatttttgtatttttagtagagatggggtttcaccatgttggccaggctggtcttgaactcttgacctcaggtgatctgcctgctttggcctcccaaagtgttgggattacaggtgcgagccactgcacctggcctactcctcctacttcttcaaggctggggcttctggctgtgagcatctcagaaatctgtttgcttttctcctaagtcaccgtccgcctgcctgtgccttctctgtctccagcacctgctgagcagccatcagccagaggcaacatctgtgacatcacagctcaaagccctgcctgggtatctaggctgggcatggtggctcacacctataatcccagcactttgggaggccgaggcaggcggatcacctgaggtcaggggttcgagaccagcctggccaacatggcaaaaccgcatctctactaaaaatacaaaaattacccggtcgtggtggcgtgcacctgtaatcccagctactcaggaggctgagacaggagaatcgctttaactcaggaggtggaggttgcagtgagccgagattgtgccactgcactccagcctgggcaacaaagcaagactacgtctaaaaaaataaaataaaataaaacaaaacaaaataaaataaaataaaataaaataaaataaaataaaataaaataaaataaaataaaataaaataaaaatagccctgtctggcagtcctcgggatgaagccgtttcctctgcttccaacacatgcgaggcctgtctcccctcctctcccctccctggcaccccacactgtccccagggcctgctcttctgctcacctcatggtaccggcctgcaagccatttcctggggcctccccgtcgcctcttccagaaacaactcctggaactccccttggaggtcaggccaatgacctgtgccccgcattgccctccatcctctaagcttcccgtgggtagggacaattcccagttctgaagggctccccctgccccgggcctggctcttggcagaagcttaacaacagaccggccacgttcgtgtgacctgattctctccggctttcaggacgtcctgaggctgcacccacgtggcaatggtgtctgtcgcgctgtcgcctggatccggcaccactagcggagccgagcagagcccagggctccaacgcgtagggaaaaggctgcgccgctcccggggtggccccacgccccttctctgagcttgagcggcggcgcgggacggggacggctctgcccgggaccagcaggcctcgggcatccgggacgccggggccgcgctccaggccaggggcgggggcgggaccggggcgggggccggcggcggggccgcgccctcggcctctccccggggcgaccgggcggctccacacgcgctgcgcccgccgccggccccacgcgcggcccatgtcctccgcgccgcgctcgcccaccccgcggccccgcaggatgaagaaggacgagtcgttcctgggcaagctgggcggcaccctggccaggaagcggagggcgcgcgagggtgagtgcgcgcccgcgcccgccgacccccggggacctgcccggcggtgcccgccctcggccctagagccccacgaggccgcccccgccctcccccacgcaccccgcccggcccacgcggctgcgcgaccttcgggacaggccaggcctttgacccaggacccgtaaacaacggccgggacctggcgcgtggggccgcggtggcctccggagtctgccaaacgcgcgtgcgggcgcctgcgcggcggggacctcgggccaccgtgcggggcccgcgcctgctctgcctgccgggtgttcagctcttccctgggccagcggcatagccagccgcgcggggtgaccgttcattccatgagcagtgacgctcacgtgtgcagggcactctgggcagacacggcctgggggacccactactgggtgttgcgcgggcgccctgcagggtgcggggctcagggcgtgcagggctgaggcctgggaggcctgcgagcaagaattgcagagatcccattaaaaatttttttttttaaattttttactgcgtgtgctcacgaaacactaccaacctcgtacgttttaaagattgttagagttgcaagggatagtctggtgtctttaagtgtaccgcttgcccagggcctcctgggagatacattctggaattttctgcttgggtggggaggttctgccccgggaccatgccctatagtgagatttcggattggtgagaggtgaggggagctgctgtggaaaggcagatggagaaaggccggcctcaggtgggtccccgggaaggagccctcccatagcgggtatgcagtacggtttccttaaaccacctgggcctgacatatcccctgggaactcttcctgtgcctccagggattagtgtaccccgggatgcaggtcccccattcatttcttccctgggactcttgtattcctagggatgtgtgtgccccgggaagacatatgacagatttgcctctaggcatgtgtgtgcccccatgcacctgctccccaggatttttgtacagtgcagggaacgcttggttccccagacattttctcccagggatgcctgtgcccccagggatgcgtgtcttcccacccgtgatcctgttccaagagggcagggtcttgtccccttcagtaggtctcctggcggataggtcactcttctctcaagccttacactggaggacccactgtagcttgtattggtcggtgttggtcacgtctcctaaatgacatgattagtggctgtcacccttctatcatccccactgttcttccatgcagtcatcagcaccctcaccagaaatcatttcggttcctctttatggcttgcaacgattatagacgcaagtgacgctcccctcccaattcagcccacagcctgtggagcgcccgccatgggccaggtgctgcttagaccccaggaagaaaagagcgggggcggggtgcttgctttcgtggaacggggaatgaatacatagacaactggcgctgtgatgacgtgccccggagcacatagaacagggcgatcagagccaggggaggcctctgaggaggggacacttgagtggaggccagaaggaaccagaggaaaaagtctttcatagaatggcaaggaaccggaatgttctgggctattgcagctttttctaggtgccgtttacgctctcggaataggaagaacacacacccaaagtaatggactgggcccaaattccaaagtacgcagtgcttctcctccttgcctgtatgaattgatgtgtgtctagaaaattcaggcccagcctggtttaattcaaatgcaccaagaattccggtagcaggaagcatcctgtgctgaatagaacgggcgtggaggcaggaggaggagcaggacgccgggcactgctgatgctgctttcgctgggggtgagctgggcgccctgcctcggttctcagggttggggtgcctggcaaacagagggccacaaaccctccttggatctaggcacaggaattgagggacaggctggattgggaagggtttagcggcttctgtgtggtctcctgggaagtggaagagtcaggaagactggataatgagggcttgaataattgagagtcgctggtatttccgcaagcccatttgccttggcaacatgcgcttctgccactccagggtggagcagcccctggccctgactttgggccgtcagagctatgctcggttgcctaccagggagtgacagggcgcttgggaggtttccacgaccctgcctgctgcaccgtcggcttcatttcctcctttgttagaaagttgagggtggatttgggagaacggatgtggctccgacatgttcctgagttgaggactctaagggaggagggggaagctgggggaaggggcgggctcatcggtgaggttccagattcaggcaggggtgtgacaaggcacggagggacttttgggagggatggttgggatgagtgacgtggcctgttccagaggagaggggttaggaaatgtggggccctggggtttggaggaagcagtgcaggaagtgtctgagaatgagcttcacggcgggcgtgattaaggctgatgtgctacgggaggcgtgtcacgtggtggcctgtgtcagaaaagggaactgtgacgaactgtgggcattcagaaaatggaaaggaacgccggaaacccccagggctccccacagaagctctggggacgtgaaaggacagcgtgtttcaaacttgggttcagctttactggggcttggaggagcccgtgtgcagagaagaccaacaacacacagggttccccactgtgaccatgtgatgagaggccctgtaggtccagtgggccaggatggaggtcggggacagcccagctgctgctggaagtcctcagaggcggatggccggccctggccagtgtggaagaggtcgggtggagtgctccacacatttgccacaagaggcctgttctgtgctgcaccaggcactggacctcaggcgccactgcccagtggccagggtcaggtttctcagagacagctgaaggcagcggggcgagagcagccagtctggaggttctgtccctcttttctgagcaacacattcaggaagtttctatcccctgattaccttaaaaaatatgtatgtgtgggccaggtgaggtggctcacgcctgtaatcccagcactctgggaggccgaggtgggtggatcacctgaggtcgggaattcgagaccagcctggtcaacatggtgaaaccccatctccagtaaaaacgcaaaaattagccgggcatggtggcgtgtgcctgtaatcccagctacttgggaagctgaggcaggagaatcgcttgaacctgggaggtggaggttgcagtgagctgagattgcctcactgcgctgcaggctggtcaacagagtgagactccatatcaaatagaaaaaaaaaccatatatatatatatatatatatattcatgtgtgtgtatatatattcacatatatatattgacgtatatttttaaagcagttttaggtttacagcgaaatctagcaaagaatacaaagtgtccccacctatcccttctcacctccatcagtgccccccggctgtgtggtagagtcgtgagccaacgctgagacatcattatctccgcaagctcatagtttacattaggggttgctcttgccgttggacattctgtggctctggatggatgtagagtgacatggacccaccattacagtcacctctggagcagtgtcactgaccccagaatcctctttctgctgcctatgcatccctccgtttccccaaatccctggcaaccacggatcattttttgtttttgtttttttggtttttgtttttgttttttttactgtatctgtgtttttgccttttccagactatcatctagttgtgatcataaagtgtacagtagcgttttcagattggcttcttccactcaatgatatacattgaaggcccttccatgtcttctcagggcttggtagctcattccttttttgactgaataatattccgttgtctggatgtgccagtttgttgatccattcacctgctgaaggacatcttggttgcttccaagttttggcagttatgaataaagctgctgtgtacatctacgtgtaggtttttgtgtggagataaggttttaattcatttgagctcaattgctggatcgtatggtaagagtgtgtctcgttttggaagaaactgccaaactctcttccaaagtggctgtgccacatttattcaccggtggcgaacgagagtcccggctgctctgcatcctcaccagtatttggtggtgtcagtgttctggattttggaattctgttaggtgtattgtggtgtcttgttgctgtttcaattcgcatttccctgatgaggtatgaagtggagcatctcttcagatgcttatttgccatctgtgtatcttcttcagtgaagtgtctattaaggtcattggctcatttgtattttatttatttttatttttattttatttttgagatagggtctcactgtagcccaggctggagtgcagtggcacgatcctggctcactgcagcctcaatctcctggggctcaagtgatcctcatgcctcagcttctggagtagttgggactacaggcacataccaccatgcccagctaatttttctattttttgtagagatggggtctcgctatgttacccaggctgctctcaaactcctggactcaggagatccacctgccttggcctcccaaagtgctaggattacatgcgtgagccacagtgcccggccttggcctatttttaaatctgcttgtttgtttccttactgttgagttggaagtgttcttcatatattttggatacaagtcatgtgttttgcaaatattttctcccagccagcggcttgtcttccctgtctcttgatcctgatatctcctaagcatttgatgtagagttaatgattaatgagcaagatattgagacctcatcaactagatctaaagaaatcactaggccagacacataatcccagcactttgggaggctgaggcgggtggatcacctaaggccaggagtttgagaccagcctggccaacgtggggaaacccggtctctactaaaaatagaaaaattagccaggcgtggtggctcacgcctgtaatcccagcactttgggaggctgaagcggcagatcacctgaggtcaggagtttgagaccagcctggccaacgtggtgaaaccccatctctactaaaaatacaaaaattagccgggcgtggtggcacacacctgtaatcccagctactcaggaggctgaggcaggagaatcactcgaacccgggaagcagaggttgcagtgagctgagatcgcgccactgcactccagcctgggagacaaagcgagactctgcctcaaaaaaaaaaaagaaagaaaagaaatcactaggtagctgcgacattgaactgaaggttgaaagtattaagtttctttgtggactttaaataaccttcaggagagaaatctcaaagctctaaaccagcaaccgagaatttccttcagggcatccatcttttacacggagccatcagttgtgtagatgatgggttgccccaaaacactaagacgcaccagtgaagggaggggagctgtggcaggggggcctgcactgcccccgcctttccccccagcaacgcctgggctgggagctgggggtgggtgagaccctggctcaggccccactcaggacagtttgagggacaggcagatggggggactgagccatgggggtctcaccacccagacttggggttttgggcctccctggaggaagtggtcctggctgaatgtctaggatggatgtaaattagcccagggagggggagggggctcctgaggagacccccaggcaggctcccagtggctgagcaacggtgcagcctgtgggctgtggccagccctggtcgggggctggagaggtgagcagccctggcgtcccacaaacacaggagcttggaacccttgctggggcttggcaggggtggccgatttcagtggtgctttggggagtggggaatggacggaatgggggaacggcggggaggcaggctggcaggaatgtggcacggggcacaggcagtgccccgaggaggtggcgtgggtgggcgcaggcgtggctgtgatttccacgctgttttctagcgggctgcagcccctctgatgctgaaatgaaaaaggacccagatccttgtttgtgggaggggtgggaaaggatttgcaaggagtgtggtctcttttggacgatttttcagacttcttctcgtttccaggccctctgtgctcacgtgacccctctgatagcgtcagggcccgtagaaaagtggctgtggcatgttgggaaggccagcgggcctcctagccaacgaaaagggggagtggctggtccgaagttgggggatatagacaggtgaggtaccagggccatagtcactgtggtttctatggggaagaggggatggtggaggtcctatttggagctgttgtgttgtgaggctctttacagaccctgccaacaaagagaaagacaattccacactgttatctctaaacccaaacctccttcgagcagaggccgtctccgtttggggatggacagctgttggtccaagaaggaaaggcacagtgaggtcactgcgacgctgcccagcaccttcatgggaaacgctcctcagggtggtgagtggaactccctggagaccattttccagtgagggcctatctctttcctcttgggctgagaggaagtgggtggctcagctacatttcctttgattattattctgactataatcttcaaaccctacatttctcattgtgtgttccgcccatgcgttctgttgtccggggcagcaaagtcgacctgcaccacgtgggtgtttttgttttcttttgttttgttttgttttcttgaaggcctactaagagctgtcggaaactctgcttctgtagaaaaggtaaaggcactgcttggccacaagtgatgactcttccctgcctttcggggcttggggaggaagggcaggttctcggtggttctcctagcaccttggttacaaacctcccagcagagtcagatcaccttggcaaccccacactcatcaaagggactctgccttgattccctccccactgctgtggaattaatatcgattgcacatcctgaaattgcttaccctcgcgctccctgtccagtcgtcagaataattaaggggtgtttattggatgtaagtgggttcatccctgctgcgagtatggattttaagtgctccgttggattgattcctccctgctgtggttggcacagggcaggtacctttaccgagctgttttcttcttttcgaacatgcggttccatcacataaaagacataccctatgaaaatgtctctgccttagctgtacatgttacactttaggtttcaggtgaaaaattggtttatctcctaatatgtctgctatttgttacatcacatagaggctgcaaaacagattaataagctttggaggatattataagcatacgttggcccaatggtattaatttgcttatccatactaattgctgtcttggtaaaagaaggcggacacaatgcaatcaatcctagaagtgttctgtggctttgcaactttgagatacctcaggctgacatattcaaatgagagccttctctctggttacaagaaaaaaatggaatgagcagcagttttggcctcgtccagtctctagggctcccagcatctgggtagtaacatgatcagccctgggaaaccagcggagtcttttacctcctctgatgttctgactaagagtgtctgggccgtggggactgaacgcaccctttgaggctatgtgtgttaaagtttgggggcccatttcttcatttctaatatggggcagtgtgggcagatcccagctctgcgtttctgagctgctgagtttgccctggttctgagaatgcccgtcgcggtggtgcagtccgcctccttgcactggatctgttgcttcttctctctaagcctctgttcctgatggtcccttgtggagcaaagcagcacttgtggtgtaaggaaggaaagcctcatcagcaattgagtgagcgctcaatcagaattcgttatggatgaatgtggatgactggaggcattgacgcagacaccagagtccagagctggtacgtggtacagcagaagtggcaagtcagctcagtttaggacaagtacctaaccctgtgttgagaaggattctgtggctgagtctgggcttagggaaaaagaatgctgggaccagtcagccacactaccagtgtgtatggagggttagttgctgagtggctgtcacccccagaacaggagccttttccagctctagtgctgtgtcatttcagcagcactggctgctttattcccattgagtgccgtgcaacagctagttggctgttggtaacaaaagttgtgtgaatcgtttaagatattgcagtgagaatgttggtatcttaactcttcccctagctgtctgtggctaggaagcatctccagtgctattgtttttttcttgagacagagtcctgctctgttgcctaggctggactgcagtggcatgatctcggctcactgcagcctctgcctcctgggttcaagcgagcacatccagctaattttttatatttttagtaaagacaggatttcatcatgttggccaggctgatctcaaactcctgacctcaactgatccgcccacctcggcctcccaaagtgctgggattacaggagtgagccaccactcccggcccccaatacttttttgaggtatacttggctgagtaactgtttagcgtgtgcagagaagcaggtgtttctgagctggaattccttgtacccagaaatgtgagggcaactcacatgggcaccaggaggcatttttgccttcctcaccagcctacggcatcagagaacatttggcagtctctgagtgggagttctttacgcttgcctgatagtagttggaggcctgctcctttaagctttgccacttgaagtgatgagcttggttttggcctttgaacctttacctgccagccacccacaatcagtcggtaatgttggtttccccaagcaacgccatcttaggaatttctttgcttgttctcttacaaagtcatgcattattatacgtgttttcatttgaaaaattacagttccacaggatctagacttgaatgttaagctattaaaaagttaaagagggagtgaaaatgttagcactcctagggcctgcgtacgttgcttgctcaaatccagacgctcctggaagcagctgtctcagcggagccctgtctgcccttgttgttttctgcttctcaagttactccagactccagggaactagaactgaccaggccccactttaaacatgtggatggagtgcccctgacaaggctggagaaagggggaggtccggggcggggcctcatgcgcatatggtattcagagtttatttttgctataaatggaatttgaagaatatatatatatatatgaacatacaaataaaaatatataaagaatatatgtataaagaatataaagaataattttggaattcattgcattgtgtctgcattcttttactgcaacagcaattataattataattatattataaagaatatatattctttatacatatatatttgagatgggtgtctttatacatatatatgtttgagatgggtgtctttatacatatatatgtttgagatgggtgtctttatacatatatatgtttgagatgggggtctttatacatatatatttgagatgggggtctttatacatatatatatgtttgagatgggggtcttgctgtgttgcccaggctggagtgcagtggctgttcacaggccagatcatcagacactgtagccttgaactcctggcctcaagggatcctcctgccttagcctcctgagtagctgaaacaataggtgcacaccaccatgcccagctcttgagaagcatctggcccatagcttaatttgaagtgtcttcatccctgtcttttttctttttgttttaaaattaatagaattgacccttgaacagcacagggggaaagaggcactgacccccatgcagtcagaaatccacgtgtaacttttttttttttttttttttttgagacggagtttcgctcttgtcactaggctggagtgcagtggtgcaatcttggctcactgcaacccctgcctcccaggttcaagtgattctcctgcctcagcttcccgagtagctgggattacaggcgtgcaccaccacacccagctaatttttgtattattagtagagacagagtttcaccatgttggccaggctggtctcaaactcctggcctcagttgatccgctcacctcagccttccaaagtactggtattacaggcatgaacaactgcacccggccaccatgtgtaacttttgactcccacaaaacttaactagtgatagcctgctgttgactggaagcctcactgataacataaacaattaacaatattttgtatgttctatgcattatgtgctgtattcttactacaaagtgagcctgaggaaagaaaatgttattaggaaaatcataaggaagagaatatgcatttatagtactgtgctgtgtttattgatgctgcacgtttacaacatgcgtttacaagatgaatgctctgaagtggccggcaactgcagctgcagacctcaccctaccatacaacatctcaagctattcagcttcttggaatgtcacgcttttcttcttttctttttccttttttttttttttttttttgagacggagtctcgctctgttgcccaggctggagtgcaatggtgcgatctcggctcactgcagcctccgcctcctgggttcaagcgattctcctgcctcagcctcccaagtagctgggattacaggcatgtgccaccgtgcccggctgatttttttgtatttttagtagaaatggggtttcaccgtggtggccaggatggtctcgatctcctgaccttgtgatccgcctgcctcagcctcccaaagtgctgggattacgggtgtgagccaccgcgcccgtccgtcaaggcttcttgggagcacttacagcaacacaagtggtgctttgtatgagtcccatagtgttattcagggtttacggtattgcactaaacatgatgaaaaatacgtgggaacccaaacagatcacttttttttttttttactatgatatggaatttactggagcggtgaactgctcaagtggagataattaacatcaaataatgttctaagcaatgcaatagcaacaggaggcggctactattacagtggtgcagtatggactgcagttaattttatgcagttattattgaatactgcatcttggctgggtgcagtggctcacgcctgtaatcccagcactttgggaggccgaggcgggcggatcacttaaggtcaggagttcgacaccagcctggccaaatggtgaaaccttgtctctactaaaaagataaaaattaaccaggcgtggtggtgggcacctgtaatcccagctactcaggaagctgaggcaggagaatcacttgaacccaggaggcagacattgcagtgagccaaaatcatgccactgcactccagcctgggtgacagaatgagactgtctcaaaaaaataaaataaatacaataaaataaataaatacataagtactgcatctttacatttgtttacatttctctcaactgtgaacacagtctgtgtgtgtgtgtaagttttgatacattttaactttttatagtagatttgtatgtattttatggtggtaaatgataaaacagatgagtatctacatatattttatgcatttgtcgcatatctaactttttcttaatttttaaaaatatttctgggctacgtggtttgcagttttttcaaattgtcacaaatctccaaaaaattttccaatatgtttattggaaaaaatctgcatgtaagtggactcatataattcaaacctgtgtttttcaagagtcaactgtaatgtctttcaaagtaaaatctaaatgagtttatacttgatatatataagtttaatagaaggagtgcgttggctcatgcctgtaatcccatttctctgcgaggctgagatgggcggatcacttgagctcaggagttcaagaccagcctgggcaacatagagagaacccctttttattaaaaattaaaaaaaaaatcaatcaggcgtggtggtgcacgtctgtggtcccagctacttgggaggctcaggtgggaggctcaggtgggaggctggcttgagcccaggagatcagggctgcagtgaaccatgattgcgccactgcactgcagctgtgtgacagagtgaggccctgcatcaaaataataatcataataaagataatctgagaagtgagggtaaaagttaaaggaagattaaaaacaaaaaaaaaatgcttataatcccagtactttgggaggccaaggcaggaggatcgcttgagcccaggagtttgagactagcctgggcaatatagtgagacctcgtctctgcaaaagaaaacaaaacaacaacaaaaaaagaaaaaacagctgagcatggtggcacatgcctgtagtcccagcctggccaacatggtgaaaccttgtctctaccaaaaatacaaaaattagccaggcatggtggcttttgcttgtagtcccagctactcgggaggctgaggtgggaggatcgcttgagcctgggaggtggaggttgcggtgagctgagatcgtgccactttgctccagcctggatgacagactgagaccctgtctcaaaaaaacaaaaacaaaaacaaatcagaatggagcttataataatcacaccgtagctaagacttgggcactgctgatgtcccaggtgctgtgctagatgcttcctgcattattaccttgtttactcctcacaccaagctgggaagtcggtgttatgtggttattcccattttgcagatgggcaaacacaggcttagagaggatcgaggtcatcctgccagcaggtgagatttaactccaggcagtgtggctcttcattgccgctgaccctgcttaaactggaagaatgattcagatgggagtcatcttcccagctggctcctagtaagctgatgtcattcctggcatttaagctgcacccagccccagtgttaggaagacgcgctagaggagacacattagatcctttttgtgctgaatgaacttgttggtgtttataagaagaagacagaaccctagtggcttcatgctactccaggaccaagtccagattctcgccagccacccagcgcctgtccagcccagcccagcccagctccagctccagctcccaggtcttctcccttggcctggccatggggtcttcgtttgctttctgtgggtcccatgatcttccttggctgaaagccctcacgtcccctgttctctctgatctgacaactctctgccctgttgacttaaatgttgcacctccagcagggtgggggcccctctttgcccattggcaccatcatgtccctgcattcctgtttcaggttgttggcacagttcctgtcttcctggggtgtggtgcattcccatttcactgggagataatgatgaccatttacagtgatctttgtgtatttgcccagcaagcaagaggcagtctagtgtagtggttagggtgactgctcttgaggccagactgcatgggcttgaactgatctttctgggccctggagctgtgaccctggggaaggtacttccccacgctgtgcctcagtttcttcttctgtaaagcctacttaactcatagggtcattagagaattgagtgagttattaaatgaaatgatgtacttaaaactggacctggggccgggcgtggtggctcacacctgtaatcccagcactttggaaggctgaggtgggcggatcacttgaagtcaggagttcaagaccagcttggccaacatggcaaaaccccatctctactaaaaaatacaaaaattagctgggcgtgatggtgtacgcctgtaatcccagctactcgggaggctgaggcaggagaatagcttgaacccaggaggtggacgttgcagtgagctgagatcacgccactgcactccagcctgggcgacagagtgagactccatctcaaaaaccaaaaaacaaaaaacaaaaaagctggacctggtcaagccatcgagtgggagaaaatgtttgcaaaacacatgtttgataaaagactggggtccaggagatggagagaacttccgcaactcaagaataaaaacacagtcaacgcagtaaaagaatagatagataaagggtttgaacagacacgtcaccaaagaagattgacagatagccaatatgcatctggaaaagtgctccccgtcaccagccacctgggaaatgcacatgagaagaacagggaatgccccgcagacccatgggaaaggctggaagatgtggtgagaataggacagctgctactcactcaggctggagggatgtgcagtggtgtggcccctcaggaaatcagcttggtagtttcttttaaaatcaagtaaccatccttcctatgacccagcaattccagtaaatcttagatagatttgctcaacagaagtaggaatctgtggctgagcacggtggctcattcctgtaatcccagcactctgggaggctgaggcggacagatcacctgagctcaggagttcaagaccagtctggccaacatgacgaaacctaaaaatataaaaattagctgggcgtggtggtgcatgcctgtaatcccagctacttgggaggctgaggcaggagaatcacttgaacccgggaggtggaggttgcagtggcagtcaatatcgtgccactgcactccagcctaagcaacagagtgatactctgtcaaaaagaaaaaaaaaaaaaaagtaggaatctgtaagaagactcttgtacaggaatgttcatagcagcttcattcataagagctggtacttggaaacagcttggggaccatcagtaggtgaatggatacacggacagcagtaattgacaggacggaatgatcctgggcagtgtcaaggaacaaggtgccggtacaggaaatcacccgagactctcaaaaccactatgctgagcaaaccaagacagaccaaaagagtacacactgtgtgatttcatttcatttcatttttttcaaagatgagatctcactctgatgcccaggctgaagtgcagtggtgcagtcatagctcactgcagcctcgaactcctggcctccagtgatccttctgcctcagcctcccaaggagcgaggaccacaggtgtgtaccactacaccccgctaatttcacttttacaatgttctacagcagacagagctaatctgtggtggttgcctctggggctgtgggcaggagttgcttggggaggagcaggagggattttctgttgttatgaaaatattctttacagtgagagtggtttgagatacgcaggtgcagcatttgtcaaaactctgcatgtgtactttaaatttgtgcatttcatggcatgtaccttttaactccaaggaaataaaagaactataaataaatactgaactctaattagtgatgtgtgtgattagagggaaaagtactgatgtctgcaacttactttgaaatgtgttaaaaaaacatgatatggtagactgaatagtagtaccaaaaatgtctatattccaatacctggaaactgagaatatgttctcttatgtggtcaaagggaatttgcaggtgtgattaagttaagaaccttgagatggaattagcctgggttatttgggtgggcccagcgtgattaccagggtccttatgagaaggaggcaggagggtcagagtcagagagaagtgacgatggaggtggaagttgcaatgatgtggggccaggagccaaggaatgtgagcagcctctgaaagctgcaaaagccaggaaattgatttcctcctggagcttctagagggaatgcagccctgctgacaccttgattttagccagtgagacccattttggagtcctggcatccggaaccacaagatagaaatttgtgtcgtatggaggccgggcgcggtggctcacgcctgtaatcccagcactttgggaggccgaggtggacggatcatgaggtcaggagatcgagaccacggtgaaaccccgtctctactaaaaatacaaaaaattagccgggcgtggtggcaggcgcctgtagtcccagctactcgagaggctgaggcaggagaatggtgtgaacccggaaggcagagcttgcagtgagccgagatcacgccactgcactccagcctgggcgacagagcaagactctgtctcaaaaaataaaaaaaaaaagaaagaaatttgtgtcgtatgaagtcccacagtttgtgggaattatttccagctgcaattggaaatgaatgctgatggattgctggatagatagagggatggacggatgtggaataaaacaagtatagacaaaggtgggtggtggactgtaggctgtgggtatacaagtgttcacttcaaactttacttggctgggagtgggggcccatgcctgtaatctcagcactttgggaggccgaggcgggtggatcacttgaggtcaggagttcgagaccagtcttgccaacatggtgaaactccatctctacaaaaatacaaaaaattagctgagcacagtgacatatgcctgtggtctcagccacttgggaggctgaggcaggagaatcgcttgaacccgggaggtggaggttgcagtgaactgaaattgtgccactgcactccggccagggtgacagagcaagactccctctcaaaaaataaaataaaataaagttctttagatgtttctatgtgtttgaaacttttaataatgaaatactggggggaaatgactgggcctgatacataataaaagccctacaggccaggcacagtggttcacgcctgtaatctcagcactttaggaggctaaggcaggaggattgcttgagcccaggagtttgagaccagcctaggctacatagtgagaccccctctctaccaaaaaatagaaaaaaatagccaggcgtggtggcccatgcctgtggtcccagctaccccggaggctgagggggagaatggcttgagcatggaaggctgaggctgcagtgagtcgagattgcaccactacattccagcctgggtgacagagcgagaccctgcctcaaaaataaataaataaataaatacatacatacattcatacataccctacataggtgtcagcctttgttctcattggcatctcatctccattcttattgccaccacggccactcccccactttatccatcaggtggagaagaggcctgggaagagaagagaccaggggctgggttggtggtgagcagacgaaataataaacatacaatgaggccatatgacatattgggagaattgctttcacttaagaaaatctaggctgggcgcggtggctcatgcctgtaatcccagcacttttggaggccgaggcaggtggattgcctgaggtcaggagtttgagaccagcctggccaacaagtgaaaccctgtctctactaaaaatacaaaaattagccaggcctggtggtgggtgcctgtaatcccagctgctcaggaggctgaggcgggagaatcgcttgaacccgggtggcggaggttgcggtgagccgagattgtgccacttcactccagcctgggtgacagagcgagactccgaagtgaaggggctggggctttggaactgtagaggctcatctccccagtaagctgtcacttgtgatgtggttacagctgtaggcatttgcagagatgggacgagaagacacgccaccctgggaactggcccgtgtcttcacacgtcctgcactgctgctgctgagaacgtctgcactttgttaggggaagagagtgttttagttaaatttatctggaaaacatattattagtataatgagattttaatgatttgaaattttgttggagcagcgcagggagaatttcaatcttaactgtgtgtgcagctgggcattgtttctattttattttgtttctttgcttgggcctcattgcaaggacatgtttctacaattattatttagtttttctttcctagagccctgctttgttacagctcttaattttcttgtgtagaagatctgctggagaaaaaagaatatcctttttgtaaatacttagctggcttgatcagaaccagagaatgagcgttgttaccgaaggagacttgtgtttgtttaaggtttactggcgcactctgtggttgccgtggagtggacccaacccagatgtccgttaactgatgagtggataagcaaactatgctccatccatacgatagaatactattcagcaacgaaaaggaatgacatatggatccatgctacaacatgggtgaatctggaaaacaggctcagtgagggaagccatttgcaaaaggataaatactgtgtgattccatttatttgaatatctagaataggcaaattgatagagacagaaagtaagattagtggttcccaaagcctggggaaggtacagtgacccctcatgggtacagggattattttgggggtgacgaaaatgttcttacattgacaatggtgatggttacacagctctgtgaatttactaaaaatcattgaattgtacactgatttatttatttatttatttattttgagacggagtcttgctctgtcgcccatgctggagtgcagtggtgcgatctcagctcactgcaagctccgcctcccgggatcacgccattctcctccttggccacccgagtagctgggactacaggtgcccgccaccacgcctggctaattttttgtatttttcgtagagacagggtttcaccatgttggccaggatggtctcaatctcctgaccccgtgatccgtctgcctcagcctcccaaagtgctgggattacaggcgtaagccactgcgcccagccgaattgtacactttaaaacggcaaattgtatggaatgtgaattctgtctcaataaagctggtaaaaaaaatagcgtggtactgagaggcagcgctcagagcttgtgagatgtttttctccagttggtattcgttgcatgtttccaaggtgagatctttcaccttggggtgagggcgggtggatccgggacagacatggaattttcagtcttcctcctcctcctcatcttcctgttcattgcccctgcagtggtggcagctgtcccatatcaaggtctcacactggccaggggctgggcttggtgctgtacgcagattgtcttattaggactatgaggcttttgagataggtatgataatatgtcctcattgagcaagtgacaataggaaacccccagaaattgtgtgcactgttttgcctgatctcacacactttggacagagactttgatcacattcttaggggcccacaaatggtcaaaaacctctgaactgagacagcagcattttttgtggtttttttttttttttttgagatggagtctcgctctgttgtcaaggctggagtgcaatggcccgatctcggctcactgtaagctctgcctcctgggttcacgccattcttctgcctcagcctcccgagtagctgggactacaggcacccgccacagtgcctggctaattttttgtgtttttagtagagacagggtttcaccgtgttagccaggatggtctcgatctcctgacctcgtgatccgcccgcctaggcctcccaaagtgctgggattacaggcgtgagccaccacgcccggcctgttttgtatttttgagatggaatctcgctctgtcgcccaggctggagtgcagtggcatgatcttggctcactgcaacctctgcctcccgggttcaagtgattttcatgcctcagcctctagagtagcttggactacaggcatgcaccaccacacccagctgatttttgtatttttagtagagacggggttttaccatgttggccaggtgggtctcaaactcctgacctcaagtgatccacctgccttggcctcccaatgtgctgggattacaggcatgagccactgtgcttggcttgggagagcaacttttaaactctctttttattttggatccatggtaagaaatatatttccataaaaaccccagttcaagcatacatttacctatatccatgaataaaagtttcatgaaatgatatcttcctataagcacactgacgtttgctactctactgttctttcatttcattaaagaaacgtgctgtccaggcaatctcagtactttgggaggccgaggcaggaggattgcttgagcccggtggtttgagaccagcctggtcaacatagcaagaccccatctctacaaaaaataaaattagtctggcgttgtgttgtgtgcctgtggtcccagccacaggtgcccctgcaggggcagggggctttcaggtgggaggatcgcttgagcccaggagtttgaggctgcagtgagttatgattgcaccactgcactccagcctgggtgacaaagagagagtctctgtctaaataaataaataaataaatacatacataaaatatgctagtcacagtttcctaaatggattttatgactcattgagtcaaaatgatagttttaaaatgttgctaagagagatgtaaggaggaaaatgtgttggtgagtgttgaggagcccaacttcttttgagaaatcattgttggatctggtgtctcatgtgttaccctggggtttcaactcctgtttgctcattcagttattcattgatcaccctgtcttccaggcatgcagtcattcattcaaggtgattattgagctccccttgagagcaggtatggggctgggggttggagatccagtgagtggtcctgcttgagagactggccctgcccacatggcactagtgggctgggactctcccatcactcttgtctccatcttgttgtgcactgttgatgctccattgaatgatcttggcatctttgctgaaaatcagttgatcatcaatgtatggatttatttctgagctttcaattctattatgttgatcaacaggtctgtctttatgttagtactacactgtctctatcactgtagctttgcagtacgttttgaaattggcaaatatgacacttcccactttgttcttcaaccttgtgttggctatttgggatccctcgagattccgtatgagttttagggcgtgattttctatttctgcaacgagccaccattggaattttgggaggaattgtactgaatttgagaattgctttgggtagtatctttaacaacacgaagtctgccagtccatgaacataggatgtctttccacttccttaagtcttctttaatttcccttcgcaatgttttgtggttttcagggtacgagtctcttgcctctccaggcagatttatccctgggtggcttatgctttcggatgctgttgtcagtgggattgttgtccttgccagtggtcgctgagcccagctgcagccttgtcttgcactgcagggtgtctgtgtcacctacttgcctagttctggccacttttcttgcaggaagtcagaagtgtactgatctggagtaggacccttagcacaacagagctgctccttggtgctaggagatgcgtcctgaggctggccatccatgtcagaggacctggcgcctcaccctcatcatgggatatcactgaccaccagtgggggatgcatctctgctgggcttggcctgcaaggtaggagctgactgcaggagtgggaaagagcccatggcccctgagggggcctacagttggctctcctgtggttacttggcatgtttgatagacgcctgggtctggcacagagaacactgcccgctgacaatcattgagcctcggcaggctggccccgatgacatgttatctccccacacagtccctggacacacttgattaaaggtgcttattactttcatagtgttggctggagtgatgtgataactccacaaaaggttctggcagaatcccagaccttggggtgttcccaccagtgtctctgtgttcaaagttcagcacagtgtggggtggcaggagatgggaacttggagactgaggccagagtctgctgacttgagcctctgctgaggtccttatcagtgccgggagagcagcagcctaatctcaagatggtttagaggatttagcgggggcgtgcatgcagagttgagaactggctcctgggtcggtgtgcggggggtggggatggcccgggggccgtagctacagtttgtcttccttcccccaccggcagaggtgaagagaggtgttttgtcctggagccaccaggcctatccatggaggagcagagcttcacatggagcctgtgccccgtcttagtctatttcgtgttgctataaaggaacactaaggctggctaatgcataaagaaaagaggtttacttggctcctgtttctgcaggctgtacgtggcactggcatctggttctggggaggcctcaggggcttctcctcatagtggaaggtgaagagggagcaagaaagggagaggaaggaggtgccatgctcttttctaagaaaacagaaacacagctgcattattttaagcaaaacacatattggcttaggtcgctgtattcatctcccagggctgtggcaccaaggcaccagacactgggtggctctttgggaggccaaggcaggcagatcacttgaggtcaggagttggaggccaggctggtcaacatggcgaaaccccatctctactgaaaataccaaaattagccgggcatggtggcatgaacctgtaatcccagctatttgggaggctgaggcaggagaatcacttgaacccaggaggcggagtttgcagtgagctgaaattgtactattgcactccagcttgggcaactgagccagactccatctaaaaaaaataaaaaataaaaaacccagcagaagtggattctctcacagttatggaagccacaagcttctaggggttagaattccaacatatctttttttggggaaagaggggcataattccccatagaagagcctgtaatctcagggagccttgacccaggtatttgacgttggtgtaatctacttgtgtatgtgtattggtggacaaaggggatggcctcacatcccttcagcatcttgggggtgggcggtgcctcccctccggctcccctgagtcagccccggggaagaccaattgtggggctggatggtgtgggaacccccagctccgtcctgtctccagccatcagtgaggtgtgcttggccattccccacaggaccagtgggcgggatggggcagctttgcagttggagaggatgggggttcaggcaggcagaacagatgcgcggacacagaagagctgtgcagaatgtggagttgagcttcctggaaggcccataggagaggcgagactgaaatcttcttgatactttttcactggggcctgaaagcctggtgcagaatgaaactgaaagcacttgtctcgttgagcaaatcattcaactttgttatttctgtaattgaaataattcctggcattaattatgtggagagcactcatgaccatgtggacatatcttttgggggcacatgaactgagggtaataatttcgctcgaattttttttttgagatggagtcctgctgtgtcgcccaggctggagtgcagtggcgtgatctcggctcactgcaacctccacctcctgggttccagcaattttcctgctctagcttccccagtagctgggattacaggtgcccaccaccatgcccggataatttttatattttttaattttatttttatttatttattttttgagacggagtcttgctctgtcactcaggctggagtgcagtggcacaatctcagctcactgtaacctccgcctccaggcttcaagcgattctcctgcctcagcctcccaagtagctgggatgacaggagtccgccaccatgcctggctaatctttgtatttttagtagagacagggtttcaccatgttggtcaggctggtctcaaactcctgacctcatgatccgcctgcctcggcctctcaaagtgctgggattacaggcatgagccactgtgcctggcctaatttttgtactttaggtgggatttcatcatgttggccaggctagtctcgagctactgatctcaggtgatctgtccactttggcctcctaaaatgctgggattacaggtgtgaaccactgcgcctggcctatttcactccattttgccgaggagggaacagaagtgtggagtcctcccagccacatggcctcggatccgggctgcaggtccaggctttccggctccagggctggtgccctctgtcctgtgccacttcccctgcaaaatgagatgaaaatgagtctcattttacgatgaggaaactgaggccctgagagagggtgagaaaccaggtctctggctgaatgcacctctcactgaagacatctccgggtggaaatgttctgagagctgctgtgtgtgctggtgtcagaatgaacaatacccatagtgcttggcgtagacaatcagcaaagctagggacccgttttctcctcccagccccctttctcacttcaggccctagacaagaatcggaggtccgtttctcaagtttagctcctgtctgattaaatttgaggttcgtttctcaagtttagctcttgtctgattaaatttggatttgctccactctttttcacgggcataaaaatatctgcggagtgaaaatgtgtgcagaggatgcactgcgtgcaggctgcggctcgaggtcaatcagattcctccagcgataaaaggcctgctgaggaagcggccccactcccagcacagccccattgattggcttttattttcctctgttgctggagtgatccaatttgaagccctgtttctgagcatgttgcaaggaaccctaggggctgccatagccctggagatactggctggaaatcaaattcaaattggtgctttcttcctattaaagcaggagacctctgtccgggaacgggccatttgggggctcagccatctggcacatggagtgagtaggttttattgccaaagccgtcccggccttggcctcagcctctgtgtggctctggtggggagtgtgtctcgatgttgtactgtgaataagccccatgcctacttgagtttggggtttctgttttacctacacttccatattgtgggcatgtggctgcggaaatgtgcctgcacctggactcgctgtcactcactggcttctcgtggtacagcctagggagggttgccccagccgtatttagttcttcctgcctcagatgaacgggcctcctctcccagctcctaatcaggagggcagagtctcgttggcggctctcctgtcctgctgccactgcctttacacttcttcagatatgcggccgtcttaaggtgtaaatgccttcctctgtttcccagtggttatctaaagcaaggattggcaaacagaatccacaccatagatttgaggtatgtttgttgtcctctttccttcttaaactgttagtaaacaagacattcctacaggtgacccctttcggcctttttttttttttaagactgagtttcgctcttgttgcccaggctggagtgcaatggcgccatctcagctcactgcaacctccgcctcccgggttcaagtgattctcctgcctcagcttcccaagtagctgggattacaggtgcctgccaccatgctaattttgtatttttagtagagatggggtttctccatgttggtcaggctggtctcgaactcctgaccccaggtgatcctcccacctcagcctcctaaagtgctgggactacaggtgtgagccactgcgcctggccagtcctgcactcttcaagtttctatgtgttgcagactggtggggtagcaatatcagttagagagacaggactggggtcacttgtcccctgttagctcagtgaccttgagctcagcttagacacattgtctctgaacactgtgctgatggcaacacctctctcacctgtcttgcagtcttatttgaggaattaaatgcaataacctgggagaaagtgcaggtatgaagtcagggcacacagcccgtcaccaggagcttgaaggaggagaagagtgggtggggatgtgagcacagaagctgaggcgggggctgagccgggtgtgtatttctgcctgtgccacagggacacccctttcaggcactgggcgcctagctcctgttgtctcatctcctaagagagtctcgggaggcctgagactccctcactgctgtgggcttcaagagcagcatctgtgctgagtaacagccatgggggcagaagcagagatctcccgtgacagagtagttaggcagccgtaaaaatcctaccaccagctcgtggaaaaggtctcatttgacaggtgccatgccgtcaaagacttgtgctctgcagctgcaaattcccaactgaaaaatatcaacaattcttacgaagagagaaggggagccctgcaaagctgttgtgtcaccccgtctgtttgtaggcgctggggggattgatgatgaggtggggactgttcggctggccacactgccattgtagatagcctgtgactctgtggctggcgcctggctggcctcagtgaagcccttcagtcccagctctgaccatgtctctgtggagagacaagcaggtgatagtgttgggtgggcaaggctgtgctggtggcctgcttagcaacagcaggaaaaggaaggagataaccaccccaacctttcttgctggaaggagcccttcctgttgtcggcgctgtgtgtaaccaatgaggcgaatgccgggaagcgcttggtttgtgtcaatgaggggagaggattgtgcagaagtgcaggaagggaccatgggaggaaattgagtgaaggtctctgttaggggtttgtgttcccctaaaaggtatgtccaggtcctagtctccagcccttgggactgtcaccttatttggaaatagggtctttgcagatgtgcttaagacgaggcctgtctgaagtagggtgggcccctaattcaatgtgactggggcctttatggggagaggaggcaggacacagacagacacgggacacagaggctggacagagattggagagatgctgccacaagccaagatgcaccgaggactgatggccaccaccagaaactgggaagaggccaggacggatcctcgcctggagccctcagtgagagcacggctctgccgacaccttgatctcagacttctggcctccagaactgggagagaatcgacgtctgttgttttaagctgccagtttgaggtactttgttaaggtggccacaggatgcgaatacagtcaccatctggcctttgatcttctaattgcctcggcggttctcctgccagtaagggttgtgagtgaaacttgaaggtcacagttggaaatcaagttaaaagaattaagctggaagtgcaacatgagagtccgtcaccctgagaggcggtgtgaatgccaaacacaggcaggcagggctggacctgcataaattgtggttcgacagcaccgggagaaagaaggcccgggcctgctctcctcacctgattctgggaatgccgaacctacctgtgttcctgatatcaccccagtgctaacttcccaccccttgaaaatatcaaaacattgtgttatgaatgttcttcattgagcaactgcgatctctttctgtaaagatccagagaatatttcagcctctgtgagccatcctgcctctgtaggaatgaatcaactctgccttggaagcatgaaagcccctatagacagttcataagcatagccgtggctgcgtccccctgaagctacaaaagtaggtggggggctgggtgtggtggctcatgcctgtaatcccagcactttgggaggctgaggcaggcggattgcttgagcccaggagttcaagaccagcctgagcaacatagcaagaccctgtctctacaacaaatacaaaaattagttgggtgtgttggtgcgcacctgtagtctcagctacttgggaggctgaggtgggaagatcccttgagctcaggaggttgaggccacagtgaactgtgattgtgccactgcaccccagcctgggagacagagcaaagccctatctcaaaaaacaaaacaaaacaaaacaaaacacccaaaaagacaggtggtgggccagatttgctcactggctgcagtttgccaatctatggtttaaaccaacaatttaaataacacacacacatctttgtatgatgttacacatcttttttttttttttttttgagatggagtcttgctctgtctcccaggctggagtgcattagtgtgatctcggctcactgcaacctctgcctcctgggttcaagcaattccccttcctcagcctcccgagtagctgggattagaggcatacaccacctcgcccagctaatttttgtatttttagtagagacagggtttcaccatgttggccaggatggtctcgaactcctgccctcatgatccgccctccttggcttcccaaagtgctgggattacaggcatgagccaccgcgcccagcctgatgttacattttctagaagttctcagtgatgggcatttaaaggattcggctgctgctccctgtggctttcacagcgctgccctgaatgggtgttagggcaccgtacaggtagcggggatgcctgggaaagcccagactcacagcaacacaacaacagttaacagactccagtgaccaaatgtgtgggtttttcctgcaccaactggcggataccagctggatgtcccctagttcaattcaattcagttctgactccacctacctggagatggcatcagatcccacagggtgagggctcagtctcccaagactctgaacagtggctgtaagtcagggttcccacagccccatctttgggttcaattaatttgctagggtgactcacagaactcggggaaacatttacttatatttcctggtttattataaaggatattacaaaggatacagatgaggagatacatagggtgaggtgtagggaaaggggtgcagagcttccatgccctctctgggcgtgccactttgccaaaaccaagcatccagtctctggaagctccctgaatcctgccttcctgggccttttatggagcctcattggatatgcacgattgacagccatgtagaaataggattggacagcaagggtgtgatctaacactaacagatggactggggaggccctgcaagacctatctgtgcagccttccttcctccaaggtgtgggggcccctctctggagtgagggtctcattacttacaatctgatgagagtcctgccttgggcaggtgaaaggagggcagaaggttagagagattctgttttctgaggctaaagtgccccaacatcttttattattattattatttttgagacagggctggagtacagtgatgcaatcttggctcactgcaacctcacctctcgggctcaagtgatcctcccacctcagcctccctagtagcaggcactacagccgcgcactacaacgcttggctaacttttaaattcttttgtaaacacaaggtcttgctatgttgcccaggctggtctcgaactcctgggctcaagcaatcctcccgccttggcctcccaaagtgctcagattacagcatgagctcctcagctagaagagttaaactcatagagagaggaagtggaatggcagttgccaggggcaggggttgggggctgggcagggaggggacagggagttagtgtttctgccttgcaagaagaaaagagtttggcggataacagcgatggtggcacagcagtgaatgtccttagtgccactgaaccgtacacttaaaaatggttaaagtagccgggtgcggtggctcacacctgtaatcccagcactttgggaagtcgaggtgggcaggtcacctgaggtcaggagtcttgagaccagcctggccaacatggtgaaactccctctctactaaaactacaaaaattagccgggtgtggtggtgggcgcctgtaatcccagctgctcgggaggctgaggcaggagaatcacttgaacccaggaggcagaggttgccgtgagccgagattgcgccattgcactccagcctgggcgacaagagtgaaactccatctcaaaaaaaaaaaaaaaaaaaaaggttaaagtgagaaattttatgtattttatgttaaatgtaccttactacaattgaaagaatgaaaaaaaaatactgggaaatacattacacatacaaaagagtgtacatatgtatagtttactgactaatattaaggaagtacccacgttcctgctatccagcttaagaaataacattacctgttccccgagccatatgccccgtacctcctgtgcgcctccctccccaccagaggtgaccagtgccgccttgaacgttgcatttagcatgttgtattagttagagttctctggagaaacagaaccaatgggagatatgtagctctctctgtctctttttttttttgagacagagtctcactctgtcgccaggctggaatggtgtgatctcggctcagtgcaacctctgactccctggttcaagcagttctcctgcctcagcctccccagtagctgagattacaggcactggccaccacacccggctaatttttgtatttttagtagacacggggtttcaccatgttggccaggatgatctcgatctcctgacctcgtgatccgcccgcctcggcctcccaaagtgctgggattacaggcgtgagccaccgcgcccagcctgtctctctgtctgtctctatccatctctctctctctctctctctatatatatatatatatttgaagagattgattataagttattggctcatgtggttacgagactgagaaatcccaggatcttcaagctggagacccaggagggccaatggcgtcagcccaagtgcgggaggagacccacgtcccagctgagtgaatccccttaccctgcctttcggtctattcaggtgtcaaatggattggccgaggcctatccgcactggggagggccatctgttgtacccagtctaccgattcgaatgctaacctcatctagaaacaccttcacaggcacgcccagaataatggttagccaagcaccaggccgctccccacccagtccaggcagctagtcagcaggccctgccccacttgcttgtctttccttgcgttttgcacacgcatgcatctctgtccctcactttctttagttttgcccgactttgaccccaatatgacgggagccccaccgtgcgtgctgtcctatgactcgagtttacgcagtagcctagctttggggcacagccccatttactcggggcaccgctgcctctgctgtgtggccgtgtgggatcccacaccaggagcaccgtccctttgtcacctgggaggggtgattctgtgcctgagttgcatgtggatttcctcctgctgagttttaattaagaggcagggagcaggtgggtgaagggcacacacacggatgcagcgttgcccgggttcgaattctgcctgcgccatttcctgcctgctgaaccagatcggacaaattactctacctctctgtgccacagattttttgttgttgttgttgttttgttttcattttgtctcgttttgtttttgtttttgagacaggttctccctctgtcacccaggctggtgtacagtggtgcaatcacggctcactatagcctcgaccctgtgggcttaagcaatcctcccacctcagcctcctgagtagctgggacgacaggcgtgcacagccacacctggctaattttttaattatttgttgagatggggtttcactatgttgcccagggtggcctcgaacccctgggctcaagtgatcctcctgcctcagcttcccaaagtgctgggattaagtgtgagccacctcatctggcctttgtgccccagttttctcaatcaggtaatgatgatagctctcaggtggtgagggtgactgtataaaatgtctggaaatggcacctgctctgtgcccaggggttagaggcttgggaccgagctgggggctgagctgggggtggagctgggggctgagctgggggtggagctgggggctgagctgggggtggagctgggggctgagctgggggcgtttttgttccaaggctttcttgctgataagtttctctttctctctctctcttttttttttgtcctgcgtgtctcaacctgacaaaaatgctcagtttagaagcgtgtcgttccatttgtgggaaaattaaacacatttaagagtaaattaaattaggggacttgtgatcattagctaagtaaattattttttaaaaatgtgatgtaccaagcatagcacatgtggcacgctcaataaatatttgttagaatgaatgataattttatgagccagtcgagtcatatataatgggattatttggttctagaactaatgaagtgactgtagagcaataaagcttctaaaaagaatctccgtgctcgcaaaaaatccaaaagtgggggaagaggctcatgctggatttcacccaagagcgaggcccgaggagagctgggacgctgtgtcctgagagctgtccaaggggggcccttgtgacttggcaggggtggttttggagcctgagtttatccgcactctgggtggactgggtctcgggggaggcctgccttaggtcagctcaggagaccagtggatatagcaggaggcccacttgcagttcacggtttgtcttgccagatgtgcagggggcccggtgtctcagcacttggcacctgtgggactgagagaggagtcagtctagcaccagacacccgcttggtgggggaggggagtggaagaggagggagaggagagagagggggctggagccccagtcccacagcttaggtcctgggaagccctgtgggttcatgcttgccttgaggggaggttggacggctcaagcagggaccaggagcctcccagtgtggcatgagctttgctggaagcctgggctctttgagaggggtggggctgagagccgctagacctggcttcatcctcctgcctgctttcctgtctggggtgtaccctgggaagggacataacttccctgaacctcggttgcctcccctgtccagtggaggaaaggaaggcacctgcctaactgggctcttgaaaataataaattgagataatacaaaatctgcattaatttcctaggcctgacataaaagagtaccccacactggctggcttacagagcagaagtttattctctcccagctctgaagaccagaagtccaagatcaaggtgtcagcagggccttgctccatctaaagtctccagggagggatccttcctgactctcttggcttctggggacggtgggcagtcctggcatatcttgatttgtggccatgtcactccagtcagcctccattgtcacaggtgtcccccttcatgcccctctgtgtcttcctatggtcttctctctgcatgtcagcatccaaatttctctctcccatgtggacaccagctgggcccaccgcagtccagtatgacctcatccgaacttgattacatctgcaaagaccctgtttccaaataaggcacattctccagttgtccaattccaggtggacgtggattttttttttttttttttttttgagatggagtctcactctgtagcccaggctggagtgcaatggcacgatcttggctccctgcaacctcctcctcccgagttcaagcgactctcctgcctcagcctcctgagtagctgggattacaggcacctgccaccacacctggctaatttttgtatttttagtaaaaatggggtttcactctgttgcgcagggtggtcttgaacccctgagctcaggcaatccacctgcctcagcctcccaaagtgctgggattacaggcatgagcctctgcgcccatcggacgtggattttggatgagacaccattcaacccacagtacctggtgctcagttagtgactaaaacccactagttatggtcactcagtcacccttcttgttattactttcatagatgagggtgtgatggggggggaaacagaagcagagttgattgtatcttcttagttctgcacaccctgtggctttttttttttttttttttttctgagagggagtcttgctgtgttgcccaggctggagtgcagtggcacgatctcaggtcactacaacctctgcttctcacatttaagcgattcttctgcctcagcctcctgaatagcgggcattacagacatccgccaccacacccagctaatttttgtatgtttagtagagacggggtttcacaatgttggccaggctggtcacgaactcctggcatcaagtgatccacccccctcagcctcccaaagtgctgggattacagacatgagcctctgtgcccagccccgtggctagttattagactgttctaggtcttgatgggaaaggggaggaggacttgttcttctctttggattaataaaacaccgtgaggcttgtgtttgcacagtgcccacagcttgcacactgacaagcccttttaggttgacttctgctgagtcatttcatcctgttccatttgtcagccataaggtaaggagcagtttttctgatgtactccttttgcataaatgctactctccatcagcctcgagaagtagaaggcaccggtatggtatcccaagctcattcacaggggagaagagatgcctgttgccacaaaatgtgaatgttgggtgtacattcaggtgtcacgtacgtggtgttgattgtctcagcttaataaagaaagatgccgtacacattttcctttaaaaagtctcacttggcttgtttgacaggcacagaagatgtgttattaaacacttgcaaagcctgctgtcatttggttttaaacagcactcgtcgtctttggcggggcgtgtttgctcagcatcatggaagggggatgtgaggtacccaggtggcagtttctctaccacgatgctttctctgcttgctatcgggagaaatgttctttcctatgttgtgggaaggcggaaagggcactctgaaatgtaaggtggccttttgtattagaatttcatggctgagaccaggcgtgggggctcatgtctgtcatcctagcactttggaaggccaaggcaggtggatcacctgaggtcaggagtttgagaccagcctggccaacatggtaaaatgccatctctactaaaaatacaaaaaattagctgggtgtggtggcagccacctgtaatcccagctacttgggaggctgaggcaggagaatcacttgaacccaggaggtggaggttgcagtgagctgagattctgccactgcactccagcctgggcaacagagagagactctttctaaaaaaaagaaaagaaaagaatttcatggttgattgtcacaggaccatctttagtcccaagatctgaggcaagggaatcgttttcaataggaaacttttaaatgtttgagcagcagaaagggagattgagccagaagaacttgctggtggaaagatggtggaagctgggagctttgaggttctaaaaatcctggtgtgtcaggtcaggtagtggggcaaccggagcttagggtgagttatacctgatgggacttaactgggtaaatgtcatctagtaacccaactacattaggcattaatatctggacaaaaggtggaatacacccgggttctttgggcacaggcgaaggagaggtctcatagtttgatgttgctcaagaagggaaaacaagcaggatgggaagaggtctaatcagccggctggagtggggtgctgggtttagttcattccttcttaaactcagccagttctcattattcatggtggttttgatctataaagttgccacaaaccccaagttagccaatactgagccatcactcctagggcagtacagcgctcggttcctgcgagcctctggtcacaacattttcagcaacagatccatacataactttttcttatatatgtttctttttaaagatacgttatttaaaatgtattgttgattgattaacattgagctcacggccaacagcagtttaagtgctgcctgaatgaagcttctctgacctgtgcgttctctgcaaggcatacctcagccttcttgcacttgggaacactaggagtacccctcgccacgcgtggggacccattttaaacagcaaagttggctgggcacggtgactcatgcctgtaatcccagcactttgggaggccgaggcaggcagatcacctgaggtcaggagttcgagaccagcctagctaacatggggaagcccagtctctactaaaagtacaaaaaaattagctgggcatggtggtgtgcttctgtaatcccacctattcaggaggctgaggctggagaattgcttgaacccaggaggcagaggttgcagtgagccgaagtcacgtcactgtactccagcctgggcatcagagcaagacttcatctcaaaaacaaaacaaaacaaaacaaaacaaaccaaaacagtgaagtcaccaacaaatagcagaaaaatgtgaaaaacatggcattaaatagaccatgaaatggacacttgtttatgatgtgagacctcagacaagaaggcagagcgccccgtgtttgacctcaggtggggacacatccggcaactcagattcttttttttttgagtggagtctcactgcgtcacccaggctggagtgcagtggtgcaatctcggctcactgcaacctctgcctcctgggttcaagcaattctccagcctcagcctcccgagtagctgagactataggtgcgcactaccacacccagctaatttttgtatctttagtagagacggggtttcaccatattggtcaggctggtctcgaactcctgacctcaggcgatccacccgctttggcctcccgaagtgctgggattacaggtgtgagccaccacacccagtcagattctttgcttctgtgtgcaggtctgtgaatgaatgtaggccaagagtattgattctgagcttacaaattttagccagtagacacatttacacatacagaatccatgaatcaaggcgattgactgtactttgacaattatttgtttagcactgtaggaggaacctgcaaactgttccttccctctgctcacatactgcccagggtaagacttctgacaccagaggtgcagggatgcttcctgccgcacctggcagttctccagcagacaccagctgggtgtcctgcagttcagttcaattctgacacaatcgacctggagacagcctcagaccccacaggtgagggctcagccccacgagactgcaccccaaatcagggtccccacgactgcttcctcggttttgattaatttgctgggactcagaacttggaaatgggccaggcacggtggctcaagcctgtaaccccagcactttgggaggccaaggcaggtggattgcttgaggtcaggagttcgagaccaaccgggccaacgtagtgaaaccccatctctactaaaaatacaaaaattggttgggcatggtggtgggcactgtaatcccagctactcgggagactgaggcaggagaattgcttgaacctgggaggtggtgattgcagtgagctgagatcgcaccactgcactccagcctgagcaacaagagcaaaaccctgtctggaaaaaaaaaaaaaagaactcagggaaacactgcatttgtgctccctggtctattataaaggagatgataaagggtgcaggtgagcagaacaggaggaggcacacagggtgaggcctgggagggcccccagcacaggagcttctgttgccctggagttggggtgtgccaccctcctggcacctggatgtgtttacccacccggaagctctctgcaccctgtagttcagggatttttacggaggcttcatcatgtaggcatgtctggttattagttcaatctccagcccctctcccctttctggagggtggggttggggggtgtggagctgaaagctccaggcttctaattgtgtctgggtctttctggtgctcagcccccacccaggagccaccaagagtcacctcattagaataaaacatccttttatctccctggaaattccaagggattaggaactttgtgtcaggaaccagggtcaaagactaaatattagaacaaaagattgtcctggcacctggaaattacaaggttcttaggatctgtgtgccagggactggtggcagagaccaatatgaatatttcttttcttttcttttttttttttttgagatggagtctcggtctgtcacccaggctggagtgcagtggtgtgatctcagcttactgcaacctccgcctcccgggttcaagtgattctcctgcctcagcctcctgagtagctgggactacaggtgtgcaccatcatgctgggctaatttttgtatttttattagagacggggtttcactatgttggccaggctggtctcaaactcctgacctcaggtgatccacctgtcttggcctcccaaagtactgggattacaggcgtgagccaccgcgcctggcccaatatgaatatttcttattattttacaagcacttgcggtgtgtcctgtggtctccgtcctcagcgtcgtggtttagagggtgcctgacaggcagggtgtggggttagtggggttggggagtgatttccggggcacagtgatccccagagtatgtgtggttgtccagttcactcactcctcgtggcctgctcggtgctgggggtccacactcacagagggcatggtctgtgccccttgggatcaggcagctgctcctggtacagatgagttgggagatgacttcctccagggcatgtgagaagctctcaatgaccaggccagctcggattcccagttctggccgagccgatgtgctctctgttgccacattccgtgtcacttcccaggcctccccggcttcccattctcggggccaggtgttccgtggatggggtgcggtgcggcctttgataccagaggcctgggatcgctttcctcctcggtttctgtgtggtcagtggcgccttcacctgtctcatgccctgccatgctgccatgcaagggcagagggctggtgttggggtggtgctggggcctggggagtggaatatcctgctctgttaagatgctggggatcgcatgtgtgatgctggccacgtcagccagtcttccttcctgccgagaccaccagccctcggtgcagccagccgtatcacctggttatagtcacgccgaaacccagctgtttggaagcgtggccgtggggccttggatcccttttcctttccacgtgttttgtggagacgaataacacaggcatgcgccgtgcccaggtggaggcaatgttaggaaagcaggaaggagctcagagcaggaaatgtgtgtggactcgcgtttgttgaagggcctggccgagttccccagaggctggggtcagtgttcaagttctgatgcttcacgtccttggaggccaaaggacgtgaccttgaagaaggggcagttctcacctgtgggcctaggagaggtcgttggccttaagacattactccaggtaattatatgtggttcctacctataatcccagcactttgggaggcagaggctggaggatcgcttgagcccaggatttggagaccaccctgggcaacaaagtgagactcctgtctctacaaacaaaaacaaaaacaaaaacaaacagttggctggatatgatggcatgcacctgtagtctcagctactcaggaggctgaggtgggaggatcacttgagcccgggaggtggaggccacagcaagctgtgatggcactaatgcacttcagcctgggtgacagagtgagaccctgtctaacagcaacaacagcagcagaacattaatccggatagttctaggatgagggttctcagagctagatgggcctttgcaagttctttccactgatccccaggtttggttgattgtatgaaaccaagaggaaatgtacagggtttttgtgaagaaaggaaagtgtcatttctttgggttttactttgaatggcattggatgaggtcctcagagcttatgtggggccagcccagcctgccccatgtgccccactgagaccctggaaacttggctttctcccactgctcccccagtgctcactgactagttttggggttttgtggggaccctttgtctatctgcttcgtcttccccagatgaatcaggggacgtggtggtaccatagtggtgctgagggcagcttctgggtgggggttctcagaaggagaagtctgtccaggaagattatattttattaccttctccctcatcttatttattttctgtttttttagaggctgggtctctatgttgcccaagctggtctcgaactcctgggctcaagcgatcctcctgcctcggcctcccaaagtgctgggatgcaggtgtgagccactacgcccagcctcccacctctttcttatttctttattgtttatttcaacaggtttttggggaacaggtgtgtttggtgacatgaataagctctttagtggtgatttgtgagattttggtgcacccatcacccgagcagtgtacactgcacccaatatgtagtctttttatccctcacctacctcccaccctttccccaagtccccaaagtccattgtatcattcttatgcctttacatcctcatagcttagctcctgcttctgagtgagaacatacgatgtttggttttctattcctgagttacttcacttagaataatggtctccagttccatttccatccaggttactgcgaatatcattattttgttcctttttatggctgattagtattccatggtgtgtgtgtgtgtgtgcatgtgtgtgtgtgtgtgtgtgtatacactgaaatttctttatccactcattgattgatgggcatttgattggttccatatatttgcaattgtgaattgtggtgctataaacgtgtgtgaagtatgttttttgtctgatgacttcttttcccttgggtagatacccagtagtctcctacttctttttaaaggaagccttgctctttcttaaaaggtgctaaaaaggaatgagagtggcgctacagcaaacatctattgagcgcctactgtgtaccaggtgggtggctatggtggaatctaccacttcttaaaagtcaccatccaagttaccgtttttctgaaatactttgtctttcaactgagtgctttgtttttagtgatggccagtgaagggcccaattcaaacagaagcagagccgggggatactgaagggcctttctccctgtgagccccttagaactcaggcagaaatattttagcaaaaagtcgaatctgtacttctctggcttttaatgggttatattgaaaaggatatgacctgcctctaaggttgtaacttacgtttggctcagtcttaattatcttaacaaggggtgcctccccacccatcatccccataccttgtatttatgcatgtattgacttttctcccactttgatagcttgaaggcagggctgcagtgtttctcaccttggcaccccaggcttgagtgatgcctggcacacagtaggtgcacggcacacatctgagttgagatcctgatacgcaccctgtataagaccttcaacagcctgtcgacccctcactgcctccgtttcctcatctgttagatagggatgatcataagggttctttcttgcttgccttatggggccttgatgagaatcaaatgaaatgatgacatcagtcccttaattatttctcctcctcctcctcctcctcctcctcctcctcctcctcctcttcctcctccatctcctcctctcttcttcttccttttttttcttctttcttctttctttttcttcttcttaggcagggtctcactctgttgcccaggctagagtgcagtgggatggtcataggctcaagtgatcctcctgcctcagcctcctgaataactggaactacaggtatgtgccattgtatctggctaagtttttgtagagacagggtctcactatgttgcttaggctggtctccaactcctgggctcgagcggtcctcctgccttggcctcccaatgtgctgggagtacaggtgtgaaccactgtgccaggcccctttaatttattctgaaaatggcgtgtcaggagctgggtcttggctgccttgcttgcattgtgaaatccccttgcctggcaggtaggaggcagtcgatgcatacagggtgagtgaatgaaatgttagttagttgcattacattgaagtggtctaaacctgactctaagatgtgactactaggctgctgatccttttatgatttttcaagtgcgtagttattttccttttaaaagctaatcacatttcctttcctgactgatcctctgttatttctgcctcctcccccaaggggctgaccaccagccccaggcatctccttggccagctcagtggatacacacacgtcaggaagaccctcccttgccccagccttccttcgtgggtggcactggacactgggcagatggaaaggccctctccatggagcactgggctggcgagggccttcctgtctgtgccctcatgatgtcctcacttggctgtcgaggcatctcctgggccatgaagtgctgtttgctgtcctggccttggattcctgcatcaagtctcccagcaggaaaactgttaaaccaaaaccagtgttgggaactgcatcagagctggggaccacatcagtgctggggacctggatcagcattggggacctggattagccctggggacctgcattagtgctggggactcgcatcggcattgggtgtctttttgttgcttcctcaagtcctagttttgactctggatgaagcttggtttgtgccgtgggagtggagtgttgggggacaggggtgaccggcgggtgagccctcactgttgatcctggcctcgaatgggagaggggcactagtgcccctgggagtgggccaggcatgtcccagtccactgcctgccccagagccccgcctggagcacctgctgggtcgggacatgggcctcccgtgggcctcaccgcttcctgcttcagcagaactgggaattgtcagttaatcgagcaacacctccaggaagccagcctcaggaaagagcttccacagggagttgggggactggtaattggaataaataaaagctaatcgtgcttcctggatgccaggaaccactgaaatttgtggattcccacagcagcacatgaggctggtcattgttaataacccctttttaccgacgaggaacccagaccagacagagagcccgcctgtgtcacctggtagggaggggctgggcctggtgttataaaccaggagagggttcaggccgaggaaagggggagcaagttgccggccaaggtaggtatcatgcgagtcctacttctcccctcattcaaggaccttcctttggggaagtgagtgctcccgagagcagcctgccgcctccgtgtcggggcagcctcagcttcttctttctgtgtccgatatttgatttctgttgtcgtggaaacggggtggcaagtgttccatgtgttagcatttggtcctcctgacgtagtcggcacacgggagatgcagctggggtggcacgtgcccacagtggtgccacctcttgccgggggtcaggcagaggagacccagctccgtgccagcttgcagacccccaatcacttctcctgtctcagggcccagagagcaaaggcagtgggaggccaatgtctgttgttcagtttagctctgagccacgtgcatcttcagtcagcccaggggcctgggcgcgcccttccttccttctttgtgcatgggggttttcctggggagcagttgccctggcccatgaggctgatgggagtcaagacagaaatagtggtctgtggtcagcaaggagctatcgctggaaacaccccggtccttccacagcctgaccctctgtgaccttcctcaaaggctccccaaagaggctttcccttgaagtgcaagtcatagtggcgcccctgccacgtccctatatgaacggggtgtgtgcccgcctgccctccgacgtccgccggctgtgctggtctgcagagctgccgccagctgcaccctcctcgccagtgagttctgttgctttcgtatcattttcagcaggagctaaacccaggccagcccttcttttcttttctgctttatggcagaattttgttttgcaagaatggaccctgggtggctgcttgacttttcccaggaaggtgatggggacgttggtgttaggacgatgggcaagggggtccaggttgtctcactgcggccccagagggatgagggtctgacttgtggagtgaaatttccagcactctgctgggggcgagtagatctttgggcccagaagaatgggatttggaacattctcaggcacatgctgcaattaagattttctttttcataggggtacctgatactgtgggtttctctctctctgtcttttttttttctctctgagatggagtcttgctcttgtcacccaggctggagtgcaatggcgcgatcttggctcactgcaacctctgcctcccaggttcaagtgatcctcctgcctcagcctcccaagtagctgggattacaggctcccgccaccgcgcctggctaatttttgtatttttagtagagacggggtttcatcatgttggccaggctggtcttgaactcctgacctcaggtgatccacccacctcggcctcccaaaatgctgggattacaggcatgagccaccgcgcccggccatgggtttctcgttagtggtcttcggttctgtgtttcccctctaagtagctgatcgtggccagtgcctggctttcccctggtcaccactagatattctgtcttgtctttgggaggcagagtcagtagaaggtgctttgcactgggcatgcctgggagtgagcccagccttgctgttattagcgcccatcgtgacggtcggccaggctgccctatgttcgatttttcctcctgtgaaatgggaacaacagtagagctgatgtgtcctgggctttctgcatcccagggactatcccagctccttaacgtgctttgctcagtgctatcctcctaaaaagttttcttttacagttgagtaagctgaagcccagagaggttaagtaacctgcccaaggtcacaccgcagatcggaatgggagtcaggagtgtacccaacagcctggctccctagtcagtgctctcaacctcagcttgaaggccgcctccctgggccctgctaggggacccagtaagatgacagttattcacattctcctttgtttctgataccaagcaaactcctggtaaatgctccttccccacttttgtggaataaagaatgcacatttttttctgagctctgcctgggtatccttaaggagagggacgctgtgcctgggacgcagatgaacaagataggagctgtttcctggaggagctcccaggctgatttttgcctttgatgttctgcatctttttcacaggctttttgtagatgtgtggggatatttctagaggagaaaccagaggtggaaggaggggcataatgaaattgaatgctgggcatctcttagctcacattatgtgaggctcttcagggacaatagaccttgcaataaaaggcaaaaaggtgattgcgcacagagtgcttttcctgcacagtgctgggcgggatggggtggatggggcttggcggctggaggagggtagaccctgcccgcgcctcctgggacctgtgcgggactttgctcaccttgctgtttctaaccaaggtaccagattctcttcactcaggtgtgtcagattttaacccttgaggctagaaccttgccaggcttattcgaagtcagtggttcctagtagtcacagggcccctgccctagaccccagaccaggaccccccggcccctgcccgcccgccttggcctggtggggtaggagtcactgtgaaaggggtcctggagcccagtatcactccagcgacatttcccagagagcatcctggggccagtgtggggtgtgggggaacagatactgagcgctctgtcccctccccttggagaatctcacagtacattagcagagtcaagactctgagaagtccggtaggaaaagacacctgcttagcttcccttaacttcacgactcctccacctccttgacctttgcttgattcatgtgtgacctgtgaacgtctaaactgcaggactcactttgggagatactgatggagaccaaataggtgtcctgctcatatatcctccacttcttcagttttgctcaggatccactgggcttcctaaaatgcaaacgaattgaaaagctgtgctgaatgtgtttttctctgtctgaaagtacagccacccacgaaaggaggaggtctgctaagttttcttttagaaaaggggtccccaggctctgaatgcttgaggacctcattgggatcaccccctccattgtgggctacccatcctccacccgctgtggcctattgataacctcccagccaccacctatgctcctagaggccctgactggaatccctgtcctcaccctgagtttgtcacctccttccaaacttcgtgtcctctgttgcagttgaggacctggaagtcatgattgggctgattagtgatgggtgtttattttgaattcttaactaaacaaggaggaatcacatcctagctccgtattttactagttatgggaccttgactttcccaagatctactttccttgtcagtaaaatggcaataatcggggtaacccataccctgattgctgagaacccctgtaggcgtccatgcctggcccaaagccaggacccaggaagggaggcgcagctgggcggcctcttctgcgtctctgccagttgctggcttggattctaacaccctccttccctccctccctcgctctctaccagtgggatccgagaccatgagaacgtttgaaggtttctcaagcgtctgtgactgccccacgtctgtcgttgggtggaaaggactttgtaattgaacggagtcagttgtaatgtgaatgtcatgtggagctgcttttccttggcaagtccttgctgtgtgagccattgtttccagatctgtagaaccctccctaccctgtccccctttccgggctattgggaggctgagcgagctcatcatgaggcccctgaaagatagtttctgtgccctgtggagctgagtccccgagtctctgtccccacctcacaggccccctctcaccacccttttgggttggtaaatttcaagttgggcatcagataggacaagggaaggggactggagaaggaagagccgacagtttgccctcaggacttcagagtcactcttttttgtttggttggttttttgagatggagtcttgccctgttgcccaggctggagtgcagtggcgtgatctcatctcaccgcaacctccatctcccgggttcaagcgattctcctgccttagcctcccgagtagctgggattacaagtgcatgccaccatgcctagctaatttttgtatttttaatggagacgggggcttcaccatgttggccagacttgtctcgaactcctgacctcaagtcatccacccaccttggcctcccaaagttgctgggattacaggtgtgaaccatcgcgcctggcccagagtcaccctttctttttgtgccttattagacatcttcctgctacaggatagcccagaagaaaggaacaagtttccgtcatgaataagtcccctacctactagggatgtagggataaaggactggaactctctttcttcaccctgcagggcaaactccttcaagactcagctccaggaagcctctctggactactacactccctcctgagcccccagccttctcacatacctcccttatgtgtctcctgggtgctggagccctcagagcagggcctgtatctaagtccccctgtggcccacccagtgccccgtgccaggcctgaccatagtggatgtcactaagcagttgttcaatgagtgaatgaacaaatgcaaactaggcccaatcttatcaaattatactagaataattgtataaaaaaccagacttctttaagtggaggaaatttaaagtcagaagtgggctgggcacaatggctcacacctataatgctagcactttgggaggctgaggcgggcggatcaccggaggtcagggtttcgagaccagccagcctggccaacatagcgaaacccgtctctattaaaaataacaaaatttagctgggcgtggcggtgcatgcttgtaatcccagctactctggaagctgaggcaggagaatcacttgaacccaggaggcagaggttgcggtgagcggaggtcgcgccattacactctagcctgggcgacagagtgagagtcagtctcaaaaaaaagaagtgaatgaatacgaccatacctgcttttccagctcctgactcttaaacgtctcgaataccaatgccaaataaagggaaccgagagatgaaaggtgtcactgtcctgatcttcagatgcagaaatttctgtgtagctgaggaggtggggcccgcttgcccccctttgaattttgggttgtgcttgagcagaagcattcattgcttggagaaagcagaggagaccccagaagcacttccctctgaaagggagaagcaggtaggccaaggcagcggttctgggaccagctctggggccacctgcttttcccacactgggtctgtggtgggctcggcagctggcctgcacacaggagatcctcaaaacagatgagcgagcatgattgccatttttacactccctcatttaatccgcagcactggaggaggtgtgattatggtgtgtattttgtgcagccatttggtggacacctaccgaggacccgccgtggggcaggctgctggctgggctctgaggatgctgacgaggacccttctttgggatcctctgttcgggttgaagacagtttatgaaaacataagataacagaatggccgactctgaggcaggagccaggggtgtgtgagtgggggtcctggaaggggtctctggaagccagaggaggagtggtcctctgaggctggccaaggctcccagcagagagacgggggcatgggcagaagcctgtcgtgccagtgagccctggcatttctgagcccctgatcggttctgttgcctgcacgacggcctgggtgagcaacactgacaggagacccctgccttagtaccatgtctcctgggctctggctagtggcgcctcctggcagcagctgcccaggccacacaggatgctggctacatgcttggctggtctggccatccctgcatggccccgctgtcactggtatctggagatcacacccagccagagcctagtgccaccctcggatgcttccttggggagggaggatgccctgtttccatggcaaccctaggtgggaggccagggcttcaggcaagctgctgagcttttcacagccctgggagtgaggagcagggcaggctgaccctggcctgtggggcagaattagtagaggaggagccccaccatccctgagaagaggaggggagtggggtggggaacattagacaatgttcactgcccctccctcagcttcccagctgcccacggcagtcccaggccaggccagtgtgggcgtggggggcagttagagcgtggccgtgtggtgtgccagcacgcagtgcaacagccaagacaatggagtcatcccctgcccctgggcccttccctccaccccacctcatgtctgcactaggtgaggaagcagaggacggaggagcccagtgggctctgggagctcctgggactcctgagtcggtggggacggggcttcccagcctcaacactgaggattcttggttgtggagctctcctgagcattgcggggtgttgagcggcatccctggcctctacacacgaggtgtcagttgtgacaacccaaagtgtctccagatgccactacgtaccctcccagtgtgggggtggaggaatcgtccccagttgagatccgctgagctgagaggctccccggaagcaggtggtgaaggaagggaaggccctgggccctggagacatggatgcctgcctgggacacacacaaacacgcacgcacatgcacgcatgcatacactcactcatatgcacacatgttcatgcatgcacccgcagtgaccctgaagggactagactatttttagagcacttttaagttcacagcagaattgagtggaaggtgcagagatttcccgtgactgcacggccccaccacgcacactatcaacatcctccccctctaacaacgtccagaccagagggtgcatctgtggtacctggtggacccacatggccatatcagggtcacccagagtccacagtttccatgaggggcccctcttggtgctggacattgtgtaaggacagggacccccatggtagcagtgacactgccctgagatccccgtgccccacctgctcatccctgtctccctctcactcctggcaacctctgctcctttcactgtctccgtagttttgcctgccccacagggtcgtgcagttgggatcacactgtctgcagccttttcagactggtttttcactcagtgagatgcatttaagtttcctccacgccttttcacagctgacggcgcgtttcttcttggttccaagtggctctttctgcattgtctggacggatccatttgttccctgtttgcctcccagaggatccgctgctcttgctgcagatgtatagcccaggtgctgtggagttgggatggagcagtcgagctgggatcagagcccaggcccctgccctgaggttggagctctctgactgcacctggcctaggcctgtgcattgtctaaactgatggccgtggggcaggggacctggagcgcaaagcaggagaggatgctgaagggggcaggtggggccgggacttgggagtgtctggaaggaggaccgcctgcctcaacccagggctggtctgtggaggccagagcgctcagcccctcaatgctaggcctgttgtgagtttctccatgaggtggccctctcagaaagagtggctccacagcagctgagttgggggccccatggcagctgagtcgtggactccatggccgctgatttgggggatgcctgtccttgtagagactgtcacctctaggaatggtgaaagggcggccacccgcagccctgtgtcctctttctagtcctctgtcttgtaagcccggtccccacagtggccccagtcctcccctgccagaaattcgttctcctcagaaatccgttctcctctctgatctttcaggcctagagacaggctcttccctccggagggtgcagcccaggggttctggtaagatacagagcccagcctcaacatagcaggaagtttttccacaaatacacagttcttcaagaccacatgcagctgtgcgtggggtgtgttttgaagggcaatggcaggagcagtgtatgcctcgtggtgcagggagcacgagttgtttataggcgtgcctgggtcctgggtctctgtgcaccctcctctagattcatggggcatctgcccaccgtgagatagataagccagggtgcctgcccctttctcaggtgagatgctgagggccagaaacatgctgctgtgtcccatggaggaggtggcctgccccaactcccctgcaccctagggagagtgcccacaggctgggggctggggctgggtcctgtgccccctccccagccctcggtatgtggctcgctgaggtgtgcgccggaatgttgggcacatcctgtctgataccagcttggctggaagtcgaattatgatcagaatatcacatgatgtgtggcctgggtccccctttggttgacactcttgagtatgggtcctgtgcctgcccggggccaagcagcaggtgcaaccgggcctgccctggggcagcatggggtgtgctagtgtcctggggccactgtaacaaagcaccacaacctgagtggcttaaacaacagaaacatagtctgtcacagttttggaggctggaagtccaagatcaaggtgtcagctgggctgtgctccctccagggctccgagaggatcccccttggcctcttccaggctgtggtggctctggtgttccctgccgtgggccacatcactccagcctctgtctccctcttcacgtgggcctccttctccgtctgtgtctctgtcctctcctcttcttgtaaggacgcctgtcattggattagggcccaccctaatgaccgaatctgcaacttgattacatctgcaaagaccctgcttccaaataaggccacagtcacaggtgttgggggccagactccagtgtgccttttaggggagatacagtgcaatacacagcacacagtgaggtcttccagatccccagacctatcttcttccagaccgccagacaacaccgataagggtgaagttggcttacgagtcctggccaggatgtgacggggagtcgccaggtgggtgccggggaggtgggaagctctgcaggggattggagaaccacacgtcattgcccacatgtgactttaaaccttagcaatgatattggagggggatagttactctttttttttcttctgagacagtgtctcattctgtcatccaggctggtgtgcaatggttctagcgattctcctgcctcagcctcccgagtagctggtattacaggcacctaccatgacactcggctaatttttgtgtttttagttgagacgggttttcaccatgttggccaggctggtttcgaactcctgacctcaagtgatccgcccacctcagcctcccgaagtgctgggattgtaggcaggggatattactctttacagctagggaaacagttgggcttggtgacatgatagagacaccaggtcccttgaggacagggggccatttgcagagccgtgtggtggaaggagcctgaatttggagccccaagctcacagcgtgggtccttgtcacatgtcctgtgagctctgtttgcatccttagctcaggcaagctactgtgttgaactggctggacacagtgtgtctgtctctccctcttccagagaagtcctcacttaaggttgtgtcactgtttttactgatgttggaattggcacttggagatgtgaactttcccaaggccacacacccagatgagtggttagacccggacctgcctaactccagcatatctttttcagggggacacaattaaatccacagcatggactgagttcccctcttctctgccaccatcctgaccttttcctggccagggttaccatgtcggggcaggcatgggggaagtggtaagggaggtatctggacctagtaaaaggctctggtcctcctgcttcctcttgtaaggaccctgtcaatcacatcgggccccctgaataaccaggctaatctcccaccccaaggtccttacctaatcacatctacaaagtccccctcttgccatgtgaagtcacaggttcctgggacttgatgtgaacatctttgcagggaccatgatccagccttccatagaggcagtgacagatggagtagaatataggtcctttgagtatttatttatttaagatggagtctcactctgtcgcccaggctggagtgcaatggcgagatctcagctcactgcagcctctgactcctgggttcaagcgattctcctgcctcagcctcccaagtaactaggattacaggcgcagaccaccaagtgcagctaatttttttgtatttttaatagagatgaggttttaccatgttggccaggctggtctcaaactcttgacctaaggtgatccacccgcctcggcctcccaaagtgctgggataacaggcgtgagccaccgcgcccggcccctgtgagtttttacaagagacactgcagtagagagaatggtagagtcctcaaaccctgattcagtcgttcatgaattcactgagcactcaacgtttcccgcaatgtgtgtcctcttctttgccagcctgctggtgtgctcctggtgcttggtccaccatagatgggtgtgcttggtccaggaggctgatggtgctgacatctgggctgatattcaccgtttttagtgacttgaatgacgtccatgcagaagagctagtgcaccatccttgtgtttgaaaatgcccgggctccagcctgagaacctggtaggccagtaattggagggacagtagcaggatcgagaagccatctgtgtcacgtgttcttggggacaaagaggagacacaggctcaaggaacagcaaggtttgtgggacacagctgtgtctgaaaacgtcaagcagttagctcatccctggctacttcctgtgaacccattaaatccccaggctgaggaggacagagggtgagggaatctgaccccttactcagccctttagccagcggctgctgtgctaagccattctgagaagccaccggtggagaactgacttcaggtcgtgctgactgtgaggccatccagttgtttttgcacattgaaaacaatacattacactttgggaggccgaggtgggtggatcacttgaggtcaggagttcgagaccagcctggccaacatggtgaaaccccgtctctactaaacatacaaaaattagccgggcatggtggtgggcgcctgtaatcccagctacttgggaggctgaggcaggaggatcgcttgaacccaggatgtggtggttgaagtgagccgagattgtgccactgcactccagcctgggggacagagcaagactccttctcaaaaaaaacattgttccggatttgctaataaggaggcaacctcctcagaccttggtgtcacaggagaatggcccgcggcagccttagggccagttgtgattttatccacagtgttggtcagatgcgtcctctgtgcttgtttaatattcattctgcttgcgtgaacaaagccatgtcagtttcagtaacgcttgtgccagggggcacccggtgtggagcagggctcagtaaaactgctgcaaagaatgttccaggctttttgaaattacgtggagttgctggggctctcttgaggctgttaatttacttagggctgctgtgacaaaataccacaaacccagtggtttaaaccaacacaaatctattattttacagttctggaggtcaggagtcccaacatcaaggtggcagcagggccggttccttccggaggctccaggggagaatcccattccttgccttttccaacttgcagaggcacctgcgttccttagtgcctggcctcttcctctgtcttcaaagccatctcccgatctttctctgtctccttcgccacacctcctctggctctggccctcctgcttcctcttgtaaggaccctgtcaatcacattgggccccctgcataatccaggctaatctcccaccccaaggtccttacctaatcacatctgcaaactccctcttgccatgcaaagtcacagtttcctgggacttgatgtggacatctttgcagggaccaagatccagccttccatagagacagtgacagatggagtagaaagtacatcctttgagtttttacaggagacactgcagtagagagaatggtagagtcccgaaaccctgattcattcattcatgaattcaccgagtgttcacggagcacctgcctcagtccaggcgtcatgttgggagcaggggagacagagcaggccatgcatctgtcctttcagagcactgtagacgcaaatcctgtagcacagatgtgccttagactaatagtgcctcgaaaggagaggaaggggaatggatgcggggagtggggaacctgacctgctttgtggggtcatggagtgactctccacctgccgtcatccctccatcccttgtttggggctgttcctccaaaggtgcagtctccagcaggggtgtggggacccctgtgggccgtgaaggcctttctccttttctgctgtgggcattgcatctgttcctgatgggtagagttgtctgtgcccggtggggcccaaggcagtgccatggtggttctttgagtatctcaggtgggaactgagctgccagcaccagaggccaatggcttccagcactccccaaatccacctgcttttggaaggggcctgtctccgaagcaggccgggtcctcctgttgggggaagctttcatggaggcatctgtgtcacttctgcaggggagacagccgctagagggcactgtccttctggcctttcccacatccccgtttccatggcaggtgcatagtaaagcctttctttttctaacgacttaatgatttaatcttcttattttctcagcagacaacgctttggacttccctggatacattgggacgttaccagtcacattaattaatacgagtttcacaacttgggaaccagcgaacgtgcttctccagacttagcttctgcacggccgtttctgctttcctttatgaagtgcgtttctctaagagcctggcagtctcatggggctcgtctgttgctggaagtgagcagcgggttccattgccccccgcctcggtggggctcattgtgcagcttgctggcaagtggctgggctcggaggggcggtgacggtgacacacgccaggggaaaggttggcatcctcttctgagaattgtttcttttgggtttcacaccctgcccccaccttctgctgcctcgaggctcttttcttcttattattagctaatgacagatttcatgaccagtgactgaaatcatttggaagtaccccctgaaagccagcgtgatgggttggagaaatgtgacagacgcagcctctgaaaatcacagaggcagaggcttgcgtcgaaggacttgctaaggaattaggatgagagtggtcaggaggcagtggctgctgggcactggagctgagggtgaggggccgagaaaacgggaggcaaatggggtagctcttttttggggcgggggaggctggctttggggatgtgtatcccactgtgcaccgcaaggtgggggcactgggcggtaggttcccgtgctccggaagggtggcaattgaagggaggaattaaagaagttggccaggtgcggtggttcgtgcctgtaatcccagcactttgggaggccgaggcaggtggatcacttgaaatcaggagttcgagatccacctggccaacatagtgaaacctcatctgtactaaaaatacaaaaattagctgggtgtggtggtgcacacttgtaatcccagctactcaggaggctgaggcaggagaatcgcttgaatctgggaggtggaggttgcagtgagccaagatcgagccactgcactccagcctgggcgacagagcaagagtccgtctcaaaaacaaaaacaaaaacaaaaaacaaaaaacaaaaactgactcatgtggctttcagtctgagaaaccaatcagatcatcattgtctctaaagaatgtgtcctcctttgtagacaagaagctcaccggcccctccatgccccggtttctcgcccaggtgggttagacggccaacctgacattttaccgtgcacctggaagtctttcttcctgttctccttcccacaaaggattcatttttctgtggttctaacattttcctgatcaccccagggacaaaggggaagaaaagaccgtgtttctgggccaagggaatcatctgtttaacatgggcttcggagctttttttacatttctatgtaagcaacttttcgtattcagaagacccagtttccctgagccagatggactccttccatctcggggtggtctgtatttcagattcctgcagcaggtggctggtcggaatgcacaccccaggaggtgaggctggggggatgttggctcctgggctgcttgtactagcaagtccctaattgcggagcggactccttcctcctgagcccatcagcctctacgtggccacatcagggtaattgggttccttgtgaaacacgactgccaggctaatgtaaaccttaatggaaaccctctttttccacccaattaagtggctggaggtgggatgctgtgtgagagccgtcagttcagttccctgactttctcttgtagaaattatctatgtagctccatttggcctacataagcttagcatttgtgttcattcattcattcattccacagatattcagagagcagttatccatgtgctgggttttatgcaggatgtgaggccatggtcatgaatgggacctggcccctgtgcactccttgcggggtcggggggtgcagggagatgagcacagtccacaatcacatgatcggggaatagggtttgtcattgtcatgtgcacggggagctgtggaaacccagaggaggggcccgaactgcacccagggatagaggatgtgcagagtgtgctttccagacggtgggaaatgggtggagctagctgacctgaagtgaagggcattgcaggttgtggggacagtcgagcagaggggcagagatatgacctacagaagtggcctggaatggcctcatcagacgatgagtgtggaagcatggtaactgcagctgtattgatgagaggaggggtctgctcattaacagtcatcgggtaccactatgaaggttttgcgttttaccctggagctggtgggagccatggggtgcactgcagcagggagtgaccaacgccagctttgtgtattggaaggatttctacatcagacaggactctcttggtttgcaaaggacagaaaacccaactcaaaatggcttaaaagcaaaacagaattcactggtacatttgacagaatggtctgtggggttggatggcctcaggtaaggcttgatccagcacatagaaggtgttgctagatcctagattctgttctccccttccccgagctctttcgatctggtgccttcatctccaggctctgtatagtggtaagatgatgggacggcttcaacctccatcctttctgggtcaaggccagtgggaaggagtgcctgtctcattctctattcctggtaaagtctcagtgcagttcattagctctaactgggccatgcccatccctgactgtgttcctgggaggccagtgtgccagctggctttgtcctgggatgcctgctccaccccagagctgaactacaaggcccgagcatggtggcaggaggggtggctctctctgagggaggctgagtcttgtttgcctgaaaggatcaatggatgctggagaagaaaagcaatggtgtccataacagtcacctccagaaggggagaggctgggctggggtgggaagagtttagggcagggcttgcaggggccaaggtggccatcctggtgagaaagccccactggccaacccaagaatagggcacgagatgtgagcctgccaagggtactcccaggtctggcatcttggttctttccgctgcgttcttggcacagacactcatgccagggcctttgctgtcacccatagtctcagagtcatgttattattctgcagtcatctgtggggatgggaccgtgcaggactttccctccccagcttcctccctccttcagggtagctcactgtgtcccccgaggcagccagtgctgccgggagaggcccgagactccttctgggtctcagagccatttctatggttgaacccagtgtgtgtccttccctgtagaattggctgccactttgtttcctttagggtccccactgcaccctgtacataaccctgccaggacatctgtttattttccattcttgtagctttatttttatttcaaaaggagtacaagaacacagtctggtggcagagcctccctctgtctcctccttaccttcagccactgggccttgcatcagtaatgctgctcttgtcattctggagcatgccctttcatttctttttctgtgaattttgatacgtacacatagaaatacatagtggtgagttttctagttgtattttttacataaatatcatgctgtatttattttaaagtgtctcaccatgttgcccaggctggacttgaacccctgggctcgagtgatcctcccaccccagctccaagtagctgggacaacagatgtacaccaccacacccagcctttgctgtattgttctgcaacatggttttctttttctttttctttttctttttaattttttgagacaagatctggctctgtcacccaggctggagtgcagtggcgtgatcttggctcactgcaacctccgcttctcggcttcaaactttcttcccagcctcctgggtagctgggactacagattcacaccaccattcctggctaatttttgtattttgtgtagagatggggttttgccttgttgccccgctggtctcgaactcctgagctcaagccatccacctacctcagcctcccaaagttctgggattataggtgtgagccactgcagctggcccaacctgcttttgcttttttaaaaaatctcaacaccatgctatgtattgcacttaattaattgtgcatcgaatccttcacgagccttctgtgccaggtgcgaggtcggctgctgggtggaagtgaccaggatacgtcttccctcggctacacgcagactctccacggtgcaagggcagggcctgcccagccccatgcccagccctttggcatccatccaccagtgttagttagatcagcaggctgtcatgcccaaggcttgctgccatctgaataggacagggtttcagcagtgagctcttgatgtggagtctgcgccacctgttgaccttctttggatttaccttattgaaatgttcacacatttcttttagcttctcaacttatttcatcttgagaaatgggctggaacctcatgccccagcacaacaagccccataaatcagatgttcaagctgagcgatccttccggtttgggccacagtcacggggctttcttactcctctagtcatgtcagcaccgttcagaaactcatccttggcttagagatgatagtgagttacatgtacataaatacaccgagctcattaccctgggccggcatcctgcatgacaagggcccacatccatttctcggcaaaaacaaactacatctgccacttgaaacgtcaagaagcgctttcttgtatgttgtgctccatggatcactggaagtcctttccctcttttcccatgtccgggccaggaggagcagctgctctctggcactgttagcctttgctgccttttatcctaggcaagacactttgttattcctccgatttgtaatcccaagaaccttggagattggacttggagttcgtaacctcctggggagggccaggcctcacatttcaaggcctttgcatgcgtgatgtgccagcaacagctcagccctttgaattatgatccgcgactccctccaatcaccttccttctggatgtcagaaaagactgcccaacagcatctcctcccagctgccgaggctgatgatgtttttattctgatttagatctcacttaggtcttattttaactccactgagctgcaagatcttcactgaagtacaactggacttatttttagaaaaactgctctgttaagaagaccttcgtgcctgatgaagttagttattctgataaattacagcttctacgaagaaaccacacccctctgagtacggatggaagttggaaaattcatagaaagctgtcatttcctggcagaggcctggaaaacctcatttaacagagatgtctttgggttcctgcttaagcccaagcgaaggatcccgatgccccctccccagctgggaagaggagctggtggcgtgagttggcacagagccgcacctttctttctcctcctgtatcctcccgcaagctctgaagaccactctgtttctttgagcaggatctgttgtaactagaagtgggtaggatttgaaaagggctggttaagtgtttaaaactggggcagctttcctgccattttccagttcttttagatgtgcagggatggagaatggctgtttttgttggggttttctctttgatcctggttcagacggggccctctgaaatttctcgccctgatcttttgttctctatgaaaaccaggaattgcacggatggtgtagaaagtccccgtaggtggcaaagcatctctgctgtgttgaaatgacacgcttagaaaagtgtcagaaaatggagttgccattgctctggccccccaggacctgtggctcagcctccatggggcctttgtgtctgggccagaccctccaggcaagcccccagtgaggctcttgggcccgtgattgcaggggcgccttgccatcccccgtgtcctgccctggttctgctagtggagcaagaagctgatcagcctttgtgttttcagatttcttctctccgttaaggtaaccttgttctttaaaccagcttgctttcaaagttgttttcctaataatatcaaaagggggaaaaaaagctgcctgaaaatccttttttgggaaagagcctgggcataaataaataaatacaaccatacaaagaagaagattaaaaaaaaaaaaatcaaagatggaactttcgcatttggcctgaggtataaatggcaggcttctgatgacatgcttttagtttttgattctctttctttccttttatgttcttgtaattccaaatcaggaacgatggtgtttttttttttttttttcttttttcttttttttaaaccttgcccaatctttgggtggaggctttggaagccgcacatattccaccattatagttactcaaagctgacgcttcccgaggggtggctgcatgctggcgactgtgccgagggtgtgtgtccctgaatctttgtgatctctctgaggtgtgttaggccccactttacagatggaaactgagacacacagagccgtcaagcagcttgcccaaggtcacacaccttgtcagtggtcaagctgggatccaaaaccagcagcctggctctgggattctaagctctctgttgtgctgctccttgaatatattaaaaggcctactatgtgcaggaactgggttggcactggcaggaaggcaagttcgggaaggagatagttacatggctgtgtggcttcagctggggagaggggaacacccaggagggcttcttggaggaggcggccagtaagatgaggttgaagataggtaggatttagtagggcacagtgaggtgcaagatcaggtagaactggctttagtcctgactctggggcttcacatctaacagcacaggaccagccactccctcacagacttgtttatttattattattgttattatttttgagacagacggagtctcgctgtgttgcccaggctggagtgaagtggcacaaccttagctcactgcaacctccacctcccaggttcaagcaattctcatgcctcagccgcccaagtagctgggattgcaggcgcccactgccacgcctgactaatgtttgtatttttagtagagacagggtttcatcatgttggtcaggctggtctcgaagtcctgacctcaggtgatttgcccaccttggcctcccagagtgctggaattacaggtttgagccaccgtgcccggcctccctcagacttgttaggagacaaggtgaatggctggcatggaagatgccctgcacatagtaggtgctcaggaaacgttagtggtgctctccccctttccaatggacagtcagcaatatgggttggacaagtatgttctgtaatccgaggttgtgtgccctctggctggcccacaaaatttgaattaatggctcgtatttataaatggggagattccacaccaaaccccacatttccagcttttcttgaaaactcagatctggtgactgcagcctgcacttcccactctgccatcccgggctgagcgaggagtgcccgtctccagagacagtgtgccaaggggccctcctcctatcaaatgccctcctgtctctctcttcctacctggccccccgtgcaggccacagagcgtggtgctgcaggtgaactctgctgcggtgggaacgagttggcatcgactccctcgtggctggctgctgggtttcgtgtggacagagacattcatcttagaacaatgcagacacttaggaaaacaagcacaaggcggtctttttcccttaatcacccatctcatgaaatcaagccccagtcccttggaagctcacaccctccacaccctccagacactgagagaatgcatgccagcatgcctgtgccagcgcgcctgtgccagcacacccgggccagcacacccgggccagcagatctttctctgtgactgaagacagccggcacttcacatctttgaagggtttgtctttctggcaagtagaccggtactttaaaaaccaaaacattcctgggattcactgaaagccagtaaactggcaccgttcaggtggcgggggggtcgggggaggggggaagccaagggtgtgagaggagcccctccttccaaaaatcacaccgatcctctgaaggtgacgatcagatccaggctgcaagttcttctgcaaaggagctgtgtccataagggaacccaggctgcaaaatatagcaaggcccagaagggcatccctcaaaccttcatggggttcagctttggacatgctggctgtggtttgtctccactgcactctgcaaagagccccgaaggccctttccttagcctggccatatttcaaggccagttcaattgctgcctcctccaggaagccctccatgcttctctgtggaataggggacctcgcctgccttgtggtcactcttcctccagtctgtgtctctcttggagcctaatcacagagaccctgtacatccacagctgcctctcccacttgcagggagtagtttgtgggccatgtgtgggtgctcacggttccccttattcctcaggaaatgtgaggaagttcctgtgaggccggtattcccaccaccccatgttacagatggggaaactgaggcttagtgcggtgaggggacttccccgaagccacacaccaacaagtggcaatgcgagatttggactggggctctgtggccacaggcctgggctcctcctgccaaccgaggggtctgccagcctgtgcccccctcctcctggtccccgaagcctttgcttccctcaggccatcgtgcataaccagccccttcagaatgcgctgctgagcagtccctgggcggtgttcgtgagcacgtttctcatttattaaggtcacaaaatccctggccctgtttagtgtcatctttgatgttcaagggcggtgtggaaatctctgttttgatatgacccaatttctaggctttcaaaatgtggcttctctcctcctccctctctgtgtttttgaaatcaggtgagcagggctgcctcgaagcgttgaccacttgccccgaggtctccctccccacccctcaggcccaggcacatgggtgcagtgccagctctcgggccttgccaagaggactctcgggcgtagcccacctgtgtaatcctccacacatagggaaactgggtcttttgttcttcctctgccatcagcgtgagcactgcaggcagctgtgctggacgggacctccctgcccctgttgtgtcctcctatgatgccagccaggacatggaacttccaccccgaccccctgtgctccagggctatcatattcccaaggatttctgtgaaaaatcacttttccctgtttcctttctgccttttaagactctctgctggttacaactctctttgtaactcgtcatgtggtacaaatacttgctgaaatttggtccctgttttctcagctgatctgggtgacctgtgggggttcttctggattatttttagagaggtggggcagagggagtctcaaaactctatgtctgtatcatttccctgtgaaggtatttaacatttgtccactgctggtgtagcgttatgctaaggattttggaaattcaaggatgagtggtgcctggatcttcccttaggatgctggctgtgggtggaggacagtgtgtgcggcagccaggctggctcgcggctggaatgtgggttacctggagagggcctgctttttttttttttttttttttgctatttaaaaaaattgttgtaaaataggcataacgtaaactttaccatcttagccattttcaagagcagagttcactggtattaagtacgttctcattgtgcagccatcaccaccacccacccacagaactctttcatctttccaaaccgaaactctgccatcattcaacactacctctctatttgctacttcccccgcccctggcatccaccagactgctttctcctctatgcattcgcctactcgagggacctcctactggtggaattgtacagtgtttgactttctgtgtctggcttatttcactgagcagaacattctcaaggttcacccatgcggtagcctggtccgaatgtccttcctttttagggctagataatattccgttgtatacgtggactaccttttgcttactcattcatctggtgttctcaaatgccaagactcagtgactgcagcagtgcccgaaggttccctcgaatcaaagaacttcctaaccccaacctgtacctaggctctgatactcctgcatcaggcagtcctctaggataaggtgcctgtttaaaatgcaaatatattaccttcgggggagtgggtaactggcatcctggggccccgctgccattgtccttatgagggagggaggttgtgttgtcctggaagtcgggtccacggtcacgtcctgagagtcccatcacgtgccatgctctgggctggggacttgatgttcattgtttggttacatttagcccttccaaagaccctggcatttttgcagtgttacctataaattccatgtgcggaaacatgggttatttccactcttttttttgagatggagtctcgctctgtcaccaggctggagtgcactggtgtgatcttggctcactgcaacctccgcctcctgggttcaagcaattctcccacctcagcctcctgagtagctgggactacaggcgcacgccaccacgcccagctaatttttgtatttttagtagagacaaggttccaccatgttggccaggatggtctcgatctcttgacctcgtgatccacctgcctcagcctcccaaagtgctgggattacaggtgtgagccaccgcacccgacctgggttatttctacttttgggctattttgagtcctgcagctatgaaaatgggaataaaagagggtccgctttttaagaagctgaatatcggcctttgctgacatgagaggagctggcatccttgggccctgctgccattgtcccttatgaaggatggaggttgtgtcgtcctgaaggctgggtccacagacgtgtcccaagagcccatcatgtgccatgctctggactggacgctcaacattcatggttacattcagcccttccaaaggccctggcatttttacagtgttacctataaatgccatatggagaaataggtgcagagaggtgagtgggatgtacctggggtctcacggccagcatgagtggggccctgttggcctgctgctccaaagccatcatgccacacccccttgctgttccatcatctgccgctgtggaggctggatgtccagagctagaggtgttcaaggttcaaggtgattctggtgttaaaagaggaaataccgttttacttctgaacctgtttcatggagaaagaggtacagctccgggcacactggcctgggtacctttgcagcatgtgatcagggactgctccccagcggccctccaccagtgccatgaaagtggccagggccctacctgcacccggcaccatggatgcatcttggggctggaacctggagtcttacatgcagcagaggctgaggctgtgactgtggagaaagcgtaacattacagaagcaaaggttttggcacctggtgtctgtgtgggtgggtattcctccctggtggatgtggctgaaaggcctgcagggtctcactggtgcagggagatgaggggtcatttctggttctgggattgtccctaatcactgggcgttccagatcctgtaactgttcagcactcccttgagacaggaggtcatggtgtttctgacttggagcctctggctctctttattagattctgttgcatgttccagccatcctgacccgggtgttccatcagatttctgtgcctgtgaatgtggccatcaccagtgaccccactttaaactccagattcacctgtatgcatgaccggagggggttagcatcttgagtccgtggttcaggacgcagccccccggcagagggaaggcagccccactctctcatgccccatcgctgtggtccatgctttgtctgcctcagcagtcttggtcagatctggaagcatctggaggcatctggaagctttggtgtcttagttatgagtttcaaagggcagtgaaaacagactggcagagctcagcgagacctgggaaatatttggggtggggaggaactgcagaatgtattcttggttcagagcatttttccctctgactctttctgggcaacagaccttttaggaatgtttgttaaatgctgaaaaaaacaggaattgatttctctctgcgtccacagccaacatgtgaggccacggcactccgtgtatactaacctggtttttctttccttttgctcaacagtgagtgacctgcaggaagaaggcaagaatgccatcaactcaccgatgtcccccgccctggtggatgttcaccctgaagacacccagcttggtacgggggttcctccgctccctgccctgagacagttgagcttccgtggcactaagttggtcttggggaggccaatgaggagcccgatagatctggcctcttgatcagatgctgggggcatttgggagtctaagttcttagctcaaggtcatctttagaaaagtccattgggaaaagcaagtccttcattaagggtttctgccctagtcttaaaacgtaagttttatttttcaggtggtgaagcaaacagattgggagaagactgacttgaaaagatagtttgttaaactcatagttctgaaaggaggtgtagcaggccactcagggccatgccatgccacgccatgccacgccacgccacaccatgccaagccacgccacaccatagcacaccatgccacagaaggccacatggaaagcactagtgtgaggcagaggcagaaggagcagggctaatgcctttatttgatattttatgtatatattttttgagatagagtctcactctgttacccaagctggggtgcggtgatatgatcacagctcatggcagcctttaccgtccaggttcaagtgatcctcctgccttagcctcctgagtagctgggactacaggcatgtgccaccccgcccacctaactttttaatttatttgtagagatggggtcttgccatgttgctcagactggtctccaactcctgggctcaagcagttctcctgcctcggtttcccaaagtgcagggactacagatatgagccactgcgcctggccccaacacccttactgtggctttctctgaaggaatgggcaaggctgggtgaacaggcctaggcctggcttgttggaatcgtttcactgggctttggggtgcaggagctgtcctgagtcttctcagtaagaagactcttcttcttccacaccacgtggcgtggcgtggtatggtgtggcgtggcgtggcatgtccccagggccaggggagattagggtgaggatattggctgggagtgtaggagccccgtgagagcccaaggaaagaggtggctggggactctgggctctgcggctcaggctctgagtggttttcatatgaaaggtgtgctcacagagggtggtttaccatctctaggaattagcttgccctggaggtgcaatctctccagagtcagcaaggccccgagatgccaagcaccagaaaatacagaaaacagggcgggcacggtggctcacacctgtaatcccagcactttggaaggccaaagtggacggatcacttgagttcaggagtttgagatcagcctggccaacatggcgaaaccgcgtctctcctaagaatacaaaaattagccgagtgtggctagcctgtaattccagctactctggaggctgaggcaggagaatcgcttgaacccgggattgggatgttgcagtgagccgagatcgcaccactgcactccaacctgggtgacagagcgagacatctcaaagtaaaaaaaaaaaaaagaaaaaaagaaaatgcaaaacacaattaatatgcttcttccctttgggccagccagagctgcccgcggcctgggcttgcagggtgggctctgccaagtggcccaggcccctgcgctcactgcctgatgtaatgggtaacagccaagacacattttccttaaagtgtgttttgggatctagctgatctggaaggcatttatggaacattctgcgtatttccaaaccctggttcgaagggaagtcccggttcatcccttttttgtggtttccgtgacgaggccaggccagcaagagcttatggagaagaaacgccgatgcaagttcagccgccaaccgacccgaagccagagctggtgatgctgcctgaggtcgcaccagggtccacggggctttctctccctccgcttagaagagagtggccccaccaggctcggtggctcaggcctgtaatctcggcactttgggaggctgtggcaggtggatcacctgacgtcaggagttcgaaaccagcctggccaacatggcaaaaccctgtctctactaaaaaatacaaaaattggctgagtgtggtggcaaacacctgaaatccccgctacctgggaggctaagtcaggagaatcgcttgaatccaggaggcggaggttgcagtgagccgaggttgcaccactgcgctccagcctgggcaacaagaatgaaactccatctcataaaataataaaataaaataattagccaggcatggtggcacacgcctatagtcccagctactcaggaggctgaggtgggaggattgcctgagtctgaagaagttgaggctacagtgagccaagatcacaccactgcactctagcctgggtaacagagtgagaccttgtctcaaaaaataataataattgaactcactcactgaatatttgcacagcacctgattctttctgaagtcctctttgtatatttcatatcctttgggctcataaatgtcatcattgtagcgaatattgggggtccactgtgaatgcttctactcctcagtcccttcagtgaccctgtgaggtgggttgtatcattatccccattgtacagatggggaagctgaggcacagatctaagatcacagagatcactagtaagtgccaaagtcttgaaccccgggcattttgcccccagagctaggctcctccccctgctctagaccctctcagtgaagatggtggccctcatcagaggtgagtaggacaggtccctgtccttgggcacgttttattgcagctggctgtgacgcacaaggtggggagggcgggggctcggttcccacaaaacactggcacagagataccaccctggcctctgggcactgcttctcctctgactgaagtggagagaaacctgaaccaggcccacctagcctgtgtggacccagacctgctgaagattctgagcccatgtctgaccccccggcaccccctggatggagcagcgcttgctgtacccactgtggtgtcccgggactgtgggctcctcgaggggtcctgcctcagtcttggagccaccgagaggagcatggcacagtttagcgaccactaaagtcacacagctcagagatggcatggcggctggtgtctgctctcagcttccttttaggaaaaacaaggagcctctcacagcccttttcttctctcccagagtccctggagtcctgttcctcaatgcaggatgtcagaaagtcccagggcacttggcagtgagggttcctggccacccgaagacctaccaaatgggagtatgcgggcccaggcccctctgctttaaacatgcctgcagtgactccggggcccactgaggtttgggaattgctcccctctaggccgcgtgagcagcccgtagcagactgagggccatgatgtgcagtggcctgcgggggcttcatgtccagggtccccggtcaaggctagcaggtcatgaatgctgacaggcagcaagggctgactgtgagctctggagcccccagatacagaggtgtttctcatctggagcaagcgcctgctctgaatcaggcccctgccccgtgaggcgcagctgctccctggtctgtgcagagcctctgattctggcctactgtcaccatcaccaggtggccaggagatcccggcgggatctgcagacacggacacactgccacacatagctgcctgcctggggcctgctgtccaccctctcaggcccactgttcccctctaggcggggtcaggaatgaaagctaccccacggggacaggtaaagaccggagatgcctctgagaaagtgtttggtaacagtaagcctcgaaacggcatctctgtcctccacctttcacagtctctgggtcagacgccccattcctctcagtggtcccgccgactgaggcaggacccctcaagaagcacacagtcctgggacatccgagccaccatggcatgctgcccagtctggggtcagacgtgggctcagagccttcaggagggagcagcgagttccctgtgggggccacatgagctgggcgggcccgaatcttgcttctcctcagttcagcgagagcaaggtgtggggacatgctagatagggcaatgctgagatttttagtgtgggttgaaggggatgtttccagaaacgggctctctgaaggctgggattgggtagtgacctgctcactctccgtcctgcaccccctctcatacacgtgtggactcacggcctggccctgctccttgcccgcctgagatgggtggtccagagggggtctcagacatgggtcacacaggcacacaaagtcctctttggggctggagagcttggaagatttggcattcgggctcaaggatctcagctggggagctgaggtctgaagggtgaaggaaacatgggccagggagagagtgtcagacagcgggagcaggtgccaaggctcagggcaggtggcagcaaggcttcaaggagtgagggaaggccggatgggctggagcagattgcaccaggagggcaggaaatgaggcgggagaggggccttggaggccacatggaggacgccggccttgatcccagcaggagtgggaggctgcggaggcctttgcagagatatcatcaggactcccgagaactccctgcacattacctggagtgtccttttcaggcatcagatctgtatgacttcaaaattagtttctccatgttgtcagagtttacactctgctgccgggaagttgcatcacatccgtgtcagcagcaaagtttcactcaaagccattttctttctttcttttgtattttattttattttattattttatttatttttaaaaatagagacagggatttcactatgtagcccaggttggtctggaactcctgggctcaagcaatcctcccgcctcagcctcccaaagtgctgggattgtaggcaggagccacttacgctcagcttcaaagctgttttcattctgaccgacatggtcagtgtccccagccccatgggagcctgtctgggctctgggaccctggtctcaactgtgtcctggccatctccacttgtatgtcctgggggtaactggcttctgcctggagcccctcttgtgccttttttcctctttaagagagaggtgtggtatagagcctcccggtgagtggagcctgggccccacccgacccatgctctgtgcaggtcccggagctggacagtgtggcagcctgagacccccttgcccttccctgtgtgtgttcagaggtgctcggcgcccgctggcttctgtgtggtgctgggcatttctgctgtggagcacgcctagccttggtgggtgccccctccgcagtcccgcctccccactgtctccacggcactgtcctccatgacgggctcagctggctgcctggtgtctgtgggatccaggctgaaacgtggagggaaagcaaacaggtagagaaatagaaagagggtgaggctgaacacgttttgctgttacacatcatcccccccacctttttttttgctatttatttctcaatattttttctgcatgttattttacatacaacattgcatattgattcttttccatggaatgtaccaaacattttccatttcattataaccatccagactcttcaaatgtatttataaatagtggccacagggaactacctggtgcctgaagctttcccacataccagattccggccagcggaggcatctcatgccctgtgaatgctgctctctccttatttctcctgaaaaatggaaatggtttggaccagctgctggcggagtctgggaggagcgaggccgggcagaatgatgagtttgacttcatccctttccagaagaggggaaggcgggaggatgccccatccaccttccagaaggcggttccttgcagtcaccctcccctagtgctgggttctctgcttctccatttgtcagagatgagttggcctccccctggttccccgtgtccctgccacccccacaatcgctgaccgtgacttccttttgtccctggcagaggagaacgaggagcgcacgatgattgaccccacttccaaggaagaccccaagttcaaggaactggtcaaggtaaggagctccgtcttggttggaatcttcctcttagggcgaggacttggctttggggttcagggctctcatggacaaagggagctaaacccggggctcctgaaagggatgttggtgctgcatgagaaggtgggcagacatgttggcagaggaggacggcagagaggatccagcccgaagtgccaagcgcctcccatgtgccctgctcggctggggctttaacgaccagtcttgtgaactctttgctggacagagctcggcaggaggggattttaggattaggaatgagtgctggcgtgagctagtgtagtaccttacagatggagttggaactccgtctggagcctggtggggtctagattcagatttaaccctgaaaagcaggaggggtcaccctggccactcctggccaggagccatctgatgccgatgcctgcgctgagtggacagtcagtttccaccacgtctggaggcgtgaatcccagctgggcgaggaacctggctgccccgctcccagaagtcagggaacagtgagggaaggggcccatggtgctggccttcttgggcagcggctgtccttctccagcgtggctcctgctcaccgtgaggcagtgcttgtgtgggtccaaggacagattgcagttttggttgctctgatcgaaaccacggtagggcttgagagagaatcccctgaagaggagaggctgtgggctctgcctgaccttggtgaacccagggtgggctcttgggcacacggctgtggcagacacttggcttccatagcccacggcgagcttgggcaccccgggattcttgaaaatgccgatggtgacagtgtctgccagaaacagacatttttctattaaaagtgctttttaaaaagcttctccaccttcaccaccacagtggacccaatgctgggctgtacaactgtgttttcatgagggctcattcagaataagtaagacggcttgcaagttatgttcttttaaaatctacattgaggctgggcgcggtggctcacgcctgtaatcccagcactttgggaggccgaggcgggcggatcacgaggtcaggagatcgagaccatcctggctaacacggtgaaaccccgtctctactaaaaatacaaaaaattagccgggcgaggtggcgggcacctgtagtcccagctactcaaaaggctgaggcaggagaatggcatgaaccccggggggcggagcctgcagtgagccgagatcgcgccactgcactccaacctgggcgacagcgaggctccgtctcaaaaaaaaataaaaaataaaaaataaaatataaaataaaataaaataaaatctacattgagaccgggcgcagtggctcatgcctgtaatcccagtactttgggaggccaaggcaggtggatcacctgaggtgaggagttcgagaccagcctggtcaacatggtgaaaccctgtctctactaaaaatacaaaaaatttgccgggcatggtggtgggtgcctataatcctacctactcgggaggctgaggcagaattgcttgaacctgagaggcagatgttgcgttgagccgagatctcgccactgcactccagcctgggcaccaagagtaaaactccatctcacagaaaaaaaaaaaaaagaaattccaaatgtcagttttagggtccacccaaagatgttgattattaataacttaaattatttaatttgttttattttttccctctgaatacccactttgttatttcaaacagaagaacgttgatgaggaaagtcactgtcttttagccacgaaaatgttgttcttgggggatatttaagcaagggatgcatgagaattatcaggcttctacaaagaaacagacccaattgtgtcaatatctagagagaggtttattatgatattggctcacttgactacggaggctgagaagtcccccgacctgccatctgcaagctagaaagctggagggccagtggtagagatgccagcctgcgtctgcagccctgagtaccgggaacagggtgggagaagatccaggtgctggcactagcagtccccggcagagagaggtgaatcccaacttcctccacctttttgttctatgggatcagatgaggcccactcgctttggggagggctgtctgctttactctatccaccaattcaaatgctcatctcctctgaacaccgttccagacacacccagaaacaatgtttcattggctatctgggcaccccagagcccaggcaagttgacacagaagatgaaccatcccatgcacctttctaaagatttttttctttgatttttgagcaatgcttgagagttcacaaactccattcacaggattatctccttgaaacaacaccctggggagctgtgtcattcttgcttccatgtggagactcagagagaggtgaaggggctgggcgccatggctcacacctgaaatcccagcgccctgggaggccaaggttggggggaatcacttgagcccaggagttcaagaccagcctgggcaacatggtgaaaccctgtctctaccaaaaaaaaaaaaattaactgggtgtggtgggaggcacctgtaatcctagctatgcaggaggctgaggtgggaggattgcttgagccccggaggtcaagggtgcaatgagctaagattatgcctgtgaatagccactgcactctagcctgggtgacagagcaagaccctgtctcaaaaaaaaagacaggtttaagtaactccccacccccaggtgctggggttagtgatgtgtctgggcttgaatggctctgtccatttggtgctgtgttcactgagccaagttgagtgcgtgtggggtcctgtgctgggccctgggattcggggatggataagtgacttccctgctatgcaggatttgatttatgttcctcctggatgtctgcagtgccacccacccctgcctttgctgctttgctgccaaagacccccaggctgttttggccttggtggggcgagggctggctgctgcatgtcttccaggtttcagattgagaagaaggccacattgaggggcatggggtggactgatgggaaagctaattagcatcctttggggcaaagtacaactatggggcaaaatacaactaagaacaggaaggagctgaggaataaatgcctctccccgacttccctgatgtgggcttctgagaccatggctcatggagatgggctgcatggctgatcatcagctgggttttcttctgaagccatagccagctcatgcacctgcctcacctcccttcccctccctgttgctcgtctagggtgccctcccctcacccccaaacccctgccaaagaaaaggcatcagcagtgagctttgtcctggctctgtttttcagggaacctgggccagaatcatggtccccaaagatgaccatgtgataatccctggagccattgactatcatcttacatggcaaagggacatggtgggtgtagttagtgaccttgcaatgaggaggtcatcctggatgatccaggcgggcccagtgtgttcgctagtgtctgtataagagggacatggggagctttgactgcccatgaacatggcagcttgaccctggaggcaaggtggtagcttctggctctgaagatggaagaaggggccatgcactaatggatgcaggcggcctctgcctctagaagtggaaaagacaaagaaatggattctccactagagaacccagaaggaaccctggagcctccagaaggaaccagccctgctgacacctggattttagcccagtggaacagattttggactttgacctctaggactgcaagagaatccactgagccgttggaagcccctgggtttgtgttaatttgttacagtagccacaagcaactaacaccatcctgttctccaggctgctgcctccagctgcagctggcgtgccctggccactggggccaggcagggtgggttttgatacctgcagcggcagcatccttggccatttcctggaagggccagttgccagacactgagatgcctgttactgcaactgtcccaccagcctggagcacgtgtttctggagacaggcaaattctggaaggctccacctgctctcagactgcaggttgcgtctcaaagcaggctggcagacattttccactcttgatcaatcattttccaaaataagcatagacacagcaacccggagagcagcttcggtttggctgtcggtggcgtgttagttactgtagtggtggcacagaggcgatatacgttaaatattagttctcactgactatagccttttaaacagagcagcgtgtgggtggcagcaggtgagttggctatactgagcttgggctgcccttggttgattcttgtttgtcaggcatgcagggggctctctgtgcgtccaggcatattccctgtctggatttgcttgtgttcatggattttcagcacctcctttcttctggtttgggaatgagtcaggtcctcactacacaaggccagagcagtatgcgtgtgtgggtaggggtgagcaggtgtcattccctgcctcccctcctccttcactgccccagccaccctgaccaccttgctgttctgaggacacactgagccagtgcccactgggcatcaggtgaaaggggacatcccacaagcccaccctcacttctgacaccaatggcaagttcaggatctccaacactgccctgaggtttggtcatttgctagagggactcccagaacccacttaaagctgtcaccctcacagttacagtttctgatggtgaagggatacacatgaaaatcagccgagggaagagttgcccagggcagagttgaacgcacccacacagcacctccattgtcctttcaccatggggtcataggcagcgttactctcccggtgatgtgggacaatgcgcatgcagtattgccagccggggaggtcatctgagcctccgtgtccagagtttctgctggagctcacttgcatgggtgtggctgactgtccacatggctcatctgtctccagcccctccagcagctggctgatagagtgcaacccaaagccccctccctgaatgacatagttactccctggctggcccgagggccccaggtaagcagaggtactttatctggcagggcatttcggagcttaggagatcacctcccaggggctgaggtcacaggcccaacctctctgtgggcaaggttaggttcattatcacgtacctggtctttggactttcaaaggcccatgcctggagctgtcttcaacacttctttcagttttctctcaatgcttcctccttggagacgtatttcctgcccctgtcactccatcactctcctcctaaccccagttactttttctttgctgggcttgctgctgcctggagtcatttcctatttactagtttgtttttggtctttctcctcccctagaatgtaatcttatgctgtgagggaccatgaccattctcttcccagctaaatccccagggctggagttgtgctgcacatgcagagctaattcatccttgatagatagtaagagaaccgatgggggtctgtgtcagcagcaccaacatgaggttcacaccagcgtctcccaagatggcatgcggcttagagacaagacagatgtggttgctttttgttgttgttgttttgtgttgttgttttgagatagggtcttactctatcactctatcacccaggctggagtgcagtggcatgatctcagcttactgcaacctctgcctcccaggctcaagtgagtctcctgcctcagcctcccaagtaaatgggattataggtatgcaccatgatgcccggctaattttttgtatttttagtagagagggggcttcaccatgttggccaggctggtctcaaactcctgacctcaagtgatctgcctgtcttggcctcccaaagagctgggcttacaggcgtgagccattgcatgcccagccagatgtgtttttttttttttttttttttttttttgctctaccccaaacctgtgagatggcagggaggaggctctgggaagagggggtgagggttggggtaaacctgtggattggatgctgatgtaggtggtcccaggtgctcccttgggaggagatggacagtccggatggtgcagacaaaacacctccatccacattacctgcgtaattctctttgctttccagaacatcctttgtgtactgtggactgtgatgatctaatgctagtggattacatctaagtaggccttagtagaagccacctcccagtggttcctcggaggcatttggtccagaagcagatgattttagtgcaaagcacagaccgtatgcaggcctgagcagatcaggggacagacagatctggctgacatcctgatccgctggctgtggtggtgtggccattgcttgtagccacattgcagtcttgaatgtcccccttggaaatgggggacatttccaaggatgcctgcctggtcctctagttttctctttctctgttctctgtcatctgcacttttttcctcttgtcttgattgcttgtcctgtctcccctagtagacaccccctctgacctctgctgcctcaggactgttgctgtataaaatattgtgagatgccctctgctcctgtttaaaaaaaaaaaaaatccttagctctgggtaagctaggcactgagaatgaggccagtcattcaaaacttgtctctgagcattgattatactcatgtattatactgttaaggggtgaaggtcggctctagggtcagcttcctggatttaaatcccaactcagattaaagtgggagaataatagcaccaacgtgacaacctcaaagtgtcatttgtaaggataatgttagatcatacacttgatcacccgttagcagtgtaagggcagtgtgggaacatgagcatgaacagggcagcccagaagggagttgaatggacagatgggcaatgccagtttggaagtgggtgcatgcatccggtgggttcaggagcctggaagacttatccaaaagtcatctttgctggtgtttcttcctgtgtattttctctaaccttctccagcagtgacctgaattacttatgggtgaacactgaatgctgcccaggcaactagaggtttatagatgagatactttaaatttttaatgattcttaaaagagggagtggctattcttatgctttccagaatgaatagccaagggaaacctgtacagttgccatataaggagaaacctagacctggccttagcctctaggtcctggtgcagattcttagcacgtagcgcctaaaacctttgcgatttcctgagtgataggagcgtcttttgttattcataatgagatctgggtttatgctaacgaggtgactcagggtgggggctggccccagagtaaccaacacaggattagagggttgggtctatcagtcctacccacccccagcctctgggtggggtggagaggggctggagagtgaatcaaatcaccaatagccaatgatgtaatcagtcacacttacataatgaatcctccgcaaaacccatcaacagtggggttcagagagctttggcgctgggaaacacacatggaggtgctggagggggacacgcagggagagggcatggaagccccgcctccctccccgaaaactctgtcctgtgcagtgtttcttattaattacactgtccctgagttctttttttttttttgagacggagtctcacactgtcggccaggctacagtgcagtggtgcaatctcagctcactgcaacctctgcctcccgggttcaagcgattctcctgcctcagcctcccaagtagctgggattacaggcgcccgccactacgcccagctaattttttgtattttagtagagatggggtttgaccatattgccctggctggttgcgaactcctgagctcaggcaatctgcctgcctcagcctcccaaagtactgggattacaggcatgagccaccaccacgcctggcctgctgtgcctgagttctaacctttatagtaagttggtaatcctcagtaaaatgcttttctgagctctgtgtgttctgccaaatcactgaacctgaggtgagggccctgatttgtaatcagtgggaagaggctcaagtagcctgggagccccatctgcagctggtgtctggaatgaagtcaatttggtgggactgagccctcagcctgtggggtcaactgtagctagtgttagaatcagactgaactctaggacaccccattggtatcagataatcagagaattgctgttggaattttcatgtgcgtccgtgtgaagagaccaccaaacaggctttgtgtgagcaacatggctgtttatttcacctgggtgcaggcgggctgagtccgaaaagacagtcagcgaagggagataggggtggggccgttttataggatttgggaaggtaatggaaaattacagtcaaagggggttgttctctggtgggcaggggtggatctcacaaagtacattctcaagggtggggagaattacaaagaaccttcttaagggtgggggagattacaaagtatattgatcagttagggtggggcaggaacaaatcacaatgctggaatgtcatcagttaaggctgtttttacttcttttgtggatcttcagttaatttaggccatctggatgtatacgtgcaagtcacaggggatgcgatggcctggcctgggctcagaggcctgacaggaatgacacattgggtgtcagaaaaaaaacacagaaaactccctaagcagattggttgaaagcaggctgactgcatgtcatctgggggtgcgtctccccccaagagcaggtttcacatctcattccccggttgattggacaagacccttcctgtctttaagttctgttttcttcctccctttgtctctccgaagaaaatcagctgcatgaaaacgatcctctgggcagaaattggtgctgttggagccgcacagaggtgccctcccgtgccccctggcccccaccgggccgtgtctcctcctgcctgttgcaatcagccctcgtccgactctttttggaagtgattaaaacataactgtcatagctctgggggagacaggctgcagatcctgattataattcagaaggatctaaagaaaaagtaattttttaaaaaaattctggttaaagccaaagctcataagacgtgtgtgatggagtggtatgcaagagcacaattaatgtatgtcctagacatctgcccacaggattcagggctggcaaatgagtgcgtccctaaaaataatgactagtgctatctttaaaaagtcttttgtggcatagcagattaagatggatggcctgggaagtacagtggcagcgtgtgctgtggtatccaggaataagttgtacctcctcggggtggcagtggaactgggccgtgaacagcttttgcttcccagagaggactgccatggcctgctgcatggaatttgattttaatctgtttgttatttttgggtttggtcttggactgggtttgaaatccagatgtgacttttttttttcttttttcagttttctttatagcagcaatgttgtatcttgtgtgtttcctaacaagactgagctctgagcaaggcagcctctggaaccaaatgtctgcaggcccaggagacctttctagaaagttcataggtgggaggccgaggcgggcggatcacgacgtcaggagatcgagaccatcccggctaaaacggtgaaaccccgtctctactaaaaatacaaaaaattagccgggcgtagtggcgggcgcctgtagtcccagctacttgggaggctgaggcaggagaatggcgtgaacccgggaggcggagcttgcagtgagccgagatcccgccactgcactccagcctgggcgacagagcgagactccgtctcaaaaaaaaaaaaaaaaaaaaaaaaaaaaagaaagttcataggcggttctgcagtttgagccccttctgtgggtctgtgcctgctttagccgcttgagatatggcattgaacaaaacacaggccccgcctgggagaagctgccaggccagctggggagacagacctgataagtgaaaatgagatcgcgtggcctgcatgctccgaagaagactaaggcaggaaacaggactattttctcccgactgaattgtcctggtatccttgttaatatcagttgactgtgacttgagacttatcttggacacccctttctgttccgtgggtctgtgtctgccttgatgtcagtcccacagtttcgacgactggagctttgtagtcaggtgtgaaacagtggagtgtgggtcctccagttttgttcatctttttcagattgttttggcaatccaggagtcctttgaatttacatatgcattttattttattttaattattaatattattattattttttagatggagtcttgctctgttgctggagtgcactggtgcaatctcggctcactgcaacctctgcctcccaggttccagagattctcctgcctcagcctctcgagtagctggaattacaggcatgcaccaccatgcccagctaatttttgtattttcagtagagacagggtttcaccatgttggccaggctggtctcaatctcctgaccttaagtgatccaccagcctcggcctcccagagtgctgggattacaggcgtgagccattgcgcccggcctatatatgcatttaagacctgcttgtcaagttctttagaagccatctggatagtgattaatttgtaaaaatgatacttattatctttttgaactgccaaagtaatatatgctgctgaaaacctggaagacagaaaaatccaatagaaggcagggctaattttttttttttttccatgtatgtcccttcaggcttctctgtgtttttcatttttcctacacaaatttggaatcattccagagctagtaagcatctagggccacatttggactagtaccttgggataaattagagctggaattgccgggtcatatagtgtgcacagggctagggactgacttattttcctttctgaatgaagactctgaggtctagagaggttaaatgagtgactcaaggtcacacagctaaaactctggtggagctgggtcttaatgcagaccctacatattcatgccatgctgtatttatacaggcatgtacaccagcgggtcgggattttagggggtgttttaaaattctgcctgcaaaaccttttttttttttttttttttttttttttttttttgagacagggtcttgctctgttgcccaggctggagtgcagtgtcaccatcacagctcactgcagcttcctcccaggctcaagcaatcctcctgcctcagacccctgagtagctgggactacaggtgtgcactgccccacctggctaatttttaattttttttgtagagatggggtctcattttgttgcccagggtagtctcaaactcctgggctcaaacactcatcctgcatcagcctcccaaagtgctaggattgcaggtgtgagccgctgccccaggcaaacccattttaaagccatgagccaaaaattataaaagacatgcaaaatattatgagtagtcacttatctagtatttgcggcatctctcaggcttggggctttgctgggagctctgagggggtggaagaggctctgtcactggccttacctggctgtcaagggctgagtgtttggtggagggaagacgtctgcagcctgggaggctgcgggtcagaaggaggtcagccggggagctgggaggatcgtggggaacccgtggtggaaatcagcatggcgagagagtggaagcaggcagaggagggctttgaagaccaaaaagggtagttaggattgctgctctgtgtgtctgtaaacttggtgttgtctctcgaatttaaatgacatgctttgaaaacaaaaaaacaaacaaaaaccaaacccataaaatctcactaagtggccagagcaagttcccggggggtggcgcatagatgcagcggtctgggttctgtggctgggggagttggcttggggtccgtggctgggtcagtcttcaagagccaccctgggtggcactccaggtctcttggtctggggggaataccctgaccccagcggtttcacggcctcctccccactcagcctgggggagagtccagggtcggccctgtccccctccccccactcctgtcactatcagtcccctgtgctcagcttactggcagggttcctcctggctgtcccctctgcctccagcgctctttcctcaggtgtccacgcagctcgtcctcacccttttctgtctctgctcagatgccgcctgaggctcccaaaacagggtctcactctgtcacccagggtggagtgcagtggtgcaatcacagctcactgcatccttgacctcccaggctcaagcgatcctcctgccagcgagcttgttacaattcctgcaccaacacggatacattgttactaactaaggccctacaccagcaaagatacattgttactaagtaaggccctgcaccaacacagatacattgttactaagtaaggccctgcaccaacacagatacattgttactaactaaggccctgcaccaacacagatacgttgttactaagtaaggccctgcaccaacacagatacgttgttactaaataaggccctgtaccaacacagatacattgttactaactaaggccctgcaccaacacagatacgttgttactaagtaaggccctgcaccaacacagatacattgttactaactaaggccctgcaccagcacagatacattgttactaaggccctacaccagcacagatacattgttactaaggccctgcaccaacacagatacgttgttactaagtaaggccctgcaccaacacagatacattgttactaagtaaggccctgcaccagcacagatacattgttactaaggccctacaccagcacagatacattgttactaactaaggccctgcaccaacacagatacgttgttactaagtaaggccctgcaccaacacagatacattgttactaactaaggccctgcaccaacacagatacattgttactaaggccctgcaccaacacagatacattgttactaactaaggccctgcaccaacacagatacgttgttactaagtaaggccctgcaccaacacagatacattgttactaaataaggccctgtaccaacacagatacattgttactaactaaggccctgcaccaacacagatacgttgttactaagtaaggccctgtaccaacacagatacattgttactaactaaggccctgcaccaacacagatacgttgttactaagtaaggccctgcaccaacacagatacattgttactaactaaggccctgcaccaacacagatacattgttactaaggccctgcaccaacacagatacattgttactaagtaaggccctgcaccaacacagatacattgttactaactaaggccctgcaccaacacaaatacgttcttactaagtaaggccctgcaccaacacagatacattgttactaactaaggccctgtaccaacacagatacgttgttactaagtaaggccctgcaccaacacagatacattgttactaaggccctgcaccaacacagatacattgttactaagtaaggccctgcaccaacacagatacattgttactaactaaggccctgcaccagcacagatatattgttactaaggccctgcaccaacacagatacattgttactaactaaggccctgcaccaacacagatnnnnnnnnnnnnnnnnnnnnacccataaaatctcactaagtggccagagcaagttcccggggggtggcgcatagatgcagcggtctgggttctgtggctgggggagttggcttggggtccgtggctgggtcagtcttcaagagccaccctgggtggcactccaggtctcttggtctggggggaataccctgaccccagcggtttcacggcctcctccccactcagcctgggggagagtccagggtcggccctgtccccctccccccactcctgtcactatcagtcccctgtgctcagcttactggcagggttcctcctggctgtcccctctgcctccagcgctctttcctcaggtgtccacgcagctcgtcctcacccttttctgtctctgctcagatgccgcctgaggctcccaaaacagggtctcactctgtcacccagggtggagtgcagtggtgcaatcacagctcactgcatccttgacctcccaggctcaagcgatcctcctgccagcgagcttgttacaattcctgcaccaacacggatacattgttactaaagccctgtaccaacacagatagattgttactaaggccctacaccagaacggatacattgtacattgtaactaaagccctgcaccaacacggacacatcgttactaaggccctgcaccaacacagatacattgttactaaggccctacaccaacacagatacattgttactaagtaaggccctgcaccaacacagatacattgttactaaggccctgcaccaacacagatacattgttactaactaaggccctgcaccaggacagatacattgttactaaggccctacaccagcacagatacattgttactaactaaggccctgcaccaacacagatacattgttactaactaaggccctgcaccaacacagatacgttgttactaagtatggccctgcaccaacacagatacattgttactaaggccctgcaccaacacagatacattgttactaagtaaggccctgcaccaacacagatacattgttactaactaaggccctgcaccaacacagatacattgttactaaggccctacaccagaatggatacattgtacattgttactaaagccttgcaccaacatggacacatcattactaactaaggccctgcaccaacacagatacattgttactaaggccctgcaccaacacagatacattgttactaagtaaggccctgcaccaacacagatacattgttactaactaaggccctgcaccagcacagatatattgttactaaggccctgtaccaacacagatacattgttactaactaaggccctgcaccaacacagatatgttgttactaaggccctgcaccaacacagatacattgttactaaggccctgcaccaacacagatacattgttactaagtaaggccctgcaccaacacagatacgttgttactaactaaggccctgcaccaacacagatacgttgttactaagtaaggccctgcaccaacacagatacattgttactaaggccctgcaccaacacagatacattgttactaagtaaggccctgcaccaacacagatgcattgttactaactaaggccctgtaccaacacagatacattgttactagctaaggccctgcaccaacacagatacattgttactaagtaaggccctgtaccaacacagatatattgttactaactaaggccctgcaccaacacagatacgttgttactaagtaaggccctgcaccaacacagatacattgttactaataaggccctgcaccaacacagatacattgttactaagtaaggccctgcaccaacacagatacattgttactaactaaggccctgcaccaacacagatacattgttactaagtaaggccctgcaccaacacagatacattgttactaactaaggccctgcaccaacacagatacattgttactaaggccctacaccagaatggatacattgtacattgttactaaagccttgcaccaacatggacacatcattactaactaaggccctgcaccaacacagatacattgttactaagtaaggccctgcaccaacacagatgcattgttactaactaaggccctgtaccaacacagatacattgttactaagtaaggccctgcaccaacacggatacatcccattactaactatggaggtgctttattcagatatcctcagtgtcacctgttctcctttggccgtctcagggttcctcccaggacaccacattgcattcagtcctgaggcttctctgggctctgacagtttctcagactttccttgtttctgttgaccttgacagttttgaggattactgctcagagagtttgtagactgtccctctgttggggtttgtctgatgctttcttcatgattcgatcaggttgtcactttggggaggaagtctgtgaggtcaagtgccattttcatcgcatatcggggcacacccatctgcacaccttcgctattggcgtcggtcgtcatcacctgtgcaggcgtgctcacccggtttctccactggatccagctttattttcctttctatcaaccatcacaacctgaaactgtggggcgtcccgtgtgtctcttggagtctagtaaaatgtaaggccctcaagnnnnnnnnnnnnnnnnnnnnnnnnnnnnnnnnnnnnnnnnnnnnnnnnnnnnnnnnnnnnnnnnnnnnnnnnnnnnnnnnnnnnnnnnnnnnnnnnnnnnnnnnnnnnnnnnnnnnnnnnnnnnnnnnnnnnnnnnnnnnnnnnnnnnnnnnnnnnnnnnnnnnnnnnnnnnnnnnnnnnnnnnnnnnnnnnnnnnnnnnnnnnnnnnnnnnnnnnnnnnnnnnnnnnnnnnnnnnnnnnnnnnnnnnnnnnnnnnnnnnnnnnnnnnnnnnnnnnnnnnnnnnnnnnnnnnnnnnnnnnnnnnnnnnnnnnnnnnnnnnnnnnnnnnnnnnnnnnnnnnnnnnnnnnnnnnnnnnnnnnnnnnnnnnnnnnnnnnnnnnnnnnnnnnnnnnnnnnnnnnnnnnnnnnnnnnnnnnnnnnnnnnnnnnnnnnnnnnnnnnnnnnnnnnnnnnnnnnnnnnnnnnnnnnnnnnnnnnnnnnnnnnnnnnnnnnnnnnnnnnnnnnnnnnnnnnnnnnnnnnnnnnnnnnnnnnnnnnnnnnnnnnnnnnnnnnnnnnnnnnnnnnnnnnnnnnnnnnnnnnnnnnnnnnnnnnnnnnnnnnnnnnnnnnnnnnnnnnnnnnnnnnnnnnnnnnnnnnnnnnnnnnnnnnnnnttgttgctactaaggccctgcaccaacacagatacattgttactaagtaaggccctgtaccaacacagatatattgttactaactaaggccctgcaccaacacagatacgttgttactaagtaaggccctgcaccaacacagatacattgttactaaggccctgcaccaacacagatacattgttactaagtaaggccctgcaccaacacagatacattgttactaactaaggccctgcaccagaacggatacattgttactaagtaaggccctgcaccaacacagatacactgttactaactaaggccctgtaccaacacagatactttgttactaagtaaggccctgcaccaacacagatacattgttactaactaaggccctacaccaacacagatacattgttactaagtaaggccctgcaccaacacagatacattgttactaactaaggccctgcaccagaacggatacattgttactaagtaaggccctgcaccaacacagatacattgttactaactaaggccctacagcaacacagatacattgttattaactaaggccctgcaccaacacagatacattgttactaagtaaggccctgcaccaacacagatacattgttactaactaaggccctgcaccagaacggatacattgttactaagtaaggccctgcaccaacacagatacattgttactaactaaggccctacagcaacacagatacattgttattaactaaggccctgcaccaacacagatacattgttactaactaaggccctgcaccagaacggatacattgttactaagtaaggccctgcaccaacacagatacattgttactaactaaggccctacagcaacacagatacattgttattaactaaggccctgcaccaacacagatacattgttagtaactaaggccctgcaccaacacagatacattgttactaaggccctacaccagaatggatacattgtacattgttactaaagccttgcaccaacatggacacatcattactaactaaggccctgcaccaacacagatacattgttactaagtaaggccctgcaccaacacagatacattgttactaagtaaggccctgcaccaacacggatacatcccattactaactatggaggtgctttattcagatatcctcagtgtcacctgttctcctttggccgtctcagggttcctcccaggacaccacattgcattcagtcctgaggcttctctgggctctgacagtttctcagactttccttgtttctgttgaccttgacagttttgaggattactgctcagagagtttgtagactgtccctctgttggggtttgtctgatgctttcttcatgattcgatcaggttgtcactttggggaggaagtctgtgaggtcaagtgccattttcatcgcatatcggggcacacccatctgcacaccttcgctattggcgtcggtcgtcatcacctgtgcaggcgtgctcacccggtttctccactggatccagctttattttcctttctatcaaccatcacaacctgaaactgtgggcgtccgtgtgtctcttggagtctagtagaatgtaaggccctcaaggcagaggcctcgtctgtcctgtttgtcaccagagcctggtccgcagtggtgcctagtaagttagtccacccattcaccacatccttacagagctctggcgccaggcagcaagtgctggtgctgcggacagagccacagacaagccggtcatagcttctggcctcatagaccttggagtctaacaggggagagcctttcaaagatttgctcccattgctaatgggacaggatgagacagggtgctgggggactgagagctgtgatgggggatgctgcctggagggctggggtggtctgagctctggaggaggaagtgctgctcaggtagtgagggagggggtggtatctgggttaggggaagtggcgtgtgcagaggccccgtggcgcagatgagcttgggctatttgaagaaccccagcgaggaggcagggtgttcaggtggctgtggctgtggcccaggggcaagagggagatggggaggagtggaactggttaagaagtggacagaagtagggtgagaaggcaaagtccaggatctgagacaggaggatggtggccttcctgcctcccttccttcctgccttccctggaaaggagcacgcctggggtgtggtgagtcctgttagagatgctcacggaaccccctctccccaccccgccccgtggcaggggcatggagaggcgggccctgtgcttagggggtcctgggttagggacggcgctggaagttgcaggagggcagaaaccggcctctgaagagagtggggagggagaaggggagctgtccagggccctcaggcatgcatcatgtaagggtcaggggagtcagggaggatcccccaaaggaggctgtagagggtgaaggaggagggcaggaagccagtgagtgtgggggtctgtgggccatggggggtgggggaggcagctctttgagaactgagggggttcgggtgcagccctgggactcccaggccagtgctctccctccccctgccagccacctcgcagagagatcccggggtggaagcagggtagttggtgctgtgccctgaccttcagaggtggcattgacaagaccagaatgccacagggccatgcacctctccctgcaaaccgccctttaatttatttttacctctgttccttgtgggcttgtgtgtcaggttcgatatttttatgttactgggaaaatagaatgtgcttcacagaaatttgccttgtggccaatattgcaggttgcagctgtttcagagtgacaggggacggtatattctggacttgtgcccttttgttcatctctgagaggggccataaactcccatttccgagaggttactgggaccaatgagatcatttattagttttccttgcacaggaaaatcacacactctgtgccattgattgagtccattttattttgtggaatagacatgtcagaagcaggattggccaggtggaattgtgtttggcgggagtcctgtctttccataggtactttcataatggaagcaatctccttctgaagtgtatcacccggtgaactgaatggaaaatctcttgtgaaaaggcttaagaggaaggctggcctggaaaaatgaaactcacatccacagagagacttgtacctgaatgttcatgtcagcaccactcacaatacctaaaaaggggtgataaccgaaataaccatcaaccaagggatggagaaacaaaatgtggtcccccatgagatggaatatgattcagcgtaggcacgaaagaaggacggaaacatgctataacatggatgaaccttgaaaacatgctcagtgaaagaagccacacatgaaagggcagacatcatcggctcctattaatatgaaatgtccagaaagccaaatccgtggggaggggaagtagatcgaatcacacgcttttaaaggatgaattgtgtggagtgagaattctgtctcaataaggatgcatacaaaatgcagctgacggtggtcacaccaagcctgtcagtaatgatgcataacttccctttgctgtcctgggttagggtgggttgagacttagggtgaccagggaggaatggatatcttgtgggtcaccttgactgtcttggggtgatgagagggcagtattaccaatgcttaatcatttgcccccataccaaggtgaacacgagatgctctggtcctagtggctgcagagttgtgcagcctctgtccctgtgctagctctggacctggtggtggccgcagagctgtgtagcctctgtctctgtgcttgctctggtcctggtggccacagagctgtacagcctctgtccctccacttgctctggttctggcggctgcagtgctgtgcagcccctgtctctgtgcttgccctgtccttgtggtggctgcagagctgtgcagcctggccccagagctgtgcagcctctgtccctgtacttgctgtggtcctggtggtggctgcagagctgtgcagtctctgtttctgcactttccctggtcactgcctcattgccgtggcgctggtggactgaggccataatgcctgcgtctcctgcaggtcctcctcgactggattaatgacgtgctggtggaggagaggatcattgtgaagcagctggaggaagacctgtatgacggccaggtgctgcagaagctcttgggtgagttcacagcagggacagctctgtcccacccccatctccctgcagcggccctgggctgggccaggattctctgcatagtgacatcggccacaggtcctaggaagacactcaaagctgcagtgtgcatctcccaggtggtgcccaggccctgggctgtggcttcagggtcctctctccccttgccgtttctacagagcacccagccatggggcagcagcaggttggggacagcttccaaaactgcctgcggctcccatcctgttgggtctcaggcccactttgtgtccctgccaccctcttttgacttgaactccttcggttcaggatgggaggcagcaggagggaagcgggtctgcagcaatattctgtgagtgaatgtgtcaccaaatacatgatagctcatgttccctcaccaggggcgggctctagtgtctgcatttgctgggtgaaggcagtttagtgatcttcccgggactgactgatgcatggtttgatgtgcagacaaaccggttgtttattcatcagatgttggatgagtcccgagggctgggtaccagggatacggtgatctttgaaacagacgtggtccctgtcctcagaacttacagtctgtctgaaaagacaaatatttttgaatggttacagttactgttcagattgcttgtgatgagggccttcggagatgccgcaggttctgagtagaggacgccggcctggcctgggggtggggcggccttgcagctcatatggaagaacgagcgaagagttgccaggcaaagaacggaagagcagagttcgcagatgatgcatgagaggaattcttggacttgtagtgggttctcacgatgcctggcactgtcatgtctcattgtcacaatggtcctagggggcagtactgccatcgccttcgacaggtggggacgttggggcccacagtctcctggtgaacagccgggcagcctggccccaagcatagctcttgagcccggccgcggggcctttctctgacctgtctacggagcagccccaggtacagggcctgggtcaggcgctcctgcatgatcacagctggttctcacaacagccctgggggtctggctgaatgagcagatgtccctggttgtccccacgatgccttttgtttggatccaggagtgaatcacacatgaacgtttgtctcttcttttaggcttctttcatctggaaccgccttccctttccctctctccgttctgttctgtctttctgtcttttatgacgttttggaagggtctgggcctcttgtcttgtagaatatcctcccatcgggatctgtctgtctcctcacgatgagatctgggtcacatgtttctgctgagagtgtgactgcgctgcctgcttgtcctcctgggggcatcgtatcaggaggagcacacaatgtcaggctgcctgtcattggtggtgctgacagtttgatcactgggttaaggcagtggcctatgggtttctccattgtaaaggtgcttctttcctgttaaaaaaaccacttttttatttgttctattttggtagagtcaggatctcactcagttgcccaggctggagtgtagtggggtgaacatagctcactgcaccctcaaactcctgggctccagtgatcctcacaccttggcctctagagtagctaggactacagatgtgtaccaccacacttggctgttttttttttttctttttttgaaatggagtcttgctctgtcacccaggctggagtgcagtggtgcgatctcagctcactgcaacctccgactccctagttcaagtgattctcctgccttagcctcctgagtagctggggttacaggcacataccaccatgcccaggtaatttttgttttttagtagagatggagtttcaccatgttggccaggatggtcttgatctcctgacctcatgatccacccacctcagcctcccaaagtgctgggattacaggtgtgagccactgtgcctgactggctaattgttttgtattaaatttttaaatttcatttttttgtgttagagacagggtccttgctttgttgcccaggcctgttttgtactggcctgaagcaattctctcatgttggcctcccaaagtgttgggactacaggtgtgagctaccatgctcagcccttctttcctttttaatacatggtctctagaggggcagactctgggactttgtgaacgtcctgttcacccatgatgcgctcccaatgattttatcatctgctgattatcattctctaaattatgctaaatatcatctctaaatattatgctggaggttgcaaaatagtgatttctgtatctttatcatggcttccccacttattagctggcattttcttctgtaaataagtgcttttcttctcctgtgtcctttttaaaaaaaaaaaaaatcccctaaaatagaataacacattcccctggactgatgaattattttatgttcaaaagagaatggtaattagatagcaaaatctgggccttatgggtgcttgtggctcctggggtgtcattgcttctagtctctttaagccaaaagaggtagcaaatatatagttttttaaaaattgtgagttcacactgctacttctaattccagttcaatgctacaagtttatcccttaactgtcagcattcagtattccagtctccagggagaaccttggttccagaaatatatttgctatttactctgattgcatacaaaaatagtgtcagaattacaataccaatacctctatcaactacaaacatgctaggtacaagatttctttgccattattttttaagtacaatatatccactaagagtatatagtcagaattctgtgtccagaacttaactgaattattttctttttgagtggtcatgtcatccatttaatgtataaataaattaatttgtttctctctgtatttagtttttgtgtatatgtttacatttaattttatttaatattacttttaaaaatgtaaagcatttacatgcttcaaaagtcaaaactatggaaatgacataccttgaaaggtcttagccaggtgtggtggctcagcctatcatcccagcaccttgaggggctgagccaggaggatcacttgagccgaagagtttgagaccagcctgggcaacatagtgggacctcgtctctacaaattaccagtcgtggtgatgtgcaccgtgcacctgtattcccagctgctcaggaggctgaggcaggaggatcacttgagcctaggaagttgaggctgcagtgagccatgattgtaccactacattccagcctaggcaacagagtgagaccctgtcgatcaagagagagagagagagagagagagagagagagagagagagagagagagagagagagagagagagacagagagagagagagagagagagagagagagagagaggtctcactgctttctctcccacgtatacactcccaggtaacaattttcaatggattctgattttatccttcttatgtttctttacaaaaatgtccatatacacacctactcatttcccttttattccttgcataaaaggtgatgtattttgtacattcttttacacaccctgcttgtttcgcttaatatgttctaggaatccttgcatgtggagatcacctttctttttctttatggctgcattgtactccactgtgtggatgttccttcgtttattcacccagtctcctatgtggggcatttttgtcatttctaatatttttctatcaccagtaatattgtgggaatatcctcgtgcagatgttacagaaactagaattgttgacctcaagtgtaatgggttgcttccttgagctgaccactgtagaggaaggaattctcaaattctgagaggcttcacctctctcacctctggccttcccaggtctgttgtgccttggttgatctttcctgtagccactttctgtcttccctggactgttcagtgtgcagacatgatgtaatatttccattaaaaaatggctcccttgctcctgcaacactccaatttctctgcatcactcaaatgtattgaccattagatttggcaccggatgggtcattggtggcccagatgagagcagttttggcgcagtggtgggggtaacacgctgatcggggagggtccaggggcagagaactgtgcctttgaggtacataattttgagagggagagagaggaagggagtgaacctgtggttgctgcagctgcttttcttttcaagacagggtctcactccattggctggcctggagtgtgggggtacaatcatggctcactgcagcttccacttcctgggctcaggtgattctcccaccttagccgcccgagtagctgagagtacaggtgcatgccaccatgcatgacttattttttgtattttttatagatacgaggctttgccatgttgcccaggctgatcttgaactcctgggctcaagcaatccacccacctcagcctcccaaagtgtggggtttacaggcatgagccactgcgcctggccaatacgaggctttgccatgttgcccaggctggtcttgaactcctgggctcaaacaatccacccacctcgggctcccaaagtgtggggtttataggcatgagccactgcgcctggccatagtagctccttttcatgtctgtccactgggaaccatgcaagctgcctgctgaaattacgtggatggagcccctggcacagtgcctggcacaggtctgtcgtcaataagcaggagttgttattgctgttgttttttaaacagacaaataaatgccaagagcagaactaaggagtatctggctcgctgctgggtaccccatccaccccaagtcccctgggtgactggcacatgacaaatatttgttgattaagtcaatgaaagaattcctgcagtttcattacctatgaagattgtggggtcctcttgtgggacatgaaagggggacagatagatgagtattgtttggatttttggtcctcagtgccatccacagactccagaagggatcagctatttgctgaacaatctttcagttctcatagagccctgatatgttttcagggtccacaaatgcctgtgacggtggcctcaagaacccagtgtccccttgtaggtgggatagcatacctcttaaaggtcagcatgagattccacccatgtcatccccagcattggtggggtcagcagatcctctctctggggtttcttttctgctcaacctccctgctttgatggactgcacagacaagccccatcttggtggaagggtctccccatgggctgtcctggagggtcactcccacagatatgccccatcctggtggaagggtctccctgggggctgtcctggagggtcagtcccacagacaagccccatcctgtgggagggtctccccgtgggccatcctggagggtcagtcccacagacaagccccatcctggtggaagggtctccccgtgggccgtcctggagggtcactcccacagacaagccccatcctggtggaagggtctccccatgggccatcctggagggtcactccctcagggcagggctggtgactggggtgggatcatgtttttctccgctgttgtgacagaggagtatctgctgcaggggatacgtggactgcggggggactgccacaaggatgtgaatgggtagggggtggggtgctgtttaggagagagagagactaggggagcccctgccagagaaacttggccctgaaaacacaggggtgcagcatctgtagctgcctctggacagagtttgcacactctgcacaaatggctcttacagaccagctcttggagggaaacctcctaggcttgtgacaggtggtggtgagggtggggggatgaggtgctggggaggccatgtcccataactcactctgaaggacacagtgatgcttggaccacattgtttgtccttattcatctggccctcagaaagtatatttggagggaaacatgtctgtgtttgttttggtcacacattcattcattcatctgatgaatgaatgttcattggcttacatgtgtcgggtggctcttggctgtagagacacagtgggaaacaagagagatgagccccgcaccctgcgcctgcccactcccccagcacacattctagcagagtgaagaaagagaagtattatggggtggagtggttcaacctgaaacctagatgatgttttaaaggaatgacaagtgctaggaggaaagtaatagaaggttatggggtacagtggtgggtgggggttggggaaggcaatccagggaagctcctctggggaggcgacatctgagcacatgtctgcacagtgagcttgggaagggcgttctgggctgaggctctaaagcgagaaagagcctgttgtgttggaggagcagtgaaaagaagcggaggcggggcccaggtggcagagagggagggagagagccaagagatgaggctggggccagatctcattcagccctgctagacaacagtctattccaagtgacaggaagccattggaggttttgggtagggctgtgacgtggattgggttagagtttaaaaggtcacttaggcttctgggtgcaggatggatggggaggagagtcaggagttggaactgagagatcagtcaggacaccattgccatggcccaggcatctgatgaagtagctcagcccccagagtggaagggcagacatggggaggtactgtacagttaaactgccataggaaccaagactgatggccaggtttgtggcttgagcaactggtaaatgggaagcccttgggagtagggtgggaggttgggaaggcgggggtctgtgttgtacatgctggggctgagatacctgccctcttggaggtgatgctgagcaggtgagcctggagtccaggctgcagtgtacgtgtgaacccagcagcactgagctgatgtttagcaccgtgggactgcacggcttcacccaaagagggtgttccaaattttatttggctgaatgccgaatgcccaagaattaacatctatatttggctaaggtgagaatccccatcttagaatgagatcccatggtacaagaataagtctgaaatgttcatcaagattgtgtcataattatcacaattttattattaaaaacgttagtggccaaagttttgatgttttgcattgcagtatcagtacagtcacacccagcactgttgggtaccacttgctcttgaggtcttcaaaccagacatttgtgatgctagatgctcactttcaactcagaaggctggaggagcacgtggacctttggctgatgctgtctgaagggatactcctcatgtgaagctgcccctgggctgtcagtttttctctctctgagtggctggttatggtagagacttacctcctctttgatcttggatgtgaagattgggctgttgctggtgatggccctctgttgaagcagtccccccaattggtactttgctccctacctgaagcagatattttctaatattttcagaagcaaacttgagtgttttgttcactttcattttttatttctgattcttttgcctgcacctgtggcttctcccacccaatgacttgaaacagtatgtcagcaagccttgtatctggcagcctggctgtggaactggccctcagaatctcaggacaggctctgaatttgcatctgcatctcagccgtggttgcctgtaaaccatgccagtgccttctatagagcagaattacaggggcatctttaaagctgcatcttcccctctcaaggcacatccttttggttccctcttcagttagtgctagcaaatgcagcacttactccggagttgctgtgattgtccatgagtcctgctatatcagttgtgttatccataaagtataacatgaggcttcctttggctcaagcagcctttttcttgtggagtagctgctgttccatcttgtttgaataatcacataagcacttgagaaggcaattctaaaatctcttgagtgtcaagtggtttgacatattaaaaccactttttttttttgtactgaaaaaaagaacaatggactagaatattcagatagtaacacagcatcagaatgtcttgcctcattttgtgaatgttgttacactgaaatgacataatatactgttgatgtgatattctcttgatgtgatactactgatgtgatcacctgatccttgagctccaggatgccaggaatgacactgatgtaggcattcagctctttggctttccaaaggcagaagcccaaaccaaataggagattttagctgaataccaaggtcaaagccaacttctgtgcatccgtagtagagaagaggtctgaggactgggtctgggctgtcagccattagtggtcaggaagaggaagttctggcaaaggtcagtcacaagggagggggagccagaggagtgttgcattcaggaagggtaaaggaggtgtttctaggaggtgagaggaggaaagaaaacagacttctggtttggccatgtggaaatttttttttctcttgagatagtgtctcactctgttgcccaggctggagtgcagtggcgtgatcacagctcactgcagccttgacccctaggcttggatgatcttcccacctcagcttccccgggaagctgggatcacagatgcataccaccatgcccagataatttttgtattttctgtagtgctgaggttttgccatgttgcccaggctagtcttgaactgggctcaaacgatcctcccaccttggcctcccaaagtgcagggatcacagggatgagccactacacccagccgaatccctcttcttgagagaagattctggaagcagctgccgggttctctgccacatgccaggtttctgggggtgtagctcccctgtgtttgcagtgcagccctcaaggtagactgcatatggccagagtgaggtgcccgtgctgtgggagctcctggctgtcgtcctgctggtcactcacgggcacaccctctccttgtgaaggtgaagttcttcatcacatgtgtactcaacccccatgtggccatcactcagggtcacctgctacatgggagaatcctccccagttttctctctttctgtgctaggaagataggggtcctggccacaacagagccctgagctgctcctgcggcccccgccagtgggcacagtgatgtctgatgatgcaagtgatcatgtgccgtattctctgttgcacaggagtcacccaagacccagcctaaggcagcacacaggcatggccagtctctttggtctctgttgcctgctgtttccaccaccaaattcatattttcaagtcctacatgcagggcccacccatgtgacctcattttaccttaactgcctctttaaatacaggcacattgcaaggtatgagagcctcgcccactaggagagatgggtagcctggcagcctcccactgtccctgctaccagccagccctgcaggttgaacctcggaatgtgactgtatttatagagataataataggctgggtgtgatggctcacacctgtaatcccagcacttccggaggctgaggtgggcagatcacttgaggtcaggaattcgagaccagcctgatcaacatggtgaaaccctgcctctactaaaaatacaaaaattacctgggcgtggtggcacatgcctgtaatcccagctactcgggaggctgaggcaggaggatcgcttgaacctgggaggcagaggttgcagtgagctgagatggtgccattgcactccagcctgggtgacgagagtgaaactccatctcaaaaaaataaaaaaattaaaagaggtaatgaaagtaaaatgaggccatacgagtgggtgggccctaattcaatatgtctagggttcctataaaaagaggagattaggacacagacatgcacagagggagaccaagtaaggacacaggaaggagagggcagccatctacaagccaggagaggggcctcagaagggtctaccctgccggtgccttgatcttggacttctggcctccagagctgtgacataaatctccgttgtttaagccgcacggtgtgtggcatgcttcgttgcagcagcccagacaaacgaatccagtgtcctccgctcctctgccgactcctcttcctccaccctgggtgacgtggccatgttcagtctgcggggccggatggtggcaggtgcaacgggggcgcgtcaggcttcccatctccctggtgggcgaggctctcagaccacccagttctgtatgatcctatctctctccttccttctccaagctgccctgctctgccctttccatggttgttgaacacctgtgggacctacttgctctctacttccagggcgcaaattcagacagacagctgtggatgactcagcgaggagctgttagatccagatggagggaaatcagatgaataagcgggaatcgtttccactcccctgcaggatgcgttttgttgggctgctttgttttttctcttgcagtcattgccacccaatcagatgttttttacgggtgtttatctccccactagggacctctgttatctgtgccatatccagcacctaggacagtgcctgtcccatagtaggtgttcagtccctatctgtgagccaacaaacgcatgatcgaaggggtattccgagcccagcaggccttgctctagaattttattatcttgaaagggatgccaaagctgtttgttttctaattgagggaggggaggctgctggggagataacactgaagacatgggggcctccagctaaaatgttttaaacagaactttgtgctgggaaccacttgcaaaacagaaaccccatttgtgactggcctggacttgattgctttcatgatggcatgtcaatgccgcgtcactgacagcagctgtgtattgaaggctctgtgctgagtgcttgcagtcaccctcccagtgaaccatctcacgatgctctgtgacgtcgcttttgttgttttgcagagtggatctatcagtaaacactggagtcttagaatcgaagactagcagggaaactgggggtccttcctgctgtgtggccctgcagcgggcgtggggtggggcgctggtggccggcacctgccagtacctactgctaacaaaagggaaattgaaggaggtgcaggctgggctggagctcagtctcagtaattgaatcttgatgaaatgtgacagttcttgtctgtgctcctccggattgtttcctgttcattcttggtaataaaatcatcgccagttctgtgaatatctaatctaacttcctattgtggcattagaatgtttaagaaacaagaatgggagcctcaggtgtgtggggaggcagaggcagcttttaagaccttttttaaaattatctttatcagtcctctcccttttgggacccacagggacagtcttctcacctcctgactcccactttcattcttcccaggtaacctccttgcctctcaactacatcttattatgttttttccattttgtatgcatagaatgttcccgagtataacacccacagttttatccttaactattcttcccttttcaatctggcgtcattctctaaggaagattagtgacctggaagctcagcgttcatggttcaacatctcaagacgcccccatggccacatggtaacctgccccgcttcggggacctccttgaggctggggtcttggtggttttgagttcctccagtatatctctctccccttcctccctccctccctccctccctccctccctctctctctctctttttttctttcttctctctctctctccttccttccttccttcctttttctttctttctctctctctctctctctctttctgaggcagggtctcactcaggttgcccaggcttgggtgcaatggcatgatcttggcttactgcaacctccacctcccgggttcaagcacttctcctgcctcagcctcccgagtagctgggattacatgtgtgcgccaccacgcctggctaatttttatatttttagtagagacgggatttcaccatattggccaggctggtctcgaactcctggcctgaagtgattcacccacctcggcctctcaaactgctgggattacaggcatgagccactgcgcctggcccttccagctttttctgaccctcttctcttgtgcttctcattgcagaaaaactggcagggtgcaagctgaatgtggctgaggtgacacagtccgaaatagggcagaaacagaagctgcagacggtgctggaagcagtacatgacctgctgcggccccgaggctgggcgctccggtggagcgtggactgtgagttccacgccacagggggagggactgtctggagggagcccgtcctctcgacattcgtcatccacatttgtcatccacattcatcatcatcccatctggccttgcatcttaaaattgggttcatctccctgctctgtaagaggtagaacattgcaggggagaagaacaggagaagggttagggagatcctagaaaagggacctagtcaggccacaattctccatcctccccatgctgcagaggagagaggcaatgtttatggatgggtggatcagagggactttgagagagagaagcagccttggggggttcttgttgggactcaaccccaaatgctggtggcagcaacacctagtgggctgtttgtctatgaccctggcattatgagatgtgacatcacggtattttcagccaagacatgaacccggcaggtgaaagactaaaccaggagaagctggaaagttctcctcggtcctgcccactccttccccacctccctcccctggaagcagggccatgagggtgtggcttcagggctctctgtgctgggccagaggtctccgtgctttggtgagctgggctctcagtggtaggcaggagaccctggagcctggccttgcacccggtttcttggtatcgagaccttgggcagacccaggctgtctcgtgggtggctgggtccgtgggtggggaatcgggtgccttgtaaactgtaaaaccctgcaggagaagtggtgatgttgaccaaacctgagtccgcatgctgaggaagagagaggacagactcaggcaaggcaggggctaatgtctaatgtccccagagtggcctctgctcttggcagcctacccttgttgggatggttcattgcggagagggagcccttttttagtgccagagataataacgcacatccttgtgatgggtaagtggccgtgacctgctttccatgctcttttcccttctgtgctaattttactatcctgttcctttccctcatcactgcccaatttattgcttttaaaaacattgtgcttctaaaagtggttgcacaagtcaccttaggccaacaggaaaggagacagtgaagctagaagtaaattcaccaggttgctcatcagctctcttgatttgtccacacttcgctccatccttgtctcgctggggtctcatttagatgctgtgtctctgttgccttctgcacgtgggctcaggttcctgtgtaacctgatctaaagcgtctcccttcctccttcctcctgcagcaattcacgggaagaacctggtggccatcctccacctgctggtctctctggccatgcacttcagggcccccatccgccttcctgagcatgtaacggtgcaggtggtggtcgtgcgggtgagtataaccgagtggtcggcctgcctgtaactccgccagagaggcaacatcttcctcctgcagttttcctgccctccccctccttttttccccccaggaggctaccttctatttttcccttttgacaaaatgtgtgtctcaccctggctccgagataaatgattggaacgggaacaatggcattgatttgatgagaggcagaagcagaggcatgagggtgttgaggtttaattttccacatttttgaaaagaacattcatttctctccaaagccaactggttggaattcaatccccttgaatgtgcttattactcattggaggaggttggccccgcgggatgaaacagacacccaaattaaagccgctttgcattcgttggggattattcatcatgccccatcatctctttttttgggttcatttctcttgattcacttggagaaatggaaccagaacccaggtccttctaacagagggtgaagtagagttacctttctcttgctatttcccttacatttattttttattttattttatgttttgtgaaagggtttcactctgttgcccaggctggagtaccatggtgcagtcatggctcactgcagcctcaacctcttgggctcaagcggtcctcccgcctcagcctcccaggtagctaggactacaggcacatgccaccgtgcctggctaatttcaaatttttgtagagacaaggtctcgctatgttgcccaagctggtctcgaagtcctgggctcaagcgatcctcccatctcagcctcccaaaatgctgtgattataggtgggagctgccatgcctggccttatttcccttacatttaagtggacagtcgctgcctagggttcgtgtgtgcagtttccctcagtaaatgtgcaatgagcgcctactattctctaagcactcagcataggctgccgagccactaaaggaggaacacatgcctggcgtctgtgggggtgaccactgcggccagagttgaggtcacgctcggaaccttggatgcctctgtgtttattttactcgagacatccggctccactttcctctggtttttaaacttctcagtcccgtggtctctgtggtcggggaggacctggctgtcactgtgttttccgaacccattctggcccctctgttaccctgggagctcagtcttgaccggacgggaatgctcctctctggcatccggcaagggccacctgccatgtgtccatgtttccttcctaaggaggatgtttgtggctggtggtggtgactcgggacctggggggccattcctatggccccgtgtcttggccactggttcacaggcagccggcctgaaaaggcttccctaggacacattgggatgtggttcccaagcctacctacgtcagctcggggccccaggagccctgtgcaggctcagaaactggagtatttcctttcaggcttgcacttgggtccaagataatctttgcggtttgcagaaagtttgaaccaggcaagcacttgctggtgcttcccgccataacgggttagaggagtgttgtttggccacgaccaaagcagaatgaaacgggagcagggggtcctgtgaaccgggcgcagttactccccagaccttagagccgccttctgtcttctctgcagccccctggcctctgagcttgctcaggggaccccttatctaaccccagatggaatggttggtgtaagggatgtggcatttccagggtggaaggaaggaaggaaagggccttatttactgcctggccacgtggctttgggctgatcacttgcttttgctgagctgcaatgcttttccccataaaaccaagattttactacaaacctgtaaaacatccagcttcatgtctacaatcctagacctgggcccagcacctggtgggtgcctcaggcatgtttgatccttgactaggtgaacacaatgtctggaccttccttggcaggcactcctgagaatcaggataaatgtcacccacactgttgttcaataacaagcaccaaccctgagtattccatggaggtcaaactcaggaaagggatggaagcccagatcttggtggtgtccactgtgggctggcccagcgggaaatgagttcccagtcccttgaggggttcagtggtggttggattagccacccaggctccatctggagctcctgtgacaggcgggctgccacccctaccatcaccactgccatgcccccctcactaccatcattacttttttttttttgagatggagtctcactgtgtcacccaggctggagtgcagtggcacaatctcagctcactgcaacctctgcctcctgggttcaactgattctcctgcctcagcctcccaagtagctgagattacaggcacatgccaccacgcccagctaatttttgtatttttagcagagaccgggtttcaccatgttggccagaatggtctcaatctcttgatctcatgatctgcctgccttggcctcccaaagtgctgggattacagctgtgagccactgtgcccggccatcattgcttttctatacctgccacgctctgggagaagtgtgacatatactgtgtcagtttcctagggcagccataacaaagtaccacaaaccaggtggcttaaaacagcagacatttattctctcgcaattatggaggccagaagtctgaaatcaagatgttgtcagggtaggatgtcctccctcatgtctcctcctctaggggaggggtcttcctgcctcctccagcttctggtggtggctgtcagtccttggtgttcttggcttgtggccacatctctccagtctctgcctctgtcatcacatggcctcctccctctgtctgtttctgtgtctgtttcctcttctaataaggaggtgagccatattggattaaggaggggctcaccataatccatgatgacctcatctgagctagtatctgcaaagacccttatttccaaatgagatcatgttctgaagtttgtggtagatatgaactttgggggaccctcttcagtcccgtgcacacacatgattgcaggggatgttccctgttatttatgttccttccaattgcatgcctcacctctcctggctgcaaagcatagaggatccctttggggaatcctgacctggggtgtttctcctgagacccacacaaatgccaactctcaaggccacgtggagaccagagggtggggaggaggatagggacaggttgtggtcgctgaaaggcaccctgcccagggtcccctgctgtgtactcacccaggcctggcatgcgtgttcaacaccacccctccttctcctgttgctcttttctaagatgatctccggccccgcagcttcgtctgccctgtcagtgcatctttcctcaactctccactgcctgattttgtatgtttattttggggttttcagaaacgggaaggcctgctgcattccagccacatctcggaggagctgaccacaactacagagtaagtggacccctgtcttgcccttccaggccctgctgccccgagtgagtgggaccccaggctgccacttcagccagggacaccagcgcccatggggctgctcccgctccacaccccttctctgtagcatgtgattctcatgctggttcccaccccagctctcctccctctgcacactttcttcagagtttttaacattagaactgagttaccttccacagactttgaattttttcattcctatcttaaaaggtgagctgtaagaacattgcaaagtggggcaggcagagagagttcaggatggttagagagaaccattgtctcagttcatttatccatctacattagccccatcagaggtgggagctacatctttaaaccagaactttcctttgacagacactactaagccatctgttatctcctagagaaagccagagggcaggtgttcagaagtctaaaaggcttcaaatctattgaaaatagcaaatcaaacagtatctgtggtatgtggttttaaggactccttgtgataacctgctaagaatctttagaattcactgcatttgtgcctcttgactaaacctgtttcagatgaaacagaacatttaaaaattgattgtctcagctaatccatcagctaagttcacagagtgattaattactgtgttgtgaattcatggatggtatttcaaaaattggagctgacacaggaaaccactcgtggcttgcaagctctcagggaagatgatgggacagtggagtgcaggctgatgcatgtgcagaggcccatgaagaggcctcccagtctgccccaggcccacgaagggaacagggagagctggaaaaggggaggatgagaatgtggttctttgcccagcacagtgggcctttggcagcagctctgcctattcagcagtaggagaagggctgctcgtggggaactgggattgggctggtgtcttagttgtttattgttgtgtaacaaatcacccccaaagtcaagtggcttaaaacaacatctgtttcatttgctgctcacaattctgtgggtcagcaatttaggctgggctcagctgggcggttgttcagccagtctcgcctggggttgctcatatgatgcagacatctgaaggctggatggaggctggggaggctgagatgggctccccctacctctggtggttggtgttggcctcccctgggtctctttcctcctcacagtgctgggcatcttcccagggtgctctcagggtcctgagagagtgagaatgcagctgcagtccccttgaggccttgtcttggacatccatacctatgtcctcaattctgtgagtcaaagtgagtcacaggtcatcctggatcaaggtgcaggaaacagactctgcctccttgtgcaggaatggcctgtgcacattgttgggtggtgggcatgctgtgataggagttcccctctaggtgagggggtcccatatgaggacagcaaggaggagctgggccccctgccataaaactagaatggtccagagacagagaatgagcaagtgggtgggagaattgtctcagctattcatcagcagtaagtggccccaaggacctgctgcatgccagcctccttgctggatcaacagagacactgagaggtgggctgagtgcagttcttttcctccagggcgacccatcctgctgatgagaaaggatgcatccacagacatgtacagtctaacacaggggcttgtgggaagtgcctcggggccctaagggaatttccaggaggaggggagcaccccaaagtcagggaaggggagatttcagtgaaagccacctcaatcagatatcagatggccctgagcagtgaggaagggagttgggattttctagcctgagtcagtgtccctctgccagccagggtcagggtaaaggagaggctgggtcacctctccaggatgatgccccaggtaggttctcctcagggctggtcatcccatccttgtctcctgttccttcccctccccgtggctgcggaggctctgacggaacatttgaatcattggatgtctgctgaaaaccagcggcccaaagatccacattcagtttcctaaggcagcattgccacctcctatccagtctcagtgttcccctttctctttcaagaggtggctatgaggtcaccccttccaggaagccctcctgtctgccaagcaggagtgcttggcttcctgttagttcccttagcctctggacacatgtggccaacattgaaatattggcttatgaggtctgtcactcccaggcatcctgagggcagggccacatagtgtttatctccaggggatgttaatttctgtatctgcacagcctgcacatagtaggtactcaagtaagtgcttgttaaataagatggagccaaaggacttgagcctagagggatttggggacaaagtaaagacttccttgcctctcaggaaggcagtgcatggaaaggatctgtgcactcactcactgggaatctttgaggagaagctgctcaccactcccgtctcccccattgcttccgctgccgcctgcctgagatcagggcctggcctcgtggttctccaggatcctttagttccacaagtcctgcaagtacattgtgtttactcctggaaacatgagtaacctgcaaccttgtgtgtgtgtttgtttgtttatttatttatttgagacagggtcttgctctgttgcccaggctggagtacagtggtgcgatcccagctcagtgcagtcttgacctcccaggctctagcgatcctcccacctcagcacctgagtagctgggactagagcgcacgccatgacacccagctaattttgtatttttcttagaggaggttttgccactttggccaggctcgtctccagccttgcatttttttattgttttgtttgtttgtttgtttgttttttgagacagagtttcactcttgttgcccaggctggagtgcaatggtgcaatctctgctcactgcaacctccacctcctgggttcaagtgattctcctgactcagcctcccaagtagctgggattacaggtgcctgccaccatgcccggctaatttttgcatttttagcagagatggggtttcgccattttggccaggctggtctcgaactcctgacctcaagtgattgacccgattctgcccctcaaagtgctgggattacaggcatgagcccctgtgcccggcccagcctgtgttttgagcgttccacggctgctggaagacctgttgtctgctgaaatcttcatattaaccactcttctgatttaagtacctcccctccaaacaacattaccagggtggttaatgtgcaaatagagatggtgatttgctgctgaccttgtgcaaacattaataattcacacaagcacctctcgtttataattagagcaggctggaacacagcaccatgtgacttgcgttcttatcagtaggcctttacctgggcagcgagggcccagctttctggctggctctgtccctcatcctccactttctggctggctctgtccctcatcctccattgtgctgcttgtgaaactgtgttctgagtgacccatctcatggctctctctgtgttcttgtttgcaggatgatgatgggccggttcggtaagtaaccccagggaaagtggggagatggaggcatgttagggctcccccaggaagctcccagagagtgtacatggttatctggagggagtgggaaactagatgggtctcactgcccccatagttctggaatcctagagaaagtgcacagcccacccccacctttctgtataatgggcttgtttctcagagctgagagtggctgggttgtgctaggaggagtggggtggaaggctgggtgaccagctaggggagcaggaggggcctgggatgtaacactggctggaactgtcaggggctggagcaagagtggttgagggtaaaagggagggaggagaggcagccagcacatggagcgtcgttagctggctggaagagagtggctcagctctgtggatgtccttccatgtgtattatttcctcctggaaaccactggtttagcagacttccttagagtcaggcagccagggctcattcctggctggtggcttgtggcctgccccttcctctctctgctcctcatccgtgaaatgggagtgtaaaaggctctccccaggcaggggctgctgtgagtattgggtgagatcacaggtgagtgccctgcttggccgggggacagccctctatgtgggctggttttattagtgttggttttcagtggctcttcccaaagagagagaggtaatcactctctcttccctcatgaaagcctgagacctcatcttcatctcggtgagggatggtaacgtttcaaccctcagtaccaggataccccggccctcggcctggccagcctcagtgctttgggaagcatttcaaaagagaaacctcttgacccccagataccctgttctccagtgagcagggaggggagaacagctcttaaaaggaaaaatggaaaccagatagaagtctcccacctgcctctctagcggagctgatatctgtcttttgggggccctctgggtgggggtgccaccccctgagtcctatacaatgagggctgggccagcttggccatggggctctgtaacctcaagttattatggggaccagctaggatgccattgctgcttatctattgtattagggttctctagagggacagaactaatacgatagatagatatatataaaggggagtttactaagggtattaactcacacgatcacaaggtcccacaatagtccttctgcaagctgaggagcagggaagccagtttgagtcccaaagctgtagaacctggagtttgatgttcgaaggcaggaagcatccagtatgggagaaagatggaggctgggagactaagccagtctagtcttttcatgttcttctgcctgctttttattttggctgtgctggcagctgattaggtggtgcccacctggattaagggtggtctgccttttccagtccacagattcagatgttaatctcctttggcaacaccctcacagacacacccaggaaccacgccttgcacccttcaatccaatcaagctgacagtattaaccatcacgcctgtggagaggggaagtggctcagatcctgcggggcttgaattgagaagatgcagccagcgtgtcccccctaggctttctttactagaccttaagctgtgctgggaacattcacaggccttctctgttttttgtttgtttgtttgtttgtttttaaggagaattccagctcttttaaattgtctctattattaaaaaacaaatgcaggaagagaaagagaaacatcctgtatatagttgctgagggaggcgaaaccgcagtggggtcacagctcatgggaccggggtgaggcgtctccccaccctgcgtctaggtagaggcgcgttttgggggcccagtgcccccctctgtcacctcctctccatcttttcttcctggaggaggctcagaacccctttggaattgtagaggcctaaagatgaggagagggccgggcgcggtggctcatgcctttaatctcagcactttgagaggccgaggtggatggatcatgaggtcatgagatcgagaccagcctggctaacatggtgaaaccccgtcactactaaaaatacaaaaaaattagccgggcgtggtggcgggcacctgtagtcccagctactcgggaggctgatgcaggagaatcgcttgaacccaggaggtggaggttgcagtgagccgagattgcgccactgcactccagcctgagtgacagagcaagactctgtctcaaaaaaaaaaaaaaaaaaaaaaaaaaaagatgagagtgggcccctcaagcatttttgagtctttttgttttttttgtggcgctgtcacttttgtgtttggttcgggccttgttggaggtttagggaaaagacagtctgttcagttcagttgggagcacatgggcctcaggctgtgtatagcaccctgtggcccgagggcccagaagcctggccccggagcccctgccaccccatgaatgagctttagggtctgatggctggggcagtggctccctaggtaagagccaggtgtcacatgtgaaaagtggacccagctgccactccaggggtgggaggactgtggaatcgcaagaccatgtacaagaggccgatggaattgttctcgttactttgtaggctttatgtgctgtgcttgagaaaacgcaaacaggctattagtcggtgacaggcaattagttccacccccggccttgctgcttctgctgacgcaggttccgaagtctcctggttacccagcctggcaccctcaggcacagcagggtgtctggcccggcacccgcccctgtgggggcagcagcacgccttgtcttcgcttccctgccatgccattcccctccttcagcccccgagagcatcccagggtgctccctcctccagcaaccttcacctgaatgctctccctctagattaccccatggctcactctttcagctctgccagctcttggttcaaatgtcactgatcagggaggccctctctgactccactgccccaaactggcctccactggctctcctccccacccctgccttagttctttctgtactcatgtgacacaccaagcagcactcagctcatggggatggcctggctcctcttccctgtgccagtgtttacacaacgaagcttgcacgtgtctggcagacactggtgccagcaaactttcaggggcacccacagcccctgcctttctcctttcacacatggctccttgacccagaggtgctctgtgggctggagctgacccttcctcggggtgcaccccaccccctgccaaagcagccagccctggccacagtctgcacgcagctgggggcagatgttttaggagcttctggaaggccgggcagaccctccttggctaatgtgctgggctttgccaggagtggtcttctgggcctcagtttccccacgagtaccctgagccagggagggatggggactccattctgcccactccccatcattccggggagggaggtggctccacaggtcctcgctgcctcctgacagcatcactgtcctggatgaggtgggtgaggaggcttctctccacggaaacaagtctcaggggttccagggaggttgcagcctggtctccatggcaatgggtgagctggtgcggcttctccgcgggcggcccttccccctcctgggcctgccctgggctggaggctctttctgaggcagaggggaaagaagggggatgtgccttcctcactctcttccccctcattgtaactcctagtaattccccttcacgtctctcccatttctgccaacagggcttgttccaaaacctctggctccatcccatcacccgtggctcctgactgtgccctccataactcccacgttgcaggccacagcccctgttaacccctctcacagtccacccggctcttgaacctgcgctgggctttctggcatctctctctccttgtgcctgctggtccctcggtggagcgcctttcctcctcctcttgccccagcaagcctggcttgaaccccaggactgctttgtgaagccttcctcaggtccccccagcccttggttcatgggtcccagactcaggtgtctccagggaccaggctgataatataaaagaggagagtgtctagattatgcaatgataatgtcatctgccccttcaccccagggctgggtggcagtggggagtggtggggtctggcgcaagctggagagtccacacccccatccccaggggcagcttattgctgccaggtgggagtgcaggctcactgttgccacagcctccagttcttcaagagaagccagaagttaagaacttttggacaaactttccaatttaagaactgttcgctctcgccgggtaccgtggctcacacctgtagtcccagcactttgggaggctgaggcgggtggattacttgaggtcaggagttcaagaccagccttaccaacatggcgaaaccccgtctctactaaaaatacaaaaattagccaggtgtggtggtgcatgcctgtagtcccagctattcaggaggttgaggcagaattgcttgaacccgggaggcagatgttgcagtgagctgagatcatgccactgcactccagcctgggtgacagagtgagactctgtctcaaaaagcctaaagaccaaaacaaaacaaaagaaaacaaaacaaatgaaaactgttgactcaaatcaaaacattacagcgaccaagctgagcattcctgcagattgagcttgggcagccctggcatatggtcaggtcggttggccccccgtctggcttcgtcttttctgacactaacagggttgcactatcatagtttactccctctccaggccctcccccaagtctgtgcctcttccaagagaggagtccctccttgtttatctctgtgatgtccccagagcctgcggaggctctgggggacaggacgagcgggagctgtaaggactgaggaccgacaatgctcctgccaggctccatgctcctgcctctactcactgccccacttagttccacaccaagagcgaggcaggggctgtgagaatgctgcctttatggaggaagaaagggggtcggagagggaaggatttgcccagtcatggggtgtgaagtggggcagctagaacaaaataggatctattttcgttcccaaggccaagcacatcacaggggtgcagtatgctctctctgtctctctctctcccctaggtcagggtggtccctggggaggcccctgggttaccccaagacaggtgggaggagcttcctacccgaccctcttcctgtcaacctgggctctgcggctcccagggctgctccttgtattggggccccagcctggctggtaacagggggtccctccactgggctcagtcttctgagcatgctctgcccccaggaacctggaggatggaagttgggggccctgggtcccttccaaatgcccttgggtcctgtgcctggtccccagtgcccattttcagagcccctggcccctccctgccttgtggactgtgtgacgtgatgccagtcccctgggtccaggggcatggcagccggcggagaggcctctgcggccccgatgtctccttgagtggcttgactctgccagcccagcggtggcccagctaaatataccctggctgacgtcaagcactcttctgctcctggggtttttcttaagctgcatttatagtttgcgtattgctttgtaaagatgtaaaaatttcactttttttttttgttttgccccttagcagactgtcttattgagtgtagtcttagatgattatgaaaatcatttacagctgccgcattaggaagctggcgtgtgtgcagaggcagggcattttggtcaatgttggtctttaggtgaagaaaacttccctcccttcccccagtcacgcacatgctcacacacgcacacatgcgctcacacaggcacacacacgctcacacgtgctcacacatgcacacacgtgctcacacgtgtacacacgctcacaccgcacacacgcacacccgtgctcacacgcacacatgctcacacatggacacacgctcacacacgcgctcacacgtacacacgctcacagcacacacacatgttcacacacaacctcacacgcacacacgtgctcacacacgcacacatgtgctcacacacgccacgtgcacacaggtgctcacacacacacatgcacacacgtgctcgcacacgcacacatgctcacacacgcaaacacgtgcccacaatgcacacacatgctcacatgcgcacacacacgtacacatacactttccttctctcctttcctctttgtttctcaccacctccacaaggccacggaaggggctacttgggctgggctgggcaggggggtgtgagctgcctcctggggcccagcctgggaggaagggtcagcatgcttcctctgggaggaggcttggccaacttctctccgtaggtctctggcttacctgggcctaatcccttctttctttttctgggctctctttgtctctctcctaggccagggcggtccctgaggaggctcccctaggccacccactagacgggtgggaggagcttcctaccccactctctccctgtcaagctgggctccgcagctcccagggctgctccttgggttggggccccagcctggctggtaaaagagggtctctctgctgggcttggtcctctgaacatgctctgcctccaggaacctggaggatggaagttggggggccctgggccccttccaaatgccctcctccctgtcttttctgccctggcagtgatgccccacagctctgtgtctacctggagacctcagccctctgcttggggtccaagtctctgttccatatgcccctatggaactcccccctccatggcagcaggagcaaaggctctgaggcaagtgtgcaccagtgtcagcaggagcagctgggaggccggttggtggagtgaagtcagggagggtgcatgtaggaggataacgctgagtctgagtgtcccatggcacgtgggagagaggatggattttatctgagtgtcccatggctcgcaggagagaagatagattttattctaagcatgataagaagcagttggagggttttagttgtggtgggagtggaggggggaaacaaatgatcctgtttgcacttggaagggctcactctgcctgctggggagaagggctcaggggccaggagtggagtaggaggctgcagctgctcccaggcgaggggcagtgaggcgtgagcaggacatggccaccgtcgcgggggaagtggttggattcacaggtgacatttgccagtagacaaggagtgtgggaacagggagaattcaggacgcctcaagtcctaggacgtggcaggtgcagatgccagatgccatctatgtgtttcatatgagaaggtaaaaagcaggtggaagggaccctctgcagcctctagtccacgctgttctggttgttcccaagcgctcttgctcgccttggtttggccgggactgatcatcagggtcagccctttcattctggtaggaattggaaggattctaggcaggtgtgggagttgaggctgaacctcctgagggatcagaagctggcagggccctggattagggcagcaccacgggtttccataaacgctccttcgtgtctctctttgcatgtcctcagagcgggatgccttcgacacgctgttcgaccacgccccggataagctcagcgtggtgaagaaggtgagctattggtgggatgttggatgtgctctcccctggctcgcggctttttgacagcacaaacgccccgctgggaagaaggtgggaaaatgtttggaatctcagaaatgtttgccacatggattgaaatgtaattacagtcaaaaacctaaccacagtgcataaaatcagcgccttttaactcaacctcgctgctccctgggtgtcttcctgcccgcccgctccgcttctgttaagtgaattacccagcccccatttctttctgactcgagaccttttttcaatgtggaaatgtttttaagcatgtcagcctgctgctctcgctggcctcatttaccatctacagcctgcccagtaaacacgcaggcctgtgcggctgagctgtgccatacatggatttggcccgtttccctccagacagagaatgggccctcactagcccaggcagcctgctggtcaatctgtggatggaaaaatctccgaggctctggagttgggggctgggtgtgatcagcttctgggggatctgccagggaggcttgttcccgtcaaaaggaactggagcccactggctgctcattaacttatccgagtgcctgcaggcatcccattcaggaggctgctgcatccctccttcccataacatcggaggagcgctcatttcaacccatggtgcaggcaagagagttctcctttgtctaggacagcttacccaaacagctttcttagtgcaagacttgtcagaacctttaataggctgacctatactgtacttctccaagagggagcttggtaggaagcatttttcaaacttgtttgtttatagtgggatttatttatctatcaattttggggtaagacgcattgtattttagtggaacccacttttggaaaatgttggcctgggtttggacgatgagatcattcatttttggaagcattttgcaaaaggctgttggaaccgtgctaatggtccttctgggacaaagccttcctagcactcttgggtggtgagggatatacttggagcatcagagtcccccacctccacctcgtcacatgtggcccccagggaccctgacagaaccggttcagggaatgaatcaaatccagcttccccacttatcagctgtgtgacttctggcgaagggcgagattataccccccagcctcagtttccccatctgtcaagtggggacagagatgttacccacctctcagggcactgtgaggataaactgggattctctctgtgcatgggcttagccggcagcgtatagtcactggtagcattgagaatggtgtggcctgagattgctttcatctctcggtagataccatgttaattcattctgcgaaagacacattttcggcactggagccaccagcaaggaagaagacagaatcctttgatttgcctggtagcttcccactccagcctgtcccttcctcacctccacattgcaagtttaggtgtctgtagctctctgtgccccagaatgaagtcaggggcccctgcccacctctgcaggtttctccctgggtcgtcccctcctactcctccccatcccacccacatccagccacagcctgaagaccccaaagggtttgcagatgtgtctgggtgcccactcggctcactctcaccttgcactggcccaccctcaggcccagctccaatgctccctctccatggtcttaacgggggtccgcacacccgttaatggctcatgaaatctcccctgcattgcgtgtttccctgtagtgccctatctcttgacttctccgtcccaccactacacgcatatggagaattacatcacaggccctttggcgggggccaggggtggagctctctgctgtgtttgtgtccttagcaccaagcagcatgcctggcacatagtagctgctcagtaaatttgagcagaatgggtaagaaatcatatcatgggcaggctgggcgcggtggctcacgcctgtaatcctagcactttggaaggccgaggtgggtggatcacaaggtcaggagatcgagaccatcctggctaacatggcaaaaacccgtctctactaaaaaatacaaaaaaattaggtgggcatggtggtgggcacccttagtcccagctactcgggaggctgaggcaggagaatggcgtgaacccgggaggtggagcttgcagtgagccgagattgcgccactgcactccagcctgggcaacagagcgagactccatctcaaaacaaaacgaaacaaaacaaaacaaaacaaaacaaaacaaagaaatcatgtcatgggcagtggtggatgatattgagtttctatcaaagttggctttggtcactgaggaattacaggtgacaggttttaagcttgtgccggagagaagccagtgccccttggtacttacataatagggctcagagagatcaccctgggtggatctccccatgtattgcaaatcgataggcaggctgggcgctgtggctcacacctgtaatttcagcactttgggaggccaaagtgggtggatcacctgaggtctggagttcgagaccagcctgatcagcatggggaaactccatttctactaaaaatacaaaattagccgggcttggtgacgggtgcttgtaatcccaactactcgggaggctgaggcaggagaatcgcttgaacctgggaggtggaggttgcagtgagctgggatcatgccattgcactctagccggggcaccaaaagctcggatgatcctcagtggtctggggtgcaggcttcaaacctgtagctgtctagtgacagagtggttcaattccacctttgtaggcccggcgcagtggctcacgcctataatcccagcactttgggaggccaaggcgggtggatcacgaggtcaggagatcgagaccatcctggctaacacagtgaaaccccatctctactaaaaatacaaaaaaattagctgggcgtggtggcaggcgcctgtagtcccagctactcgggaggctgaggcaggagaatgatgtgaacccggtgaacccgggaggcggagcttgcaatgagccgagatcacgccactgcactccagcctgggcgacagagtgagactgtctcaaaaaaaaaaaaaaaaaaaaaaaaaaaattcagtaggtgtggctcaaggcagcactttcctcagtcttctgagtatgccgtttattgttccaggtcacacctaagatacatttgcaaatgtaatgatcctcccctggcagtttcatctttcttaagagcacagggtgctctccagtatgattgttaaatatgtcatgcgtgcacggattggcatatgtgtgcatgggttggtgagcagagacgtgtagccaggatagatgtgggcattatgccatgaaaactaggggctactgtcaggatattgagtttgaaacatgggctttttattttagcaaacaggagatgatgaaagcgtttcacagagctggggctggcaaatgtcaagcctgcccctccagatgggacctgcatgcgggccattcatggctcctgtgtctcttttattcttggcagtctctcatcacttttgtgaacaagcacctgaacaagctgaatttggaggtgacggaactggagacccaggtatgtgctgctttggcttgaaggatcctttgtccaccgccattttcagtcagtgttttgatcccaggtggggcgcgtgaacaaagctggcgccattttgttcatctcacaaggaactcccgtggtgcaggcagaaataaccaccgtggccttctcagcccctctgtcttcctttcctggggctgctgccacaaagcaccacaaacctagtggctgaaacaacagacctttgtgtcctcgaagtgctggaggcctgaagtccaaaatcaagatggggcctgggtgggttccctccaaggctgtgagggaggagctgttcctggcctccctcccagcttctgtggttttgccaggatctttagcattccttggcttgtacacacatcactcccttctttgccttcatcttcatgtggtgtcgtccttgtgtgtgtgtctctgtgtccaaatgtcccccttttatcaggacgtggtcatgttggattagagcccacccatggcttcatcccaacctgactgcatctatgtaaaccctgtttccagatacggtcacattcagaggtcctggtgattagggttccactgtatcctttttctttctttttttttttttttaaagacagagtctcgctctgtcacccaggctggagtgcagtggtgtgatctcggctcactgcaacctccacctcccgggttccaaccattctcctgcctcagcctcccgagtagctgggactacaggtacatcccaccatgcccagctaatttttgtatttttagtaaagacggggtttcaccgtgttggccaggatggtctcgatctcctggcctcatgatctgcctgcctcagcctcccaaccactgtatctttttttgggagacacaaaaccccaaaacacctgagtggtgttattcaacccataacacactccagggctccaccccagcccaacacagggcctttgcacacgcagttcctctgtctagaacgtgctggccccttcagcctctgctcagtgctgctgtcacactgtggccaggacctagcaaatgtccccctggtaggtatgtacaacacatttcttctgcaataagtatatcaagtctacttccccagccccgacccctactcaaagctaaaggagcatccttaaattatatttttgggcactccgagagcattaaagacaaaatatgattttcccaggattagcagggtgcttgaatgcggaggtttttgagctcttggtacagacatccctaatgcacagctgatccttcttaaaccccaaggtgaatgcattcattcccttctctttctttaactttcctcatttgcttttctaattaaaaaactaattcaggttcattgtagaaatgtctgaaaatgcagataagcaaaacaaataaaaatcacccataatcccgtcacccggagatgaatgcacagagggttttgttcaggccttttctctacacatatagcgagtcatggacagtgtgggtctgtatataaaagcatcacggtctgtttttaatgtatatatttatttgtgtatcgttggccaacacatttcttattttccgcagtttacaaatgttgcacatttagcctcagattattttctgtttgagacgttagcaccccagaagccactgaggtgaaaagtaaaaatcttcctttctctttttctggagacctcccccttcagactctccaggggcagctaactgcagttcatggttggatgtgtatttttctagatattttctttttctttctttctttttttttgagacagagtctcattctgtcccccaggctggagtgcagtgacacaatctcagctcactgcaacctccacctcctgggttcaagcaattctcctccctcagcctcctgagtagctgggactacaggtgcgcctcaccatgcctggctaatttttttgtatttttagtagagatggggtttcaccatgttggtcaggctggtctcgaactcctgaccttgtgatccacctgcctcagcctcccaaagtgttgggattacaggtgtgagccacattttctatgcacaaaggtatttttctaaataacagtggatcttaccgcccactgttttgtaatgtgttttgtgtcactaaatacactgtgggcatcttttggtgtaagagaaagtgtgtgtgtgtgtttctatctgatcctttttcccttgctcgatctatcggtctgtctatattttgtcacttttaatgggaagtgtatctcatcagcgggaaggctgcactgcacctcattaaaccagtgcctcacgactggatgtttttctgctcctgtaaacagcagtgcagagagcagctttgtgcacggctgtctgtgctcgtgcctgcttcctcggaataaaagcctagaagtggagtcattagagcgaagcctgcaccgcacactttgaaggctcaggaagatttgctgtgtgggggcccctggtactgtcatggggcgtgtgaggggcactgctcccccacatccataccagctgtccccacagcccttctcagaggtgtctgcacatcagtattagcagctgagcctcttacattgagactctaaaattaaatttgcatttgtttttatttactcaatatcttcatttttttccccccgattaatcgtactatatagagtcttaaaagtacatttaaccactggtcccccagaaaaggtcgctggttacagaaatgcagggatttttgttttgttttgttgcaaaggaatttgggtatttttataaataccatatatcatttatgaagactgtaaatcattaacgtcttgatgccctaggagtcggagaggccctggtttaatttcttcaatttctatttgtgtgtgggtgagtgtggtttatgtagtctggtatgtgtggtttatgcagtctgttgggggtgtgtgtgtgtgtgtggtttatgtagtctggtgggtgtgtgtgtgtgtgtgtgtgtggtttatgtagtctggtgtgtgtgtgtgtggtttatgtagtctggtgtgtgtgtgtggtttatgtagtctgtgtggtgtgtgtgtgtatttgtggtttacgtagtctgtgtggtgtgtggtgtgtgtggttttcgttgtctgtgtggtgtgtgtgtgtggttaagtagtctgtgtggtgtgtgtgtggtttatgcagtctgtgtggtgtgtgtgtggtttatgtagtctgtgtggtgtgatgtgtgtgtgtagtttttgtagtctgtgtggtgtgtgttgtgtgtgtggtttatgcagtctgtggtgggggtgtgtgtgtgtggtttttgtagtctgtgtagtgtgtggtgtgtgtgtggtttatgcagtctgtgtggtgtgatgtgtgtgtgtgtgtgtggtttttgtagtctgtgtggtgtgtgtgtggtttttgtagtctgtgtggtgtgtgtgtgtgtgtgtgtgtggtttttgtagtctgtgtggtgtgtgtgtggtgtaggtgtgtgttttccctccttttccaaaccattcttacattgcggacagcgtcccagctctgtgatggtgagtgaactcctcagcctccctgagcttctgtccacagaattaaactggaggcgatgggcagtgtgaggactgggtgagatggcgcactgagatcaagtgggcagggctcggcaggggttagcactgcggatgaggaggcggtggtggggcctctgggcctccgtggggattctgctccctgctgagctagacagcaggttgtggagagagggcaccacgctgggtgcttgtgaaagtggagggtcacccgctcgcagctgggccccccagccctgccctctccttgtggccgtccctccctccttcctgtgagcccgtgtgctgggacagtgaggagacaccacggaaggaagaaaagactcagcaggctcagggcctgcgggagcagcggcgtggccaccccagacctcctggggagaggtgtgggttggtgccttcattcacgtggcagcttccattccctggaagttagtccatggagacgtgggcatggcagctcaatgttgttctgctgggaaggtgccagcacgcttaaccagggtgctgtgggcatgaagcttccatgtggagacacacttaaaagaattcttcaaacccgtctgatctccttaatgataggagtggctggctgctttgtggtgtggaaggctgagggcatgtgacatggaggccaagtgccatttgcccatcaactgacagcgtgttgaatttccaggcgcagtggctcatgcctgcaatcctagcactttgggtggccgaggtgggtggatcatgaggtcaggagttcaagaccagcctgaccaacatggtgaaaccccatctctactaaaaatacaaaaattggcgggtatggtggcacgcgcctgtaatcccagctactcaggaggcggaggcagaagaattgcttgaacccaggaggcagaggttgctgtgagccgaggttgcagtgagccgagatcgcaccactgcactccagcagggcccagaccctgtcctgagtcccttaagggactgttgcccactggcactagctttatgctttacagctctagctgcagctctccctgctaaaggtcagggcttctgatattggatgtttgtgattttgacttttcatcttttttttttttttttttttgagacagtttcactcctgttacccaggccggagtacagtggcgcgatcgcggctcactgcaacctctgccttccgggttaaagcgattctcctgcctcaacctcccgagtagctgggattacaggcatgcaccaccacacccgctaatttttgtatttttactagagacggggtttcaccctgttggtcaggctggtcttgaactcctgaccttgtgatccacccaccttggccacccaaagtgctaggattacaggcgtgagccactgcgcctagaagtttttacttttaatttttttaaaaattcaaatttaagaattctggagattgtttgtacaataacgtgaatgcacctaacatgattgaactggacagttaaaagtagttaagatggtaaatgttatggtatattttatggtatattttaccacaatttaaattaattaaagagaaaggttagcataagcgagacacaaaagataaatggatatgcgattccacttacgtgagatacccagaggagtcaaattcatagagacagagagcagaatgattggtggttctcaggggctggggggaaggtagaacagagaattgggggacagagtgtcactttggtaacatgaagaagttctggagatgggtggtggtgagggtgacccaacaatgaggatgtacttaatgctactggcctgtgcgcttacacacggttaagatggtacatttcagcttatgtatattttatcacaataaaaaataagttagcaacattcaaacaaaaacattttaatttaaatagctgcatgtggccattggctaccatgttgaatagcagctccagaggccccctggagaatggggccacagtcactgtggtctctgctgcaagacagagtggtgagggccaccaggtcccagctctgcaccctgcagatttgaatgaatccttccagcagctgatgctgatggagcactcacgtgtgccaggtgctccctcccagccgtcttgctgtgtcttcacgacagccctgaatgatgggagtcactactatccctggggtcaggagtgggggacagttccagaggcacggtcctagccaggcagctgcactcagctccaaacactcatcatatttggtctttgcagagccccatgtgttagagccccctccccttttgcttttttctaggttaggagccaggtctcaaaagacttcacattcaggccttcacttgattccagattctcctgcctaaagtgagaggagggatggattgctttactttaaaatatttccagctgggtacagtggctcccacccgtaatcccagcactttgggaggctgaggcaagtagatcacttgagcccaggaatttgagaccagcctgggcaacatggtgaaaccctgtctctacaaaaaatacaaaaattagccgggcatggtggtgcgtgcctgtagtcccagctacttgggaggctgaggtgggagaatcgcctcagggaggatcacctgagcctgggaggccgagctgcagtgagccttgattgcatcagtgcactccagcctgggtgacagagtgagaccctgtctcagaagaaaaaatatgccccccttaagtttgtgcaaagcatttgccaactccttaccctgcccggaaacatcacaagtctttctctgcagtttgcagatggcgtgtacctggttctgctcatgggccttctggaagactactttgttcctctccaccacttctacctgactccggaaagcttcgatcagaaggtatgtgcatggtctccatccttggtaggggctcaagaaatgctcattgaaatgcagagcatagactatcccggcagctcttcctgcagcctggctgcattcttcagaaagtaaaaaatgcacaagtgatattgcaattagatgtaactctcagcaaaagaaataagaagcccatcagccgtccacaacgcatccgagttttgtttgccacattttctttgcggtcttttccatgggaccgtgtagtttttaataattgtgatcacatctcggtagagttgtaaacccttcccccattctgctgcagctccaccacctgtggttttccctgctgcttcccaagctttccaaataccatctccagtggtggcacgaagtcccaaggatggctctgttaccagcgtctttccattccccattcttgggcagtcaacttgaacatgtttctattgtttttccctactgaaacaacagagcatctttttgatacagattttttttttcattcctgtggattgttttcttaggaaaatttctcaaatagggtcaaatttggggcattcctttcaatctgggctggcccacgccacccggtcccgctgtcactgccctcgtgcgtgggcctctccctgctgtctgccctctgtccagggcttcccgcagccaagcctctcacagcagtatttagcacattgcctttaaaaacttggccatggatggtctatgttgctttggattcatgggcatctgtcattttattttcccaaagtgttagacccatgagtcagggaggcagacaatgtaagctggtggcggcagccagagaaatagcagaaatggggccagtgtttatcaatctgcccacttctggcacgttgcagtctgtttgcttgtggccaaatgttgttcctatcttgcctgctgagatggaatcaggacagattagagaggtcttggcacatggagtccatgttgaatcgagagagagagagcgagcgagcgagcaagagggagtgcagagggaatgagcagaattgtgcagaactcaccaggaaactcaccaggtgcctgtgctgtcatcctggaaatgaaaggtcagaccatccagcgaagaagcgcatgcatttccaggccccgatatggctggttgcagacacattgttttggagagatcttttctttcttcaaactagtaagaatgctggcgagaacagtgagtttagccaggagacctagggctggtttctttccaagacaaggctttgtacaaatgtcagaggcatcatctcctgggccctggccttcttccctttgaaactgggatgaaagtctttgacaattgctgccctggcctgcgaggcttgaggaggcttgagtcatctgccttcccctctgaatcggagcgaggaagggaaggctattttcaggtatagcatgcagcacaccattcatcctgttcactcaggagaaagggagcctggggtggcggtgtggctctgcgggtggctggaacactctccttcggaggatgggaggctgtcagtagttcctcctccagcccctgccttttttccctttctcctcatggcagctgctggcaaggtcttcatgagcccatagtatttattatctaccttgtagtcttcgtgaatcctggacaggtgggtggtccctgctgtggaggactcacccacttcaggctgggcccaacacccgtgtactcaaaactgcttgcggatgggatgttgatggcatcccttgctaatgtctcctgtgggctgagaccccgaggtgcgtttgctctggccctgggaatcctgacagctgctccacatttttgggaggagggactgaggttcagtgagcaaaaccagagatgcgtcatgagctgctgtccccgagggtagtaatgacttatggtttaaaacaattgcattggatttaaaaaatatcacactggacagctcagagcctgtaggctcgtgccccatgagctatctcagaggcatgagtgtggccttcagtttttttgttgcaaagccactgtttgagccttaccctgcactggccacgtgctgagcaccttgcacccattggtcatcattttgggagactctgcaggctccctctctctgtcgagtggggtgcatcctggagacgtggagatctttcctagaagaagacacgagttgcttccccctcagcattactggatgaggacagggaatctcaggaaggcttagagaccagcccagggttgcacggccagcaagggcagagccaggagggtcgactcctattccagaaccctctattctttcctcacctggccaagttgattaaaaccttttgaattgcagagagaaaggatttctgcccatgtggctggctcgaagcaggtgtgtatatggcctggtctctgctgggccttggggcctcctactgcagtcacagctggggtgagcggtccccaggcctctccgggatccatgtgctgggtatccagggatctaggctcaggggacacttctctgcctggcatgaaagagggctgggggaggaggcatggccttgagagataacaggcatgggagggtggcaatttcctgcctggcatttcctcagcctgagaagaaagcagaaggaaaatctcacttcaaaaccacttactgtggggccgagcggctgcagagcaatgaggcttggaaggggctttgctctccccttaaactgttctctcatggtgtaggggtgaccacctcgtcacccgatcacactctccagccgtctctgagtgtctccacgtgtcatgcatctcatccccagcccctcctgagcatccactccctcagcgtggaagaggattcctcaggcttaagaggtgcacgggagaggcacgtgaaaagaccggtccaaattggtgctgacttttacaatggagaagaatcttttcttaaaagaaaaatcttttctcgctattccctctctttgctatcctgtctccatctcgatttggggtcaagcctgttgtgtgtgtgtgtgtgtgcacgtgtgcatgtgcatacgtgtgtgtgagctcatttgatgatatggacggtggtcagctaaagggacctgtgttgctaggggagtggaggtgggaggctcttggaggagaacgggcacagattctacgtttcagtcctggttccatgcctgtgagccccgtgccttgtttttcttttcttttttttttttttttggaggcggggaaggaatctcactctctcacccaggctggagtgcagtggcacgatctcggctcactgcaacccccgcctcctgggttcaagcgattcttctgcctcagcctccttagtagctgggattacaggcacatgccaccatgcctggctaatttttgtatttttagtagagacggggttttaccatgttggccaggctggtcttgaactccagacctcatgatccacccgcctcagcctcccaaagtgctgggattacaggcgtgagccactacatccagctgccccatgcctttttagggcaccgatgtcctagcccatctcagcccagcaccaccctcctttgtgaaggaagatgatattcacctcgtacagggctgggaggggaaagggaacctgtatggaatacactgaccccatggtggatgcacagcacccgcaggtcgctccctgctctctccttaggggaactgcgttctgcaccctccgcacgggccgtcctcactcctcccccattgccagtgtttggccatcctcaggcccagccctggtgcagcactcccgcatctccaggcaggctgtcctgcagggttggggtgtctgccatgtggcccagtgttcccattggcagtttctgagttggcctctggagcagggtctccgtctgctgcacccccgcccctgggtggacatggcctgccctcctgccgggctgtgtcttccccactgaccctatgactagccagaccctcttgcggttggtgctggcaggtcattcgcccctttgcttctccgagcacaggccgtgtgcactgtggaagcttttccaaagcaccccacactgttttccagtgttgttcgtttgattaactcagggaagcctctttttcctggttaattattaaattacattgcaagtaaaattgttcttgtttctgattcattggcctcaaaatcatgaaaatatgatcgttgaaaggattttttgtttgtttgtttgcttgtttttttgagacagagtgttgctctgtcacccaggctggagtgcagtggcacaatctcagctcactgcaacctccgcctcctgggttcaagcgattctcatgcctcagccacccaaatagctgggattacaggtgtgcaccaccatgcccggctaatttttgtatttttagtagagatggggtttcaccccattggtcaggctggtctcgaatgcctgacttcaactgatccacctgcctcggcctcacaaagtgctgggattacaggtgtgagctaccacgcccagccaggatgtttgattactaagagccctgaagtcccttgcactgtgacatctgtgcttgtttgctgtttgtttgtttgatgtcccctcctcccatcagccttggcttgcggcaggtgggtggctggatgtaatctggttcattgccggcatccctctgagtggtctttaaacacagcccagaaggcttttattttaaacctgttcagccatcattagcaggataaaagcttcaggtacatttgggggctgaggagtaatagaccctttaatttcaggggaagtcacggtagggcggaggtggccacgtttctgcagcatctaacaggaccaaggtcctgcaggctgacgcttgcagccaccatcgatctgacttccgttctgactggtccactgtccctactcagtgctaaggccctccctcccctgagggcaccccatcctgcagagacacagcctcacgtgcaggtctttacagcccttcctggggcagtgccaggcctgcgtgcctctgcacgggactcatcctttctgggcctcagtttccctgtctgtgaaatggggtcactgtgggccaggcgcagcggctcacgcctgtaattccagcactttgggaggctgaggcgggtggatcatttgagcccaagagttagagactagcctgaccaacatggcaaaacccgtctctaaaaaaaataataataatacaaaaattagccgggcacagtgatgcgtgcctgtagtcccaactactggggaagctgaggcaggaagatggcttgagcctgggaggtggaggttgcagtgagctgagatctcgccactgtgcactagcctgcgctctagaccctgtctcaaaaaacgtaaataaataaataaacaaagaaataataaataaaatggggcccctgtgacttctcatcaggtggctggcatctggggcagagcaggctcttggtggccgtgagccctcgagagcaggccgggcacctcatccttccatctctcagcccagatcactggtgtgaggggtgagaaccacctagtaagcgcacatggccctccgcagacttcctcacccgtgtctgcccaccctgtggcccgccccgggctcactgggtccttgtggacgtcagcgttgcagaggcttggtcctgtccatgccggctgtcctccagcagtgggccgtgtgtgggaacgactgttggaccctaacgctgacccaccccccttccttggcaggtccacaatgtgtccttcgcctttgagctgatgctggacggaggcctcaagaaacccaaggctcgtcctgaaggtaatgcccctggctcaggttcccccgggagaggtgcgcacggaggggaagaaaaacgggtcctagaagtggctggaaggctggcatgttgttccccagatgggccccacgtctctggctctggggcaagggtctgccaaccccagctcctcagtctcctcattttgggaaccaggaggacttcgctggtggagctggcagtgccggttctttaataaccacttgactttgaaggacgtggcctctgcccacagacctcaggattaagtgcgtctctagctggccactcaggctggaaatgcagcttcgtgccctgagaagaaattaaaggcttactcaactgtaatgactgttgggctggaggtcccctgatgctcagccaaaggcagtacttggtagcagggacttggcatgctctgcgtgggtcggagctggaggcaggaggccagcagagctggggcgggcggttgcttccctgtcccccccccggctcctgtgccaagttacctataggaggactctctaacctgagtgagcatcacagttccccaaacacacttcctaggtgtttggggacagccaggctcagcagaacatgggtggcactgcctgtgaaccctgctggaaagttacagggcagagctgaacattaaaggctttgacaagtcctatatgaagacatctgtttgcctccatcaaaacctttgccatgcaggaggagcccacagaactcagacactgtggtttagtgccctgggcccctactttgaccgtggccccctacctagccctgctccctctcctgagtcccccatggtgctatatgagttgggagcccatgatgcttcctacacctgttgccagcatccgctcaacggcgggctttgtagagtctccaaaatagctagaaaatggatcctgtcccttccatctacccactgcagccaccgcttcctgccagtccacgcggaaggttcctggccggtcccttcctgcctgttcatcctcctcttggggtttcacaggacaatttcacaccctcctgtctcgtgtgtatggctgcttattcttttttgttttgagacagggtctcactctgttgcccaggctggagtgcagtggtatgatcacagctcactgcaacctcttcctcttgggttcacagcatcctcccacctcagtctgtcgagtaactgggactaaggtgcataccaccatgcccggctaatgttttaacttttcttttttgtagagacaaggtctcactatgttgcccagactggtctcgaacttctgggctcaagcgattcgcccattacaggcacgagcccccatgcctggccttgtttattttttattgtccctccctccccactagaacagaagcctcaagggagcagggctttgtcccctgcatgccggtgctgagaatggtgcctggcctggaaactgctcgacagcacggatcaaagcacatgtccagcagggagtgtggcgagctgctgcctgtagataccggcccggcctgggtctctgggacccctcgttgctgctgccctgcagcccttttgttgctgtgaggcagggccatgagggagtggctagagacccgagggatgctgctttgcctctccccagctgtgcatccttgaacaggttactttgcctttctgtgccagggcctcctcctctgttgaggggagtgatgatggcacctgcctccacgcgtcatggggtcgctggatggggggcggatgttcatcacacaggacttgtcagagccttcactgttcaactctgccctgtaactttccagcagggcccacgggcagtgccaccacgtgctgctgagcctgactgctcctgagcacctattacgctcaagtgagctgctcccatgagcactggaagagggtcctgcccacagaacacaccaggtccctgctgatggtggctgctagctcggcgttagtgtctggtgggtcgcacactgtcagggaggagaaatccttgctcatgtccactgtgggcttggctggggcttcctttagtttcctgtagcccaaagcctgggccctatctgcagcatggggtgcttcccccgtaccctcagaagagcccctggtggccctttgcctctgagctgctgagggagccctgcttctttgtcctcccgaacccacgactttttttttctgagacagagtcttactttgtcacccaggctggagtgcagtggcgcgatcccagctcactgcaatctccgcctcctaggttcaagcaactctcttgcctcagcctcacaagtagctgggattacaggcacccgccaccatgcctggctaatttttctatttttagtagagatggggtttcaccatgttggccaggctggtcttgaactcctgacctcaggtgatccacctgccttgccctcccaaagagctgggattacaggtgtgagccaccacacctggccctttgtcccgtttttgaggagtgaggcaggagcctgtccagaggccaggatatcctctggcaggccggcctcctaggagggtgtttgcccctgagcccggatgtgtttcctactcatctgccgctggacggcacgttagggaacccaccacggacgtgtggaaaccaggccagaggcagaggcactggtccagggcaaatagcaagttctgcagcctcccaggcagggtcccttgggtgtcccagggcctctgtccagcccaggcagggggcagagctggtctgcagtgctcattagcaccttcgctgggccagcactgggcaggggccaagccgcagagatttatgagatggggtccctgctgggcctctttattttgtggctgatgcaatgaatgagagacttttccttcttcattcaaaatcagctggggagcaagaatcaggaggtaacagagataagaatgacacggagaatggggtgcagtggctgcggtctccctgacaccctcctctgagctaggcagacttacccgggtacccagggctggtggggagggaggcagtggctgtggcctcccctgcaggcctgagactgccctgttggtccccacccggaggaagcagagcagtctcacaccccctgcacgtgggcgggtctgaagagccaggcctgcacctggttccctaggcccccagcaatgatgggcatcctggccccctgcccccttgtggggacctggcggagactccagtggggtccccgaccctgctcttaaggaggccccttgcctgggagaaaggcttgtggctcgctccaaattcacagagccgagtgcggagctcgatggtggggtgggtgtttggggagcacagagggactgaggttcatgggtcacagaaggtgattcctatccctgggcgcaggtgctaaggggtggctgtggttagcaggtctggcaggggtgtgagggttaagttctgtttgtccagcgaggctgtctggaagttctcagagctcagacctgggggctgctgcgtgggggcatcggtgtcaggctgctgctctggtctccctgtgagtccaccatgggagtggagtcagagggggccaggaggtgatggcccccacccctgggagctcctctgtccttgctgcccccctcgccttggccacctccaactccatggccgccattctccctcccctgcctccactgggctgttgggagctggggtggactcttcaggtcagggggagaccctgggatccctgacagagccccgggtgtgtccccaagcccaccgagctgagttcagccctgcttttgctctgacagcacactcgtgggcaggtcatttctccatgtgagtcttggtcctctttgtaaaacgagagggaaggaaaggaggctgtgcaggctctgatgagggtgtgtgagtcgagaaactccatgcccagtgacaaggacagttgctgattcttagcatccaccccacctgctctctcagtaaccgatgtcgtttcttactcttgtgatcaggactaaagcacagggtcatcccatggctgcttttggatcacagggagtcaggactccaagggcctcgagcgttacctggtccaggcccattttacagatgaaggcactgagccccaaatcacggaagtcacttagaggtcacagagcaagtgaaatgaacaaggtgtctgattcccaggaaggttcttgtccacataaagaaagtggcccaagacttccagggccccagagggagctgtcgggtccattaagtgttactggggtttttggtcccggtaagtgtcattagccatgtcccccaaccggttcttagacatgtcctgatgcagatccaggaggggctgtgggagtgtctctgttcttgtcaccccaggtgcctgtccccgcagggtgtcagcccgcgccaggagctctcacacaacctgtgtgtctggggaggcactgcccagagcgtcctggacatggtggtggccagtctttaaggggaagcgctgtgtgtggatgcggcagctggtgtcatgctggagacgtggcttctgagagtacctaccgcaatgacaggaggatggcacgcctctgaagtttctctgtttccttctgcagacgtggttaacttggacctcaaatccaccctgagggttctttacaacctgttcaccaagtacaagaacgtggagtgacgggggagctgtggatggtggcaggagtgtcccagcaagaaaggcggcatccgtctgtgccctgtgcctttccagggagccaggcgccatgggcttctggtccaagctgtgttgactgtcatccccaccccacccctacctcacgcctgccccaccccctgcctcttttggttgttgttcttaatctcctctccatgtagttcccagtgggcaagagcctttgaaaatgcaggattctaaacactcgtgcttgcgtttgaagcctcgcgtcactcagtcgcgtgggatgatgagtccgttgttgtctgccttggccgaaagatgaaaaaaagcctgaaccccaacccccagctggttgagagcaccctgcattctgcctcatggtgcagttagcgatcacaggccttcagaagtacaacatcagctcagcaggaacgccggctccccgaggacccaggcttgacgattcaccggggatctcctgggctgggctctccttggaagtgaggccttttattaaaaataaaagggttttgcagtttgaaaaactttaaa

SEQ ID NO: 418 - DNA, 1715 bp, Homo sapiens
ctctccccggggcgaccgggcggctccacacgcgctgcgcccgccgccggccccacgcgcggcccatgtcctccgcgccgcgctcgcccaccccgcggccccgcaggatgaagaaggacgagtcgttcctgggcaagctgggcggcaccctggccaggaagcggagggcgcgcgaggtgagtgacctgcaggaagaaggcaagaatgccatcaactcaccgatgtcccccgccctggtggatgttcaccctgaagacacccagcttgaggagaacgaggagcgcacgatgattgaccccacttccaaggaagaccccaagttcaaggaactggtcaaggtcctcctcgactggattaatgacgtgctggtggaggagaggatcattgtgaagcagctggaggaagacctgtatgacggccaggtgctgcagaagctcttggaaaaactggcagggtgcaagctgaatgtggctgaggtgacacagtccgaaatagggcagaaacagaagctgcagacggtgctggaagcagtacatgacctgctgcggccccgaggctgggcgctccggtggagcgtggactcaattcacgggaagaacctggtggccatcctccacctgctggtctctctggccatgcacttcagggcccccatccgccttcctgagcatgtaacggtgcaggtggtggtcgtgcggaaacgggaaggcctgctgcattccagccacatctcggaggagctgaccacaactacagagatgatgatgggccggttcgagcgggatgccttcgacacgctgttcgaccacgccccggataagctcagcgtggtgaagaagtctctcatcacttttgtgaacaagcacctgaacaagctgaatttggaggtgacggaactggagacccagtttgcagatggcgtgtacctggttctgctcatgggccttctggaagactactttgttcctctccaccacttctacctgactccggaaagcttcgatcagaaggtccacaatgtgtccttcgcctttgagctgatgctggacggaggcctcaagaaacccaaggctcgtcctgaagacgtggttaacttggacctcaaatccaccctgagggttctttacaacctgttcaccaagtacaagaacgtggagtgacgggggagctgtggatggtggcaggagtgtcccagcaagaaaggcggcatccgtctgtgccctgtgcctttccagggagccaggcgccatgggcttctggtccaagctgtgttgactgtcatccccaccccacccctacctcacgcctgccccaccccctgcctcttttggttgttgttcttaatctcctctccatgtagttcccagtgggcaagagcctttgaaaatgcaggattctaaacactcgtgcttgcgtttgaagcctcgcgtcactcagtcgcgtgggatgatgagtccgttgttgtctgccttggccgaaagatgaaaaaaagcctgaaccccaacccccagctggttgagagcaccctgcattctgcctcatggtgcagttagcgatcacaggccttcagaagtacaacatcagctcagcaggaacgccggctccccgaggacccaggcttgacgattcaccggggatctcctgggctgggctctccttggaagtgaggccttttattaaaaataaaagggttttgcagtttgaaaaactttaaa

SEQ ID NO: 419 - protein, 362 aa, Homo sapiens
MSSAPRSPTPRPRRMKKDESFLGKLGGTLARKRRAREVSDLQEEGKNAINSPMSPALVDVHPEDTQLEENEERTMIDPTSKEDPKFKELVKVLLDWINDVLVEERIIVKQLEEDLYDGQVLQKLLEKLAGCKLNVAEVTQSEIGQKQKLQTVLEAVHDLLRPRGWALRWSVDSIHGKNLVAILHLLVSLAMHFRAPIRLPEHVTVQVVVVRKREGLLHSSHEELTTTTEMMMGRFERDAFDTLFDHAPDKLSVVKKSLITFVNKHLNKLNLEVTELETQFADGVYLVLLMGLLEDYFVPLHHFYLTPESFDQKVHNVSFAFELMLDGGLKKPKARPEDVVNLDLKSTLRVLYNLFTKYKNVE

SEQ ID NO: 420 - DNA, 1797 bp, Homo sapiens
ttttaaagaccagataaatttacctttgggacagttagatgtgcacaaatgcaccatgtgtttaaagatcaccaaagaggagagaaaaggggattccttagtccagagaacaaaaactgcaggaggctggagctgagacgtgggtgttcctgcagctggggcctgtgctcccaggcactcatggcttctctggctggttcacttctccctggctcagacagatcaggagtggaaacatctgaatatgctcaaggaggagtgagtgacctgcaggaagaaggcaagaatgccatcaactcaccgatgtcccccgccctggtggatgttcaccctgaagacacccagcttgaggagaacgaggagcgcacgatgattgaccccacttccaaggaagaccccaagttcaaggaactggtcaaggtcctcctcgactggattaatgacgtgctggtggaggagaggatcattgtgaagcagctggaggaagacctgtatgacggccaggtgctgcagaagctcttggaaaaactggcagggtgcaagctgaatgtggctgaggtgacacagtccgaaatagggcagaaacagaagctgcagacggtgctggaagcagtacatgacctgctgcggccccgaggctgggcgctccggtggagcgtggactcaattcacgggaagaacctggtggccatcctccacctgctggtctctctggccatgcacttcagggcccccatccgccttcctgagcatgtaacggtgcaggtggtggtcgtgcggaaacgggaaggcctgctgcattccagccacatctcggaggagctgaccacaactacagagatgatgatgggccggttcgagcgggatgccttcgacacgctgttcgaccacgccccggataagctcagcgtggtgaagaagtctctcatcacttttgtgaacaagcacctgaacaagctgaatttggaggtgacggaactggagacccagtttgcagatggcgtgtacctggttctgctcatgggccttctggaagactactttgttcctctccaccacttctacctgactccggaaagcttcgatcagaaggtccacaatgtgtccttcgcctttgagctgatgctggacggaggcctcaagaaacccaaggctcgtcctgaagacgtggttaacttggacctcaaatccaccctgagggttctttacaacctgttcaccaagtacaagaacgtggagtgacgggggagctgtggatggtggcaggagtgtcccagcaagaaaggcggcatccgtctgtgccctgtgcctttccagggagccaggcgccatgggcttctggtccaagctgtgttgactgtcatccccaccccacccctacctcacgcctgccccaccccctgcctcttttggttgttgttcttaatctcctctccatgtagttcccagtgggcaagagcctttgaaaatgcaggattctaaacactcgtgcttgcgtttgaagcctcgcgtcactcagtcgcgtgggatgatgagtccgttgttgtctgccttggccgaaagatgaaaaaaagcctgaaccccaacccccagctggttgagagcaccctgcattctgcctcatggtgcagttagcgatcacaggccttcagaagtacaacatcagctcagcaggaacgccggctccccgaggacccaggcttgacgattcaccggggatctcctgggctgggctctccttggaagtgaggccttttattaaaaataaaagggttttgcagtttgaaaaactttaaa

SEQ ID NO: 421 - protein, 395 aa, Homo sapiens
MHHVFKDHQRGEKRGFLSPENKNCRRLELRRGCSCSWGLCSQALMASLAGSLLPGSDRSGVETSEYAQGGVSDLQEEGKNAINSPMSPALVDVHPEDTQLEENEERTMIDPTSKEDPKFKELVKVLLDWINDVLVEERIIVKQLEEDLYDGQVLQKLLEKLAGCKLNVAEVTQSEIGQKQKLQTVLEAVHDLLRPRGWALRWSVDSIHGKNLVAILHLLVSLAMHFRAPIRLPEHVTVQVVVVRKREGLLHSSHEELTTTTEMMMGRFERDAFDTLFDHAPDKLSVVKKSLITFVNKHLNKLNLEVTELETQFADGVYLVLLMGLLEDYFVPLHHFYLTPESFDQKVHNVSFAFELMLDGGLKKPKARPEDVVNLDLKSTLRVLYNLFTKYKNVE

SEQ ID NO: 422 - DNA, 991 bp, Homo sapiens
ttttaaagaccagataaatttacctttgggacagttagatgtgcacaaatgcaccatgtgtttaaagatcaccaaagaggagagaaaaggggattccttagtccagagaacaaaaactgcaggaggctggagctgagacgtgggtgttcctgcagctggggcctgtgctcccaggcactcatggcttctctggctggttcacttctccctggctcagacagatcaggagtggaaacatctgaatatgctcaaggaggagtgagtgacctgcaggaagaaggcaagaatgccatcaactcaccgatgtcccccgccctggtggatgttcaccctgaagacacccagcttgaggagaacgaggagcgcacgatgattgaccccacttccaaggaagaccccaagttcaaggaactggtcaaggtcctcctcgactggattaatgacgtgctggtggaggagaggatcattgtgaagcagctggaggaagacctgtatgacggccaggtgctgcagaagctcttggaaaaactggcagggtgcaagctgaatgtggctgaggtgacacagtccgaaatagggcagaaacagaagctgcagacggtgctggaagcagtacatgacctgctgcggccccgaggctgggcgctccggtggagcgtggactcaattcacgggaagaacctggtggccatcctccacctgctggtctctctggccatgcacttcagggcccccatccgccttcctgagcatgtaacggtgcaggtggtggtcgtgcggaaacgggaaggcctgctgcattccagccacatctcggaggagctgaccacaactacagagaaggcagtgcatggaaaggatctgtgcactcactcactgggaatctttgaggagaagctgctcaccactcccgtctcccccattgcttccgctgccgcctgcctgagatcagggcctggcctcgtggttctccaggatcctttagttccac

SEQ ID NO: 423 - protein, 313 aa, Homo sapiens
  VARIANT (1)...(313): Xaa = Any Amino Acid
MHHVFKDHQRGEKRGFLSPENKNCRRLELRRGCSCSWGLCSQALMASLAGSLLPGSDRSGVETSEYAQGGVSDLQEEGKNAINSPMSPALVDVHPEDTQLEENEERTMIDPTSKEDPKFKELVKVLLDWINDVLVEERIIVKQLEEDLYDGQVLQKLLEKLAGCKLNVAEVTQSEIGQKQKLQTVLEAVHDLLRPRGWALRWSVDSIHGKNLVAILHLLVSLAMHFRAPIRLPEHVTVQVVVVRKREGLLHSSHEELTTTTEKAVHGKDLCTHSLGIFEEKLLTTPVSPIASAAACLRSGPGLVVLQDPLVPX

SEQ ID NO: 424 - DNA, 2023 bp, Homo sapiens
ttctctccggctttcaggacgtcctgaggctgcacccacgtggcaatggtgtctgtcgcgctgtcgcctggatccggcaccactagcggagccgagcagagcccagggctccaacgcgtagggaaaaggctgcgccgctcccggggtggccccacgccccttctctgagcttgagcggcggcgcgggacggggacggctctgcccgggaccagcaggcctcgggcatccgggacgccggggccgcgctccaggccaggggcgggggcgggaccggggcgggggccggcggcggggccgcgccctcggcctctccccggggcgaccgggcggctccacacgcgctgcgcccgccgccggccccacgcgcggcccatgtcctccgcgccgcgctcgcccaccccgcggccccgcaggatgaagaaggacgagtcgttcctgggcaagctgggcggcaccctggccaggaagcggagggcgcgcgaggtgagtgacctgcaggaagaaggcaagaatgccatcaactcaccgatgtcccccgccctggtggatgttcaccctgaagacacccagcttgaggagaacgaggagcgcacgatgattgaccccacttccaaggaagaccccaagttcaaggaactggtcaaggtcctcctcgactggattaatgacgtgctggtggaggagaggatcattgtgaagcagctggaggaagacctgtatgacggccaggtgctgcagaagctcttggaaaaactggcagggtgcaagctgaatgtggctgaggtgacacagtccgaaatagggcagaaacagaagctgcagacggtgctggaagcagtacatgacctgctgcggccccgaggctgggcgctccggtggagcgtggactcaattcacgggaagaacctggtggccatcctccacctgctggtctctctggccatgcacttcagggcccccatccgccttcctgagcatgtaacggtgcaggtggtggtcgtgcggaaacgggaaggcctgctgcattccagccacatctcggaggagctgaccacaactacagagatgatgatgggccggttcgagcgggatgccttcgacacgctgttcgaccacgccccggataagctcagcgtggtgaagaagtctctcatcacttttgtgaacaagcacctgaacaagctgaatttggaggtgacggaactggagacccagtttgcagatggcgtgtacctggttctgctcatgggccttctggaagactactttgttcctctccaccacttctacctgactccggaaagcttcgatcagaaggtccacaatgtgtccttcgcctttgagctgatgctggacggaggcctcaagaaacccaaggctcgtcctgaagacgtggttaacttggacctcaaatccaccctgagggttctttacaacctgttcaccaagtacaagaacgtggagtgacgggggagctgtggatggtggcaggagtgtcccagcaagaaaggcggcatccgtctgtgccctgtgcctttccagggagccaggcgccatgggcttctggtccaagctgtgttgactgtcatccccaccccacccctacctcacgcctgccccaccccctgcctcttttggttgttgttcttaatctcctctccatgtagttcccagtgggcaagagcctttgaaaatgcaggattctaaacactcgtgcttgcgtttgaagcctcgcgtcactcagtcgcgtgggatgatgagtccgttgttgtctgccttggccgaaagatgaaaaaaagcctgaaccccaacccccagctggttgagagcaccctgcattctgcctcatggtgcagttagcgatcacaggccttcagaagtacaacatcagctcagcaggaacgccggctccccgaggacccaggcttgacgattcaccggggatctcctgggctgggctctccttggaagtgaggccttttattaaaaataaaagggttttgcagtttgaaaaactttaaa

SEQ ID NO: 425 - protein, 362 aa, Homo sapiens; identical to SEQ ID NO: 419

SEQ ID NO: 426 - DNA, 2017 bp, Homo sapiens
ttctctccggctttcaggacgtcctgaggctgcacccacgtggcaatggtgtctgtcgcgctgtcgcctggatccggcaccactagcggagccgagcagagcccagggctccaacgcgtagggaaaaggctgcgccgctcccggggtggccccacgccccttctctgagcttgagcggcggcgcgggacggggacggctctgcccgggaccagcaggcctcgggcatccgggacgccggggccgcgctccaggccaggggcgggggcgggaccggggcgggggccggcggcggggccgcgccctcggcctctccccggggcgaccgggcggctccacacgcgctgcgcccgccgccggccccacgcgcggcccatgtcctccgcgccgcgctcgcccaccccgcggccccgcaggatgaagaaggacgagtcgttcctgggcaagctgggcggcaccctggccaggaagcggagggcgcgcgaggtgagtgacctgcaggaagaaggcaagaatgccatcaactcaccgatgtcccccgccctggtggatgttcaccctgaagacacccagcttgaggagaacgaggagcgcacgatgattgaccccacttccaaggaagaccccaagttcaaggaactggtcaaggtcctcctcgactggattaatgacgtgctggtggaggagaggatcattgtgaagcagctggaggaagacctgtatgacggccaggtgctgcagaagctcttggaaaaactggcagggtgcaagctgaatgtggctgaggtgacacagtccgaaatagggcagaaacagaagctgcagacggtgctggaagcagtacatgacctgctgcggccccgaggctgggcgctccggtggagcgtggactcaattcacgggaagaacctggtggccatcctccacctgctggtctctctggccatgcacttcagggcccccatccgccttcctgagcatgtaacggtgcaggtggtggtcgtgcggaaacgggaaggcctgctgcattccagccacatctcggaggagctgaccacaactacagagtaagtggacccctagcgggatgccttcgacacgctgttcgaccacgccccggataagctcagcgtggtgaagaagtctctcatcacttttgtgaacaagcacctgaacaagctgaatttggaggtgacggaactggagacccagtttgcagatggcgtgtacctggttctgctcatgggccttctggaagactactttgttcctctccaccacttctacctgactccggaaagcttcgatcagaaggtccacaatgtgtccttcgcctttgagctgatgctggacggaggcctcaagaaacccaaggctcgtcctgaagacgtggttaacttggacctcaaatccaccctgagggttctttacaacctgttcaccaagtacaagaacgtggagtgacgggggagctgtggatggtggcaggagtgtcccagcaagaaaggcggcatccgtctgtgccctgtgcctttccagggagccaggcgccatgggcttctggtccaagctgtgttgactgtcatccccaccccacccctacctcacgcctgccccaccccctgcctcttttggttgttgttcttaatctcctctccatgtagttcccagtgggcaagagcctttgaaaatgcaggattctaaacactcgtgcttgcgtttgaagcctcgcgtcactcagtcgcgtgggatgatgagtccgttgttgtctgccttggccgaaagatgaaaaaaagcctgaaccccaacccccagctggttgagagcaccctgcattctgcctcatggtgcagttagcgatcacaggccttcagaagtacaacatcagctcagcaggaacgccggctccccgaggacccaggcttgacgattcaccggggatctcctgggctgggctctccttggaagtgaggccttttattaaaaataaaagggttttgcagtttgaaaaactttaaa

SEQ ID NO: 427 - protein, 110 aa, Homo sapiens [sequence omitted]

SEQ ID NO: 428 - DNA, 281152 bp, Mus musculus
  misc_feature (1)...(281152): n = A,T,C or G
cctctcggctctacgcttcggagtcctggtgtctctgagggggccgccggggcacaggagagggccgctggaggtgtggccgaccgctctcgggtgtcagggttgcggatctgagggatgaggagcggccatggccagcgacggggccaggaagcagttctggaagcgcagcaacagcaaggtcccgggcaggtgggtgtgacggggaggacccggtcggggtcaggggtcagaggtcaggtggccgtgctgtcccgttgcagtgcgggtggcgtaggagtctggggaggagaacctggctcctaggagactgttgggctatgtgaggggctaggggagtcggggtcggcagtgggcgtgtgggaaatgaaaggtgacagtggccgtaccaatgagcaaggaggacgaggagctgccccaagtgcttccagagcctggcaggcaggttctctcctgcgaaactccatgactccctggggaagctggaagaaactgacccaggtcatgccctggagagtttggttgagtcaggaaactggccagggagaggcagtgcctgcaggggaggtcggtctcttcggggtgcatagtggtttgagcacttgggttttcgtctgtcacatgtgggctgatgcttttcctttgagcgtggaagcgccttgtgaatttctgtggtcccaccttctggcctctggacaccggtcttttgacagcaacaggaaacacagaataataataaaaacacctgggtgcagtctggaagctatcgagctccaaagtccttctgtgattggttatgtggcctgatgcttctctaggtcttagggagtgaagagacagtacccggaaatgtatttcagaaaagtccatcccaagatttcaaacatagtttattctgttttctagccaaagtctcagatatgaaatttaagattctaacattagccacctctccagtcctgaaggttttgacattgaggtaacttaagtagaaccattcgtgagcttggaaaatggtctgtcttcctgtgcttcctaagagacaccattgtgtgaatgttaaaattgtaaactcggatatccactgtattcaaccacaaaatgtgcttttcaaagtggctggggcttggcaagggttactgactgctgggccacagtgacttgggagatggaggaagtcctcagaggtacccagacactgtattttttacaggacctggactgggcttgcttgaatagttaagaacttttataaaagctattattatagtttatggtgagtagaaggtcctactgtgacagggataaacacgttgagcctagtgccagataaacagaagcatgtggcagtgtgacttctgttgttgccttcacatctcgagactcagttcttcttcttcnnnnnnnnnnnnnnnnnnnngaaggaatggggcacacctctgcacactctccttcagggagacttccagactgtcaccaaaaccagaaacactaccctgggggagggctacaggacttgcacgcagcacagaggctgcacaggctctcatcagcgccctgcctctcccctgtgcagtcctcagcagcatcctccagcaggtcacaggactcctcatcagctctgtaacatgggagctgctctcaaaagtgcctgatatgcaacccagcaagaaagccgagaggaaagaaggctggctttggtaatgtggggtcacaccgaagagactgggactgtgtcagtttcctgtgacatccgtagtagcctaaggaggtggaaatgtttcccctttttgggtcctgaaaccaagatgtcagcagattgtgctgtctgtgagggccatttcccaccatgtctacatagacatctagggttgactactggctgctgcctaacacacacacacacacacacacacacacacacacacacacacacacgaacatattccggtttgtgtgtcatccttttgtaaggcccatgctaatctctgtattattccaattttagtaggtataccactgaagtgagcacccaattttttttttttttttttttttagatttatttatttattatatgtaagtacactgtagctgtcttcagacacaccagaagagggcatcagatctcattacgggtggttgtgagccaccatgtggttgctgggatttgaacttcggaccttcagaagagcagtcgggtgctcttacccactgagccatctcaccagccccatagcacccaatttttaatttccattctcctgcctccctcttgagaagctgggccatagctatgtaccactaaagttttatttcaaagagctctcgaggcagtgctaggacatgattattaatcttagttttgctaggtctctcaaattctaaggattattagaagtaggattccaaggagaagccaaggctatgttccataagttgtgcctgaaggggtcacctaggacctgttgacattgtccctggtatttcctgaagtttctatgcttgtgtcaaaagggattcctagagagcccggtattgtcatccagacagcaaacatttgggatgtactatttcagttcctaaggctccggctgtgcaggaaatgaagaggaacaggtgccacccctttctgcagagtcaaagtggagtcaggtagctgctgcagtctaaaaggagctgcagaaggctttactcttaaagaatgggaacaaagttgagatacagggctctaggccattgaccctgctctgagtactgaggataagtctggcatacaactgggctaagctatataaggttctttagtgtgatttcttgcatccaccatgtgctaacccaacaccactttcaatatgtctagaagtctgggtcttgagaatatagtcagggcctgggttaaacaggaagaccatatcaaaagcagaaaaagtgcacgagacagctgtcgtgaatatgtttctcagtagtaaaggccacaagttggcattaccagtgtttcactaaagctccggcctgagatgccagcctctcacccttgagtctaagatcatagaaattttacaccaatcacgtaagtaatttcaagtagctacactacacagcaaaaagtgaaagtaaacataacaatatattctacagaacccaatatatataaagtatcatttaatgtaaacttataattaacatttccgtattaagatttttggatcttgaatgtatcttacaattaagcacactttactgcggtcttggaagcacgcaagcgccggcaagatgaagtcttcgtgtctccgtgcctattcgtttttcagctgaagcccaggcagatccccgccatcgcttcagatgtgctccggtggaagtcgcttccttcacctcactgtgcagtgtttactgatccggggtcaatgccctggcgatgaggcttggaccacactacagcgggagaagctctccatcctcccgctcgcctgtccgcccgcagcagggtcccgatctgcctgtgctccttctggttctcggtacttgctggttggctgcgagcaaataagaccgactcggaccccagacgcacgcggctccggagttcatggccggggatcagaggccgggatccagagacctcagtccgtgccgctcgacccgagcgctctcagcgccgccagaacatacgcagctcgcagactccgctttcctccctgcgctacagccacgcacatatcccagcgtcgccttctcatggcgtcaagcactgcccgaaacgaaggcgggacttccggaatcgccgagtcacaacttccggacggaggcggaagcgcctctcggctcnnnnnnnnnnnnnnnnnnnnnnnnnnnnnnnnnnnnnnnnnnnnnnnnnnnnnnnnnnnnnnnnnnnnnnnnnnnnnnnnnnnnnnnnnnnnnnnnnnnnnnnnnnnnnnnnnnnnnnnnnnnnnnnnnnnnnnnnnnnnnnnnnnnnnnnnnnnnnnnnnnnnnnnnnnnnnnnnnnnnnnnnnnnnnnnnnnnnnnnnnnnnnnnnnnnnnnnnnnnnnnnnnnnnnnnnnnnnnnnnnnnnnnnnnnnnnnnnnnnnnnnnnnnnnnnnnnnnnnnnnnnnnnnnnnnnnnnnnnnnnnnnnnnnnnnnnnnnnnnnnnnnnnnnnnnnnnnnnnnnnnnnnnnnnnnnnnnnnnnnnnnnnnnnnnnnnnnnnnnnnnnnnnnnnnnnnnnnnnnnnnnnnnnnnnnnnnnnnnnnnnnnnnnnnnnnnnnnnnnnnnnnnnnnnnnnnnnnnnnnnnnnnnnnnnnnnnnnnnnnnnnnnnnnnnnnnnnnnnnnnnnnnnnnnnnnnnnnnnnnnnnnnnnnnnnnnnnnnnnnnnnnnnnnnnnnnnnnnnnnnnnnnnnnnnnnnnnnnnnnnnnnnnnnnnnnnnnnnnnnnnnnnnnnnnnnnnnnnnnnnnnnnnnnnnnnnnnnnnnnnnnnnnnnnnnnnnnnnnnnnnnnnnnnnnnnnnnnnnnnnnnnnnnnnnnnnnnnnnnnnnnnnnnnnnnnnnnnnnnnnnnnnnnnnnnnnnnnnnnnnnnnnnnnnnnnnnnnnnnnnnnnnnnnnnnnnnnnnnnnnnnnnnnnnnnnnnnnnnnnnnnnnnnnnnnnnnnnnnnnnnnnnnnnnnnnnnnnnnnnnnnnnnnnnnnnnnnnnnnnnnnnnnnnnnnnnnnnnnnnnnnnnnnnnnnnnnnnnnnnnnnnnnnnnnnnnnnnnnnnnnnnnnnnnnnnnnntttgccatgaacaaaatcaactagaatttgtgctctgtccttggaaagctgattattggaaggtggtaaccactattaaatctttgcacggcaggagggtgggtaggttagagccagatgtagctggagggtcccatggtgatacagtggctgggcatttcgcactgagcaagtgccttctgagtacagatctgtaggcagtgagggaaagccctataggtagctggaggaagggggttcttggcagagggatggcaagtgctagaggctctgctcctcaaacaggactggcgtgtgaggataggaggaaggagcgaggttgctatagctgaggtagtggacagggttatacggtcagagtaagatagggactgttactctgtcatcctgagtgggtcagagccttcagaggacttgagtagctgtgtgacagggacagccctccgtgtaacagggttgctttgtttgctttaatgaagagagacaggcagggaggagaagggcagaagcagggagacgatgagggaggctctgggcacatgttggggtagaggacaggagttgcggttctggaagtggggaaggcagtaagcaggtaataaagatcagaagcctgggtccctgtctctttctggagccactgactctgttgactcctgcggagcggctgctttctgccatcatcacagttggaattcctgccacacttaacttgaaatgccaagacaaactcccacacattggggttgtgaacacaggcagcctttcagtgtgtggctgatgcttaatattttagcacggctctgctggactctgggtcctgctgacaggagggggtgcctgctgccagagtggggtcggggcgggacagtatttggaagtgcaattttggcaagaaaggccaagctcaattatggcgaggtcctgcattcttggggtaaggctggagcagaggggcagccttagtgctaggccctggagagctttcagcccctactgttggagccaggaggagtgtgggcaagtgagactgctcaataggtccgattcagtctcagctaaagggggaggagtgctggggatgctggagcattcactgtgtacaagcacctctgatgtgccagagactgaatgctggataagcagatgtagcccatggaggccagcaggggttagggtgagtgcacatgtgaatatgcatgctgcttgaagttctgtgaaggtcataatttggcatgttggcataataccaggctcccacaaggggaaatgatcacttcctttccaaggacattctgtttaagctgggacctagaagtgagaaggagcaggctgtcctcagaggtgcagggtgggccacaggggacagaggagggatgagcacagccacagcacaccgggctgcaaaggctttggaggcctttgaagactgtggaggagatctgggtctgaattccgagtcttgagagtattggaggcctgtaagcaggacacggtgctcactcagccttgcagagtgggcaagaggaagcaggcagggtgagggcggacagaggctgctggagaggagtccacagactcaaggatctgccaagtgaagcttgtccgttcactgacagcctggatgtcaggggtgggcatgattaccagcctgtggcctggtaagcagaatcatggtcccagaggtctgtgttcccatccctagaacctgtgagtaagccatgccacatggcagagggaagtcactggtcagtgtgatgaaccagttggccttgactggggttagtcctggcctgtggcaggtccaagtgtcactgtgtgaacttgtaaaatgcttggagagaatccgtgattggaacttggtccacagctgttggccttgcccagggaggatggggtcagacgccaaggaatgcgctatcatgagaagcttggagcagcgttctactgagagtgggaatgctcttcccctaactgcatgactgattctgctctgattctgcccattgctagaatgagcagaaatgatttcccccttgagcttccagcatagaatggcctatactcagattagtctgctgatacccaggaccaccttttaacctctgttctttgtatggagagtgctgagtctatctagtggggaggaactgagtgtggccccagaacctccctcagcagagttctgcacctgcccgtgggctggctattgaggttagaagctttcaaagttgtcggaaagtcgctgcaaagtgcctttattctgggtgctgggagtgagcagggactcttctatcctgtgtcctactcgtctggccctggccaggtctgcctctcttgtccttgttgcctcaagttcttagaggtctgtcttctgacttgtggctttgaaatgtttacctgtgtggtacccacatttccatttctcagcatcttagaagccctggaatttgcctccctatagagagagtcagcagagggggattctctcactgtggaggatcccccatgtgtgactgagggtgtggaggcaccagcaggtggttctgttgtgtacgcagttctttttcctacccctcagtgagaacttcacgttgccatgtcagatgtctcatttcatcagccacatttgaaaataaatgtgagtcatattttccttgcatatttaatatagcaaatcgatactggaattaattttaaatgaagacaaaacgaagaaaaaaaaatcccgtgtgcttgggtgtatctcataggtagaacatttgcctggcttggcatgtgtgaggccctggcacctctcaatgccaaacccagtaaccaaagcctcactgttttgatttggggttatttcttttctttttttttttttttttttttttttttttttttttttttttgatgtaaaagcatgaggtagtttaatgacggagctccgggctgacacatatctcctgcaggagacagaggtgtcgaccacatggtggagccataatggtggagctctgggtcaaaatgtatcgggagatggtggttccgaccctgaggcttggaagctaggggtttttatagaaaaggggtggggctgggggaggaattggcacggtttcacatgattggtccatttaaacatcagactgtcagaagggcgggagatagggaggaaccaggccagtcaggacatgtaatgacgggcctgccccggcatgtcctggcctgttctgctatgttctcagccccaggtttcaaagctcacaaacaactctttgggctatttgacatacattacatgaatcacaggtctcaagttttatttcctttcattcccctcttcttctactaagtaattctaatcttagaatttcagaagtatatggagaatagaaatcatactctttttctataagaacaaaaacagaataagaagggatagtaaacagaactaggcagggacccttctagtgaggcttgagggtctgggcatgatgtaggtgtacgtggatcagatctcttgctggaactggtgagatgtcttttgtggtacccggctcgttcgctgtagccaattgtggccagccttctttctgcaccacctgcaagccttttaacttagcttacagattattattacaacaacatgtaggtttagacacatcatttaagacagtgatgggcatggggaaggagcaccaagtctgcaccagtctcttttagaattctattcatcttttctacctgtcctgagctttggagcttgtatgcataatgtaacttctaatcaatctctaatatcttggccagtccctgatttacctgggcaacaaaggcaggtccattacctcgggaagatttcttttaggatcttcttggctatcacattggccgtctcagtcctggtaggaaaagcttctacccaccttgaaaaggtgtcttcaacctcgaggctactgccatcggtgtaccagctcgaactctcaggccaaggctgatctgatccttcagatcatttcgagtaccagtttcttctgccagaacgtccgtgcagtgatgagtagggcagtagggtattgagattgaggacagcaggtggagcgaaggtcactcgtttagtcaacaaaaaagctctgataatgtgtcacaggagcgttggtcgtcatccatcagtcagggggctttcagataatgctttcaagagtgtagggtgccactacagttatttgctgtcccaaagtgagcttatcagcatccttgataagcagagctattgcagcaatagcttacaggcaagaaaaccacccgctggcaacagggtctaacttcttggataggtaagccactggcctttttcaaagtcccaaagtctgagtaaggacccctgatctctcttccacataaagagtgaaaggcttggttaggttaggcaaaggctggccatcagtagggccggaaaaccaaggcacgaggtgggactcgaacccacgatcttgtaaccggaaaactaaggcacgaggtgggactcgaatccacactcttgtaactggaaaaccaaggcacgaggtgggactcgaacccacgatctcgtaaccggaaaaccaaggcacgaggtgggactcgaacccatgatctcgtaaccggaaaactaaggcacgaggtgggacttgaacccacactcttgtaaccggaaaaccaaggcacgaggtgggactcgaacccacgatctcataaccggaaaactaaggcacgaggtgggactcgaacccacgatctcgtaaccggaaaaccaaggcacgaggtgggactcgaacccgtgatctcagaaccctaaaaccaaggcacgaggtgggactcgaacccacgatctcataaccctgaaaccaagacacaaattcacaaaccaagacacaaattgcagtggtgccacacttagacaacagacaacatgtaagacgcacacaaacaaacgtnnnnnnnnnnnnnnnnnnnnnnnnacatgtaagacgcacacaaacaaacgtacctccaaggggtcttttggggttcctgggtgtcacgcagatctcgctggggcctccaaatgaaagaacctagtggggaaaccccccccacaattcccgttcggcgtgcacccaagaatcacgaacagacgactatcttgatgtaaaagcatgaggtagtttaatgacagagctccgggccgacacatatctcccgcaggagacagaggtgtcgaccacatggtggagccataatggcggagctccgggtcgaaatgtatctcacacaggagacagtggttcccttggggttatttcttatgtagttaatataccatgagggcagcaaatgcactcagctccctgctgtgtccagagaaaaagaggagtgtggagaagggaagacagtgagacttgctctgctctcttccctagctctccatgctccatcaggatgagggccatggtaacttgccatggtcctgggcaggagaatgacctttctcttcctgcagcttagccctctccctaaccctcccccctagagatctgtgacttcccagtacctgccatgtggagccttgcagactgttctgtgacaggagtccagcaccaggaaccaagctttctgccagcaaggtggctggctgtaaggacttcacccagaagttggatgtggggagtatcacttggcctctggagcagccatgggtgaccatgttctccttctagtatggagtctagggatagattcctaaaactcatttctagagcagggtgtccatgctgtgcctgtgtcatggaggtgggagtcccagagctgattggtgacagggctgtgggattgttttctgagtggtccaggccttatagtggttggtggggcatgggactgtggtttgcctttcactgatgaagcttgcttagagccctgtggcttgtcagcagaatcaagatttgaactggaggaggactgtcatagcacacaacttctcatctctgtctcgtcctctagctgtgcatctctaaaaagctgactcaccccagcccactggaactgggccctccaggggtagcttagactcccaccagcttctcagagccttcagggtgtgttgggcttctcgccacccgaagagcgctgagctccagagctgccaggctgcatttaggcatgtctctgggtttgccgggttaggcaagctgcttctaggctcatgctggtgtgcagataagaggcagaggtgtcacagggtctgagggagtgtgaccactgttcttcccattcctgtggcttgtcctagagactgctattgtgaggatgccagactttctgttctccttttttgaaatgctgtttcctcttttcttggcatagtaaggaggttccaccttcgctgttccctcccagttcagggcacagctgtggagtctcccatgcagcgagctcagggctgaggctgctgctgggactggagagacagtgcaggtggatcctggcctggcattgagtccctacatgtgctgtttactctccctgcatgggctgcagtgaggaagctcagtcttggcgcaaggctgctgctcctctgtgagctggctggaccgttgtaggcatgtatattcagcctagagctcttcttacctcatgtgaagcattggtctgtcccacatatcctcctgggtgtactctctcattctaggatcaccctctgagaatgcacgccaggcctgatgtgtgcccagggcttgtccagcatgctgatctgctgtcttcctttactttagtggttccaaccttcctggtgttgcgaccctttaatacagttcttcatcttgtggtgacccccaaccataacattatttcattgctgcttcataactgcaaatttgctactgttacgaatcaaaatgtaaatatctgctatgtgacccttgtgggggtcgtgacccacaggttgagaactgcttctctccatgcacactgagcctgcctgaactagccactgtgcactagccagatctgaatgtcagaggtccagagctgctgtctgcttgttcccttatacatgtttctgtgctggcctgaaaagagcatcttctctgaacattcttactccaaggccagatgggccatgctaatccctgtcatctgaatagagatgagctcttactgggtgacgagggatgctgcctgtggacatatgtgcaagtagagaggcagggcaaagaccaggtactgaagaggggcaagtccatcagtgtcactgtggaccttagtggcagggacagcctagggagctgccttgttagaacctgcgatcttgtgactgaattgtggccattcctcctttactgttctttgtgctgtgtcctaatgaattgtctaccttgtgaagcaaccctgccgcccttgtttctctcttccctttgggtgttagcattggctgctgctggtgtgtggtatttgatgagacttaatcgagctgtgtcgtgcagaacagacagtttttatggtgcccctcaagcaaaggccaagctggagaatttgatgtactctcctgactggtaagggctgttctggccaaagtcctaatgtggcacatacctcagagcttttctttctctcttgggcatttccgcagtgtcttcagcccgtcctgccccacaccagccttcaagaggtgcccctgattcttgggctgcattattatcactttcttcccttctcagctccccttcttgagctgtcattttggggaggggtagcttcaagacagggttcttctgtgtacacctggctttcctggaactttctgagtagaccaagttggccttgaactcaagagatccatttgcttctgcctcctaaattctgggattaaaggtgtgagctgctgatgcctgcctgcctgccttccttccttcctaatttccttcctaatttatttcctttctttctttctttctttctttctttctttctttctttctttctttctttctttctttcttccttccttccttccttccttccttccttccttccttccttccttccttccttcctagctgtcattttaatgggtgcttccttgtcctgaaaaagataaatttttctagcccccttggggctgtgaggtatctgctccagggcgctgttcctctgtcatctctttgctgcccttccatggctcaccatgtcatgtgctgccctctgtggagattgccctgcttgcatgtgagtgagagcctgtgttgagtaacagggctgccacctgtggcctccatgatgtgcttgcttgcttgttctccatggctgagcccttcctacctgtgttgttctgggatctgtgtagggtagacactggagcataactaacagcccctctcagtacactccggttaccaaggaatccttgtaaagttttctttctctgctttgaggggatataaagtccctgttcttttcatgtgaagccccctgatttgtttacttgtttgtttatgtttggcctgtggcctccttccttctatatagtgatataatttacatattatacaatttacccagttaaaatgttcacaatttaaatatctctctctctctctctctctctctctctctctctctctctctctctctctctgtgtgtgtgtgtgtgtgtgtgtataggtaaaaccacaacctatctgtctatgaagaacagaagacaatgtttgggagtctgatctcctttcatcttgtggactctgagattcaaactcaagtctacttgtgtcttattcaaggagccatcttgccagccagacattcaggattttaaaatgcatatttagaattatgtaattatgatcacaattgacttcagatactttcattccaagaaagagaaaccatatcttcttacgcctttactttctaccctttcccaggaaacctgtaatctaccctgtctctgtgggtgaatctttagacatttcctactgtattcatacagcagcatatcttggtaactttttgtttgtttgagatggggcctcattgtgtatcccaggctgattttgacctactaccctcttgcctcagcctcttgagttctgtttgacctcctttttgcttagcacatatatatttctagacagatttcctgtatagtcctggctgtcctagaactcactctgcagagcagactggcctcgaactcagagatctgcctgtctctgaatgttgggattaaaggtgtgtgccaccactgtccagcttgcttggcatatttttaaggcttgtctatgttacagcttgagacacttggggtgttccttggtttacagtaggattccatcctggtgccctgttgtaaggggaaagtgcacagagctctgcggcacaccagctctcctaacctagggctatactgactgtgaagcaccacgatctctgctcttgctgtaggctggcaggaactggggctcactgctgccacccagtattgagaaaaggtattgcatcacatattacaagcctgagaaagattacaggtcaaatgtgtgttttctgcttagtatttattactctcacacccttgtgaaatttggaaattgtctgagccattgtaagttggggaccatttgtaatttcctcactccctgcttgagacagggtctggctatgtaggatgaccttgaactcagttcccctacctttgccccctgactgctgggattacaggtaggcagcacatagctggtttcattcatgcatcatttttatgatttaatattccattgtgaacacttcaccttcattccctgttcacttgacagactttataggccctttccttgttgtctgcttgctgtgctgggctgtggggctttctgttcatcagatctgtatgacctgcctctctaaaaactgctgcaccttgacccttctggctcagtgaagcagtgccttacaagagtcggtctcttgtgaccctagagcagtggttctcaacctctgggttgcaccccttttgggggtcaaatgactctttcatagggattgtctaagactatcggaaaatacatatttacattatgattcataacagtagcaaagttacagttatgaagtagtaattttaaactggggggttgccacaacctgaggaactgtattaaagtgttgcagcattgggaaggctgagaaccactgtcctaaagccttgtcccttagaagactagttagagatagagaccacctgcggtgactgcggcccctagagctctagcatgtcctccagcaggaagaagcgtcacacacagtggaggttgctgagtctttgcgcccaggttcctttccctgcttctacacagtcactgtcctgcgctacgccttcattgtcacgcatcctgtactgagcttcttcaaaagttccagtctccagcttcctgccctgcttaatttcctgccccgacttctctcagtgatggacagtacctggaagtgtaagatgaaacaaccccctcccgccccccatcctaggttgcttttttggtcatggtgtttatcacagcaatagaaaggtaactaagatacacgtgataggaattatttttgcattcaggtacacatgcaaaaaggacaaggttttgcaccaacatttactagtgacatgtgttgtacattaaatatacatgggtatttttaacttgctttcagtgttctgttggtgagttaatctcatctctgtccaccacggttagcgcctgctctgtctggcttggttggtacctcgtctgtgtttacactcacaggccctgcttcctttgtactcagtcctcaggtggtagcgagcatctaggagagagagcttggagccttctgcgcgctggctacgggtcttatcacattcagcatcttggtcatgcatgtcctggaggtgtggctcagcacacaggaggccgcagctctgatgcccagccctgctaagactttttagctgcctgtgtagtgtcacagactttgctgagtctctttccttatgtgcttacacaagaggttttgtgtctctgtggcaggacgtggcgttatgtcacgtgtccttgctttcacaaagtatccctagggtgctgtataactgtagagtcttaaaagatatataatttattcaataatttcaagagcatatttatgtacttttttgggggagtgggtcagagagcctgcacacatacctctgcagcgcgcccccagctatgagtattcttccagaaaggtttccttatctgaggtaagtatgcgtgccacttgccaggccttttcagtggctccactgaagtctgtttttcttctttagcaatgctagaccaaataaatgcaattttaataagataaaaacgaggctcctttaagtctgagcttgaactttgttggaacattttctactcaataaacacaagtggtttgcctatgaagaattaatgagtttcctgttctgctgggagggaaaggcctgaaatctttgataatgctgcagagacttttatgaaaatgacatgcaaatagtgccctgcaggccaagctgcctactgttttgaatataaatatattgggaatagaagaagcctgtgagtattagaggcaagagagattggcagttgtgacaggtgctctctgtgggtcactttctgtatacaaagtgctaccactgtggctgtcttggccacggtgtgtacttgacttctgtttggatgccaggcttcacccaggtaaaccctctccgccacacatccacaactgtaccctgtaaaaattctcatttcctctcccaggccgaggaacttaaggaccagagagttgactcgttttgagttttaccaaccagtaagtgttggccctggaattggaacctggaccctttgactcttcatcttgagaacactgcaccagggtcaggcacccctgagatttggagaaaggctactctaggttgtgtatgatctgagtaactatatacctgttctctcccttgacaaacagcacatttctgattctcctgggttctgtaaaatgcaggtaatgcacagggctgtgggggcttggttcttgcctcaggatgttctggaagtcactggaaggactggaaggttagggctgaagtaaggctcttcacttttttgtcttactgtggtcagtgactgctacaggaggttagttatgatgggtcagttgagatgggtactcacgggcacttcttgggactaatactcaaagagtattgcctggggtacaagagagaaaatccagccagtcaggtggaagctctagtcagggttcagcaagcatgttagttcttctattttatatcctgtgtaactgcacccatccctcatgccccatataactgcacccacccacttcaaatctatgtagctgtgcttacccacgtaaagtgtgagccttcctccattgctcttcaccttttcactgaggcaaggtgtgtcagtcaaccagaactgtttggtgtggtgccattggtcctgctaaccaagctgtcccaggcttcctctgtctccccctccctgggttggaattacagatgaactaccatgctcacttatacatctggggttacatgtgagtcctggggtttcagattcctgtcctcttaactactgaacatctcccaggccccatctgtctagaattttctgcctgcctctcttttcttaggttcaggtatacctcttttccaagggaaaaccagcactgggtttaatgtgagtgcgtgctgtgttcccataggaatgaccacagggcattctaacactaggctactgttctctttgataggcacactattctgatggctgtacaggaaagggtaacacgcccacagttctagatgtggacatcttttggtgggactgctatttgctggccatacagcacaaatgacacagaaggaattctcactttgcaaatcagtaagcaggtgaatccttgttagcagatggacacaggatatgagtagtttacaaaagaagaggtaccagtggaaaaaatatctcaggcacagagccagcgtggagattgcttctgtccagttagtggggtctggccatcggccagctcttgttgcgggagagggagctacttgactgtcctttggcagcatggccaaatctccttaagtgtgtgccttatgcccagggcattcccattgcaggactttgtccttaggaggttatcaagtgctgtgtagccatttctctccagaggtgttattgctatccttgtaaccacaaacacttttaaatcagttctgtgtttcacagtcaaccttgggtaaactcattatgttgtagccatatggcagcacagtgtgaaattagaagtgatgctgtccagggaggtggcacgggccagagatgagggaaccagagctcattctattcctgtggggtttacaacgtttaatgttgaaataattaagatttacaaggagttgcaggcaagtccgagcactctccgcctcagagtggccttttacatttacatatgctacttgtaggctcctcacacatcaggtaacacaactgaaggtaaacaaatgacttaagtaaactgaagaagaaggaagtaataatttggggaaatacttcacatcacagagtcagcaaggtagaacttaattttaaaaaagatttatttttattattaaaagtattttatttatgtatttgcttgtgtgtgtgtatatatgtgccgcagcatgtaggtagaggtcagcggtcagcttgtaggagttgttttctcctttcactatatgggtcctggggattgaacaaacttagtttgtcagggttaggggcaaacagttttatccactgagttgctgtagtgatcctaacttttctttcttttttttacttttaattatgtttatatgtgtggtggtggagggatgtgcatgtatgaatgcaggtgcccatggaagccagaagagggatttgaagatggagttataggtagccttaagatgcttgatgtgggtgcttggaattgaacttgtgtcctctgcaagaactgtatgttccccctctctctctgtccatctctccattcccaggatttaaagaaaacttccttctaagcttttccttgctgtggatgggaatcaacactggacaatgtggggagggannnnnnnnnnnnnnnnnnnntggggagggagggagagggagagggaggggagggggagcagctagctctaaatgggaagtctttatcagaccccttccttcaaggcttagggaatctgtgcagagagattcccagagccagaggtgatggatgaccccaaggaaacccagcaggatgagccacacattagttcacaggggctgacagcaggcacaagacctgtacacgttcaaaccagatcagattccagcactgagaaggggacgtggacacacaaagtcccacccttcttcaagagactatttgaaagggacaatctgttttctccagtggagtctgactgggtttatcaaccacactgcagagtacctggcccacacaaagtgtattctgggttggtttgtgcactttttgttttttatctttctgttttgtcttgatctttctttctttctttctttctttctttctttctttctttctttctttctttctttctttctttctttctttctttccttccttccttccttccttccttccttccttccttccttccttctttcttcttgcgagggaggtggggaggatctgagaggatctggggagagggatctattaaaataaaaacatcttttaactcacttaaaaatactacacatatttgtgtgtgtgtgcgcgcatatgcacatgtcacccacagcacttggatggagatcaggaaacaactttgagaatcagttttctcctttccccattagatgattgaacccagggattggactcaggttgtcaggcttggcaactagcgccttttaccagctgagccctccatggtcccaggacttcataaaaaaaaaaaaaagcctgcatgtgcttacctacattgctctttatgtctctctgcacgcttctcccttcatcagggtcttgtgtcggaaccccagagtgggatgtcagttagggtgtctgacgccagtggctctgatgagtagggattcctttgtctcttgtgcctggaagggaaaggaggtgatctgcctggaccccagctcaaggaagccatcacagggccactctatctcctgctgtaccagccttcagaggtggcttcattcttgagacttctcatgccgaggtgacagatatcctggcctcacctcaaagggacatgcctgactcagaggagctgaggttcaagggtactggctgagcctgtctggttttggtgggagagtcgcaccctcatatgtttttaaattgattacatctttacaaaattctttatgtttggataaccagaggcgcatctggtggatattcccagtgaggttaccttgtgaggttgtgtcgtgcttgtgaaacacatttgtgagcagtggctcaggaacccggtgttcccagtggtctgaggactcctggggctccctgatggtccagagcatcgtggggtgtgtgggcctgtgggcgccgtagccccggtggctgacatgcagctgctgatgggtgtggctcttcctggcgtggggctgaggagctggcagttttcttgattcaccattgggctttcagcagagctaaaaaacccgaaaaaccaaaaaaccaaaaaccctaacgttttgtttcctgttctcctagcatccagcatgtgtatggagcccagcacccaccgtttgatccgctgttacatggcacgtaagtggcagttggtgacctgcttctgccagctcattggaggttcagagggaggggaaatgttctctcagtcagcagatggcctagccacttgctttgtgagacactactgtccgagagtagttccccctgtagctgggcagtgggatgtggggctgcagagagctggcactcctggcttgagggcagcgtggctccagactgtccttacaccgcacctgaacccttcctcggtcctgcactctctctgtcctggtggtggctcttctgagtattgggcctagcccagtgctggtgtggccctgcagggctgcacctgtctgtcatatttctagacttctactggggcctatgccatgtgttgttgtcaagcttggagggacgtcctttgaactattctgtctccgagtgtgtatgccaaggccccgttttctgcaaggtcctcttgctctgtacccgtccgctgctgctttaggagcttggctgagatggagggagcgtgagaatgtactttctagccttggcaccattgctgtgtagttctgtgctgcttggtggctcttgtctggaacgcctccctccctatcacgtagcctgtgcagtgccaagtcctattttgatgcccacactttgtgcttttcttggcaccctcatctagatgaagtaccttctcccttgggattctttttttggctgagtgtgcacagtaaagacacctttgctttgtagcttgctcaagtccacgcccaaggtgcccaccactccggtgaaggccaagcgggtcagcaccttccaggagtttgagagcaacaccagtgatgcttgggatgccggtgaagacgatgatgagctcctggccatggcgacagagagcctgaactctgaggtggtcatggagacagcacatcgtgtcctgcgcaatcacagccagaggcagagccagccttcacagaagacgacagaaccagagccagagcctcagcccatagcagagcctcctgtacctcccagtggtgaccttcgcctggtgaagtctgtcagtgagagccacactccttgtccttcaggtagggatgaagggacaatagagccaaggaaggattggattggaataaagagggctgtgtgcctgtttgcaccaggactctgggccttgagagcctgtacggccatctttcatgcggatgtggccctcccaggcccgtgggctccagatggtcttttctttatttggggaccaggcttgtggctggtgtgggggcccaagaagagggccactggggagcacaggcgatgggagatcctaggcttcttcagaaaggagccaggagtgcccacgcatgcctcccctgagaggagccaggagtgcccacgcatgcctcccctgggtaagggtgctctcatttacagatgaaaaacagatccatagtagtctaaggccaccctgctagattcagaaaggggcttttacatagcctcattttcagaaccgccttctgagagttgatgggctaaagccttaccatgtcttcaggtgagaagctggttttatttgatttgtagcaaatttggaagtccgagtttacaggggaaggtggctttctctgaatctgatgggggattgctcccttctacctcctgtctgcttagtctaggcaggctgccctctagtggcggcatccaaggattgacaggaaccttggattctgcccacccctgtgctcatgcagtggtggacacaacttctcacgtgcccacagctggctggaccgagggcattgctattgctggtgttggccctcagcacaccatatggaggagctgagagtggtggatcacaggatatctgacttggaggtccagatcagaaacagactcatctccaggagatgatggagcttggtggtgtcacactgtggcagcctctccagtacaagtaaacacttctcaggacgtcttgttcctggggaaggggctttgagctctttgctgtgtcctgcaaaccttgggctgagcgtcctgtatttgttatctgggagagattttttttttcttgagcatttaataataatagcatgttgttgctcattgtatggctaataccacagccagccccttggatggtaaattcttcaaactcctcaggcttctaggagggagttgtgttgttcttcctttacaaatgtagtaccaagaagacccctagctgctcaggagaggtggcttggggtggggctggggttgtctgtggctctagagttcctcctgttagtgcgggctcctgcagagaccaggagttctcatccagagatcttgctctcatgttggatagtgtgtgtcactgagcatggtgtgtgctcaaatttctgcagtgccctgacagagactgaatattgccacaccctcatcagtcaggccagggagtcctgcactgtagttagtgagacctctaccaggattagttagattggctctgggagctgcaggagtgtgtctatccagggcttagcccctgttgccatagagtgctaccctctgatcataacagctcacctcttcaccagaacggctgcgactgcttgcaagagaccctcaagatgggacctgctggctgtgaatgtttcctcatagtaggaagaaatgtgagggacactggatccttacctcagattcttatcactccctcctgtgcctcccagacagctgtgtgcgactctgtcctagtcagtgttctgttgctgtgaagagacgccagtgaccacagcaatgcgtataagagaaagcatttagctgaggcttgcttatatttagaggtctaatccatcaccgccatggtgggaagcacagtggcctgcaggcaggtggggtgctggggaagtagctgagaagtctttttttttttttttttttttttttttttcgagacagggtttctctgtgtagccctggctgtcctggagctcactttgtagaccaggctggcctcgagctcagaaatccacctgcctctgtctccagagtgctgggattaaaggcgtgcgccaccacgcctggcccctagctgagaattctatatccagatccgtaggcaacaggaagagagagaaacacacacagacctgccttgagcatttgaaaccccaaagcccatccccagtgacacacttcctccacggccacacctactccagcgaggccacacctcctaatccctgtcaagtagctctaccccataatgaccaatcattcaaatatctgagctgtaggaccattcctattgtagccatctcagccctggatgctagaatgtagacataatggaggatctctggcgcttgctggctagtcagtcaagctaactcagtgagcttcatgcccagtgaaagaacctgcctccaaaaatagagtcgagagggactgaggaagacacctgctgttgaacttgattgcacatgcagatgtacatatgtgcatcacacacacatgcatagattccccacggtgttctgctcctgagctccagggctgatgtgtgggagggtgtattttgggtgcttgtctatagggcctaaggcagacaccagcatgttgaatttggatctttcctgaagctccctcttgactgcaaactggtctgtgccttctgagagttgaggctgctgggtagagtcagggaccacagagccttatgcccttggttcctgtggctctttgttgggtgacctggctcctctctgggctgttcctagccagatcccagaatggattgtgccatctcccctccctcctcaggactccttgaacctgcagggtttggggggggggggagcagctaaggaaaccccgagagaggggctcctgacttgtccatgaaggctccttgcctgcctggctttctttgtccctgtgtgctaggacttgggatgggtggatgggtgggtgggtgagtggtggtggggcactgaaatgagatgtgctctggtccttctgagcctcctggtcacttacctgctgtcctcagtgcctttgtggcatcatcctttccttttctgatggacagtggcttgcctgccgagtacacctgggtggcccattaagcctactgtccaggcctgtggatatctgaaggctgcagaggagtgctttggattttgttggctatcaggatgtatctgtttgtctggtgaacagtacttcattagtgagctagtgtttggtgctgggtgatgggagggagggagagctgaccagatgatggtcacaaaggcccatggtaacatggtgagcacctgggcacatgggtaaaagagaagatgtgctcagggggccaagggcttctgctaaccttgccctttgctcttctgccctttctagagagcaccggtgatacagtccctctgcaacggtcccagtctcttccccactcggccacagtgacactgagtgggacatctgacccacatgcccttgctgactcagccctgagtaagagagagacctctcggctggacaagttcaaacagctgcttgctggccccaacacagaccttggtgagtccctgagagtgggttgtggtttcttacaagaccaaaggtgtcataactggttacacacctgctgtgttgcgttttcatgacatcgagtccctaaaatgctggtagttggactgcttaattcctttagacatgtgtgctaacatattcccaacacagtatacaatttcctggtatatatgcttaatcctttttacttaatgctacagtatgtggtcctcagggggagcccctagaggcctggcaggtggctgtccttgttcttcataggctgtgggttgactgtgacatctggggaatgaggagggatgactaccatcctcaactattgacttttgtactttgcagacatgggactaagggtggcataagtgtgacagtggggagaggatgattgcggggtgaattgttgtcagttgcacggtcacctgcaatgcctgtgtggacactggccagtctctaagacagttgttgctttcaggatcctgtggtgggattgccgtcggatgactggttctctcgttttcatagccggtgcttgctgaaggagctcaaggagaggtgtttattagggacttgacttttctgagggccacgagaggtcccggccatgggatccctcacagcagagaaatagtgtttgaacgggagagagaggcagtgcagagcagcacactgcaggccgaggactgtgaggtgcaatgcccctcatggtcaggaggtggcgcgtggggcctgtggatgggccgcaggaagctgacctgtgcctctggggagctttagggaaggatggccaagttttctgttcaaggttggagcagggcgccttaggtcttaaagtctgtgcaatggaatttttcttttagtgtaatactttttttttcttctttttgagtcagggtctccctatatagccctggctgtgctggaactcgatatgtaaattaggctgaccttgaactcacaaagtttgcctcttctgagtgctgtgattaaaggcatgtgccaccacgcctggcttttaactatgtttttaaaaactcagtagcacatgcctgtcttaggatgttatgaagcacaagaggatgaagagtgaggataggcttctgcgctcctgtcagaggtggcctgtgccacgttacatcctttatgtaactttatactcaggagaagtctccaggattgaacaagcagcttccacacatctacccagtcaccattctcgtctgtgcttgtgtgtgtctccagaaccatttgagggtacgtcggggacatccttccacttcctcccgagagctttgctgtacacttcctaagagcacaggaaccagctcattcagtgtaaagaaatgtagccttgacacagtgccgcttgccttgtgaggatgcacggtgttcgttcacattttctagctgtaccccagagtgttcattatatctcctgtttccttgtccaccatccagagctccatggaccctccccacagtcctctctgctctcatatctctgtgagcctggagcgcactttgatcctgacacattgaaggcgtgtaggcagtcatttgtcagggtccctctgattatgtgagtctgaggctcccttgtgattaggttcaggggagtgagtctcgctcggcaggagcatcatggtggtgtgtgtgtgttctcaccctttcctgagcggcagtctgtagagccgcaccttggagtctgtgtgttcatgtagtaccttttcttcatccacccaggtggacacgctggtccacacctcaccttttgaatttatatgtatttacacagaagtgtatagagagccacatggcactctgtgggtgacccacagtttatttcacaagccctatactgatagggatggaggcttgcgctgattgtcggttactccagcccaggaccttgtgcagataaggcaggcgctcctgaaggcatctgttacgttgatgatggtgtccgtggaacagttctcacctagggtggggaggagactacagacagggtggctctgttaggcttggcatagagctagatgggtggaagttagttagttcccttcaccaaggtaggaaattagggttttcatacaaaaggagcagaatctcccagttgaagttgaaatcctatctctacctttctagcacaccatgcacccatgttttgctgaaccggggctgtcagttggctgctcaggatcttcagtggatctcactgaatgtgtagggagaaggcggatccccccatgcttgttacaagaggcctctggagttggccatctgggtggagaccttgagcaggtttggtaacttgtgatcctggttgtcctgtgtccttgctcgcctgtaaggtgtacctgtctggagctgggctgagacactgcacagacctctggagtgctggctgtagcaaacgcccagggataccgattatcacagtacggccctttggtgatctgtggatgcatcagagttgtttccagacattttcttggctatgtccattggtttatgccttaggcatgtggctaggtggccaggagatagttgataaggacaggtttacctgatggcagtccagatctggttcagctctgggcagtggctagaatcttcttatgggtcttgccactaggcagcattagaagtcaaactgtactgcagtaaagcctccagggcttgtgggtcagtgtgaccatgtgtgggtgaaaggtcggatgtaaggtcaggcctttgtcaggtcgctctgactgtggttttagttttttctttaagaattctgtttgaatgtttaaagccaaaaagttaaaaccatttgctttcaaagataaacaattactggatttgtatttagtggcaagagaaacatagcctgtaaattgcctgttttcctaaggcctttaaggtagctctgaggacagtggaatacattatcctcccattacataaaacccaaagtggtaaatatttgccgaagctggagaagcaaatcgctgatgtgagaaggaccagcagaaatggctctacctgccgaaggcctgtgccagcatccgctgctctttgtgtagcttatgctctgttatgagcccagggatgaaagtggcaaatagaacttaacagctcactcccctcttagcatcaactcaatatttactcacacaaagcctgcctgctttgaagcctgggaaaatgacacttggaggcattcatgttcatcacatgtgtctgctgatcaggaggaccattcggaatatgcaaaatgtgatgtttcctgagggctgccgagtgactgccacgcagcagtggggcccctgtggggctctgcaaagctcagcactagagagccgtcagccagcagaacagacaatgtcctttctgctctggggactgagccaggcacagagttatagtctcgggtacccaggtcatccactctgggtttgaagatggaaaatgtgcctggacagagggcgaggaaggcatgaatgaagtatggagccatattctctgggaacatggccatgagcagatggccaggaggctctgaatgctatggagtaaagctgggaggaagcttctgctgcttgggacccctctttctcctctatctgacagcgtaagttacctcccaccctcacaagaaaaaattacctcctgtaaggaaggccggagttccctctctcctctgtgaattggtcacaaagagagttaaagacacagccaatacccatgctggggtggtctctattgtcacagacctgcaaagtggctctccaagtcgaaggcgttcagggccatctgctcactgttaacaaatagggccttgcacaaggtagttgtctcattgttaactacagctgggtgtatcttcagtgcagtaggatattgttcaaggctcttttagggaacttgtttctggggatgatgagctttggtgtgtaatcttcagagaaaatattaacagtgttcataggctactggatagttttaaataggcaggcagccttaaagttgctctgtgacacgtttgcccttttttcctcagtgtttcttttgaagattaggatgctaaataattgtgcaattaagagactacaggatcagtggcattagtgtgaaaatctcctctacttgaggacagaatggaggagtactgaagaactgcaggggttcctggttccctattctctgcagtgttgcgtatgtgcctatcatttgtctgcctctaacagttttagagcttgtgtctgtctgtccactctccagactgagcctcctgcaggctgtggatgtgaggcacctgtccttatattgtgggacctttacaggcacgcacatagaacagtctcaggaagttgcagtgaggtcactgcatgtcagttttccgcctgcccagtgtttttaacggttaccagtgtttgtgtttcagcagttgacataggtcgctctgcgttaggggtgccaaaggagaggcttttctgaaggtaccaaaaccaggcctggaggctttacgtatatgggctgggtttttctctggaaggtgtctggagttactgaatctagatcagtcatgccaaggatcttgcctccaagtcacttgtcctctcattcttggccacaaggtggcgatcattatcttgtgtctgtatccttcaatcaaaacggcagacttgaattgtttaatgtatttcattgacatagatttgtggtgcagtgatggtttcataaagatgttgttacagaagtttcactgccctccttccctcccattccattccttttcaaacacttccacttctactgtcacacgccatatgtatgtaaggatgactttaagtatctgtgcgaaatctaggatacacaatgagagcagatgtgcaatatttttttcctctgagttgacttgttttacttagcacaactctcagctgtacctgttttactgcaagtgacattaccccactctcccttatggctgagtaaaactccatgtatgtgtgaccgtgtgtgtgtgtgtgtgtgtgtgtgtgtgtgtgtgtatgtgtgtgtgtgtgtgtgtgtgtgtatgtgtgcatgtgtgtgtgagcgtgtgtgcgcatgtgcatgtgcatgtgtgtgtgtgtgcatgtgtgtgtgtcccattgtctagtccactttcttgtagatggattcttgttgagattttgtagtttggctgccattgacactgccacagtaaatatagatgtgcagtctgtgagatgtgagtcatttaggtcttcacactagagtgtgattagtggtcacagtgtggttccagtttcagttttgaggaatctccatactgatatccatagccactgaacttgtttctgctccagtggcacctctgtgggttcccttttccctacatcgccaccagcatttgtggccaccagtactctagctgtcttagtgacagtcattccgaccaggaagagaaagaatgtcactgttgtttagtttgtatttccctgattgccaaggctttcagactttggttttcattggccagaatgtaatctttttgaaggctgttttgttagtccatttgttgagttcattgcttggcattttggtgtctcatctgttgaggtttctatacattatagatatttctctgccacatgtgcagctggcaaagacttcactcagttattgcctctggtgtgcaagctttacaatttcccgcatgttgactggtcatgccctattctctgagctgttaagagtcctgttccgaaagtccctgatccccgcctctgtctgcttccccacgtcttcctctaacagcttccgaatatcaggtctacattaaggtcttcattccactgggaattgatttctggtttcattttttttttaacatgtgaatacttggtttccttagcatcatctgtcttttctccagtgtatcctttttttttggtatccttgtgaaaaatcaggtgtccgtgtgggtttgtttctgggtttcctcttgtattcctgcacatctgcttttgtagcagccatgaagttttagttgccgtccctctgtagtgtatcctgaggagagacaccgtggctctgtagtgcatcccgaggagagacaccatgcctctgtagtgcatcctgaggtgagacaccatgactctactgcatcctgatgagagacactgtgcctctagtacatcctgaggtgagacaccgtgcctctgtagtgcatcctgaggagagacactgtgactctagtgcatcctgaggagagacaccatgcctctgtagtgcatcctgaggtgagacacggtgcctctgtagtgggtcctgaggtgagaccccgtgcctctgtagtgcatcctgaggagagacactgtgactctagtgcatcctgaggtgagacatgctgagatctcagcattgctcttcttgcccgggattgctttggcctttcccttccatgtgaaggctactgatttttgtaagttgaccttgtcccctgatttgctgaaagtatttatcagttctaagagtttcctgagggagtctattggggtcaagtcatgtggtgtgcaaataaggacaactcaactcctcttccttttgtagctgttttatttctcctcttgtgcgttagtaagactttaagcagtgcactgaaagagtggatacccatcttctgttcctgatctagtgaaaacttagttttgtttttctgcattttcttgtgatgttggctctagagttcataggttctagtctttattatgctgagatacgttccctctagtcctagtctcttcagggtatttatcatgagaggatgctggaactactaaatgaccatgtgatttctatcctcaaatccgtttatgatactgtatatttattgatttgtgtgtgttgaaccatccctgcattgttgaaattaagccaaagtctatcaggatgaatgcttgtgttggccaattttatgtcagcttgacacaggttctgagaggaggggaccccaattgagaaaatgtctttttaagattgggattgattgattagtgattgatggggaaggtccagcccattgtgggtggggccatccctgggctggtggtcctggattctctatgaaagcaggctgagcaagctatgaggaacaagccagtaagcaggacccctccatgggttctgcatcaactcctgcctccaggtacttgtcctgtttgagttcctgtcctgacttctttcagtgatagactatgatgtggaagcagaagtcagataccctttcctccccagcttgtgtttggtctggtgtttcatcagagcaatagaaaccctaactgagacaatgctcttttcagtgtgttcttggatttggtttgtaagtattttctgttgagacttttctgtctgtgttctttgacggccttagattttcctattttagtatctgttttgtatttaaaaaaattttttttaaatactcgatgtgtgtttgtgtgtgcatgtgtgtaccacaagaggtcagagaacaactagtggaagttggctctcttcttcttcttcctcctcttctcacctcttcttcttcctgctcctcctgctcctccttctgttcctcttcctcctcttgctcctcctcctcctgcttttcctcttcttcttcttcttcttcctcttcttcttcctcctccttcttctcttctcttctcttctcttctcttctcttctcttctcttctcttctcttctcttctctcttttcttctacatgaattttgaatatcaaattcaggttatcaggcacggttgcaggcacctttatctcgtgagccatctctttggcctggaatatgttttgaaggtatgttcttatggcttttctggactttgtggatatctatcataatgtttttcttttcatctgtcattttattcatttgggccttttggttagcttggctaagggtttgtcaagtttgcttatttttcaaagaaccaactctttgtcccattgttttttttttttttttttttacatttccgttccattaatttttgccctcatcttaattgtttccttgcagctgctgcttttgactttggctgctggttggtgatagggttgctgtgcatagcttttatttgctgaggcctgcaccttctatttctgctttctctgggcttgtatcatggagcgatggtgagtcgtgttgaggccttttctgaatgcgttggatggttatgtgatttctgtccccgggtccatgtatgcagtgttttacatgtattgatttgcttatgttgacctctctttacatccctgcaatgaggtcagcttgatcacggtgaattatatttgccagtattttatcctcatcaatattctttttttttttttttccctcatcaatgttcttcatcttatctcagttaattttggtaggtaacatgcctttagaaagtcatccatttatttaaaaaatttccagtttagtatttttattttgtattttcaaaaatctttttgttttaaaaaaatgttttaatatgtgtatgtgtttgctaaacaaggagaaattctgattccatgttcattcatgaaaatagtctgtagattttctgtttgtgtatgtgtgtttctggttttgtgatcagggtgaccctggcgtcatagaggagtttggcacattcctttctttctgctctattgagtagcctgagaagcacgtgtgtgagctctgtgtgaaagggctggtggagttcagtgtgagttcccctgaatctgggctttatttttagttgggagactttactcttgctttggtctcactgattactgtacagtcatataagctgtttatatctggggttttggtcggtcatgtgtctatatcaacaatttccaaattattggactagaggttttccaagcatgccctggtgacctagtgaagttcatgcttgtctagttgaacatctactttgtcatnnnnnnnnnnnnnnnnnnnnnnnnnnnnnnnnnnnnnnnnnnnnnnnnnnnnnnnnnnnnnnnnnnnnnnnnnnnnnnnnnnnnnnnnnnnnnnnnnnnnnnnnnnnnnnnnnnnnnnnnnnnnnnnnnnnnnnnnnnnnnnnnnnnnnnnnnnnnnnnnnnnnnnnnnnnnnnnnnnnnnnnnnnnnnnnnnnnnnnnnnnnnnnnnnnnnnnnnnnnnnnnnnnnnnnnnnnnnnnnnnnnnnnnnnnnnnnnnnnnnnnnnnnnnnnnnnnnnnnnnnnnnnnnnnnnnnnnnnnnnnnnnnnnnnnnnnnnnnnnnnnnnnnnnnnnnnnnnnnnnnnnnnnnnnnnnnnnnnnnnnnnnnnnnnnnnnnnnnnnnnnnnnnnnnnnnnnnnnnnnnnnnnnnnnnnnnnnnnnnnnnnnnnnnnnnnnnnnnnnnnnnnnnnnnnnnnnnnnnnnnnnnnnnnnnnnnnnnnnnnnnnnnnnnnnnnnnnnnnnnnnnnnnnnnnnnnnnnnnnnnnnnnnnnnnnnnnnnnnnnnnnnnnnnnnnnnnnnnnnnnnnnnnnnnnnnnnnnnnnnnnnnnnnnnnnnnnnnnnnnnnnnnnnnnnnnnnnnnnnnnnnnnnnnnnnnnnnnnnnnnnnnnnnnnnnnnnnnnnnnnnnnnnnnnnnnnnnnnnnnnnnnnnnnnnnnnnnnnnnnnnnnnnnnnnnnnnnnnnnnnnnnnnnnnnnnnnnnnnnnnnnnnnnnnnnnnnnnnnnnnnnnnnnnnnnnnnnnnnnnnnnnnnnnnnnnnnnnnnnnnnnnnnnnnnnnnnnnnnnnnnnnnnnnnnnnnnnnnnnnnnnnnnnnnnnnnnnnnnnnnnnnnnnnnnnnnnnnnnnnnnnnnnnnnnnnnnnnnnnnnnnnnnnnnnnnnnnnnnnnnnnnnnnnnnnnnnnnnnnnnnnnnnnnnnnnnnnnnnnnnnnnnnnnnnnnnnnnnnnnnnnnnnnnnnnnnnnnnnnnnnnnnnnnnnnnnnnnnnnnnnnnnnnnnnnnnnnnnnnnnnnnnnnnnnnnnnnnnnnnnnnnnnnnnnnnnnnnnnnnnnnnnnnnnnnnnnnnnnnnnnnnnnnnnnnnnnnnnnnnnnnnnnnnnnnnnnnnnnnnnnnnnnnnnnnnnttgcaattttcttttaaatccgctgtaaactccccctttgaactactttcactgcgcccataggcaataacctatgaggttttatagctttacattttagcaatttaacttttctctctttaatctgatgatcgttaggtgtgtgtcagtctccatggatgctgtgtttgtttgcagtctctcttgctgttggtttctgctctgtagtccattgtgatcagttttcttgatccagcgtgtccacaccctgataatagtctgtcttctacttgatctgttttattggtgaggtctccactgagttatttttgacttacttcaatttgatttttttcagtatttatatttattgaattcatccttcatttgctgtattgacatctttattttgttcagctctttgtattgtctttgaattcattcaggagttcatgtcctctttgattttgccaacattcttaaaaccgttcctttgaattctctggcatccatctgattcattctcactgaggtctgttgttgttccgttgaaggagtcacatcactctgacttcatgtttctgcattgggacttgtccatctggggtttggttgttggttatgtatttgttttttttttttttttaagatttatttatttattatatgtgtacactgtagctgtcttcagacactccagaagagggcatcagattttttttttgttacagatggttgtgagccaccatgtggttgctgggatttgaactttggacctttggaagagcagtcggtgctcttaactgctgagccatctcaccagccctgtatttggtttttatttaatttctttgtggtgttggagaacaacctagggccttcatgctgagctgtgggcccagtcccagaattttctttaatcacctgcatgcttttggttgggtttgcggtgtctaggtggaactagcttatactcctgaggtgccactcccctccgcatgctgaccagggctgttacgggactggtgggcatgtagtgcctcagtgaagaaaatgaggttgcttatgttgttggtttctgcctcagacagcaggggtcagccttcccttaggagtggtccagcccttagcctgggagtcacttctgagtattcgtcccagcttctgcttctttcggtttgcttcgaggctctgctgtggcttagcctacacttgtacttacccttgtgccgggtatgttcttgttaccagcgctgtctcagcttgagcatgactgcagggtgctccacggctctgtggttctctgggtctcactttctaagtgggtggaagggatcctcgctgagtttcaggacaggccagctccttctgtgaggtgccatatgactgttctggggtgcatctcccagtggtgccgggtgattagttttcagattccctcgggatctgctacctccttgctccagtgatgatggagcttacaatgctgcttctgcttctttggcttattggtctctccatgaaaactttgttttcagtgattttgcttatggggtttttgttccttttatctactggccctgggcaggggaagggagctctcctcttcgtgcttcagtccaccattctagatcatcgtctgtttgtgtaaactagaaactcagtatctccgtgcttacctaatctccacagtccactctgtgcggtgttgctcctccttaccagacgttgacggctcagttccatcattttcttccagattcctagggacattaaagtgctgctggtctctactctgctgtcctctgcccttgcctagtaatggaaagcagacttttgagtggagtcatggactgtccagctatctggagtgatgttggtgatgtggatggtactggtgaggatgtggtaatcaaggtcgatggtaatgacagagaagaagatgatggcagtgctgctgctgcagctgacagtgctgatggtgacagtgctgatggtgacagtgctgatggtgacagtgctgatggtgacagtgctgatggtgacagtgctggtggtgacagtgctggtggtgacagtgctgatggggacagtgctgatggggacagtgctgnnnnnnnnnnnnnnnnnnnnnnnnnnnnnnnnnnnnnnnnnnnnnnnnnnnnnnnnnnnnnnnnnnnnnnnnnnnnnnnnnnnnnnnnnnnnnnnnnnnnnnnnnnnnnnnnnnnnnnnnnnnnnnnnnnnnnnnnnnnnnnnnnnnnnnnnnnnnnnnnnnntgctgatggtgacagatgcctgcacgtatctgtatgcctttgttgtatatgggaaggtcaggagtgtctgctgattccattgtgtgggtgtcatgtccaggacaggctttctgatgaagccttagactgtgttgaaatggtctcaaagggagacattcacagtgcccaatgttgacagcagaataacactttctccagatgaggaattcaagacaggtggtgagtgccaggctgctgtcacaggacactgcactgggcacctcataggacccacattgctttccaagatcaggggtgggctgagggttcttctggtgaggcctgtcctctttgttgaagatgtcacttaaactttgtccccatatggctctgcttttgtatatgtacggaaagagaaatagagcaagacacagagaaggagcaaggatggagacaggacagtgctagagttagagaaagagagagggaggagggagacaaggagagagggaaggaagagggggccagaggaggggaaaggaggagggaaagggaagaggagggagagaagtgagtgagttagagttagtgatagagacagggaggttggagggagaaagctagagttaaagaaggagagagagggagagtgggaagagctagaattagagagagcaagaaatagggaagtagtgggaaggagaggagagataagaggaaggaagggttgtaaaatgatagagaggcagaagggggagagagaagagagatggaagagggaaaggagactcagagaagggagagagagagagagagagagagagagagagagagagagagagagagagagaggagagaggagagaggagagagagagagagagagaacatccagttagtaatagctggtgtaagagagttacacttgaggtgccagcactgccccactagagaggtccaccctcatgaccttgtctggccccagcttcccctgtgtggaccttgtgtgnnnnnnnnnnnnnnnnnnnngaggagggaaagggaagaggagggagagaagtgagtgagttagagttagtgatagagacagggaggttggaaggagaaagctagagttaaagaaggagagagagggagagtgggaagagctagaattagagagagcaagaaatagggaagtagtgggaaggagaggagagataagaggaaggaagggttgtaaaatgatagagaggcagaagggggagagagaagagagatggaagagggaaaggagactcagagaaggggagagagagagagagagaagagagagagagagagagagagagagagagagagagagagagagagttacacttgaggtgccagcactgccccactagagaggtccaccctcatgaccttgtctggccccagcttcccctgtgtggaccttgtgtggaaggactgcagtcacagtgggagttgggcctcactgtgcattttgaaggacacacttctatctacaacaaataagatctttttttaacacatgatattactcatgtatttgttttagtttctagaagttgggataaatgcattatagaaaagtatgaaatcgtcacttcaggccctggctcttatcgtcttgggaggcagggtggggtgggcacaggtcctgctgtaccatgcctaataccaacagggttgcctaggcattgtcctgctacctccttagagcttccgtttcatcccctgtaggatgggtgatggtacctgcctgcaagctcatgaaggtgcgatgaggccaccccagggagtggttagtgaggagcccggtggcagccgcccctatttcttatctgtgcacacccctgctctgctttcccccagaggctgtggggggaagtgctgtgatttaaactttctcctcttgttaatgttatgtcataagcctttccatgttgctgcttcctcctcaaccaccacttaagaaagttcaaaactttgttctttaatgtgcatgacatgttcttgtgtgagttcacacacactgtgtgaatacagaggcccaaggagaccagaagaaggtggcaggtctccaggaactggagttcctgatggccgtgagctaccatgtgtgtgctggaaagtggagccgtataaaaggagctctctccagctcctctcgccatcatcttttgaatggcgatacaatgattcgaaaacgatctttatgtaaaattgatattaacattgcatatccatccgaggcagcattttattttcgtgcttcatcaagaccttgacatgttttgtggtcttcagaatcagtcttaagctgcaataccaggaatgctgttcgctgccgttctgggggtgggggaggcgaggcctgccgcagagtctagggaacggggtgcctccttttactgttgactcactaattactttaattgaaaagctgcattgaacatagagctggagacttgggatgttcccggagggcccacacagggactgctctccctctgccgtccctcagctgcctgtcttgtctctctgaggaggaggcggggctaagcacactgtcgccctcatgctcttttacagatacaaatggcagcatgtaggtggcatgtactcattctttacttagaaataagcgtcgattccaggagcctggggacaggaggcacccagcatgcacgttcactccgccccctatgtgctcaccagtttcttaatgccacaggagccaatcagcatttgagaaaaatactcttttatcaaagtcgatgtaacattaaaataacacacaacaggagattatctcagggcagacagcttaacacccccacctcccagtggccatctccttgaatggctgtcctgcagaagattggcaactggtccttcatctgaaaaggtttctgtaatagttataaacctgaggacttctcatttttactattgagtgaagagagggcccttcctgtgtctctggggtggcttcttcaggtgtttcccatgaccaacagaggtcttttgtcagaacccaggtacccacttgaaagtggtttgtcagagctagagagatggctcagtggttaagagcactgactgctcttccagaggtcctgagttcaattctcagcaaccacatggtggctcacatccatctgtaatgggatctgatgccctcttctggtgtgtctgaagacagctacagtgtatgcatcatataaataaaaataaataaatcttaaaaaaaaaaaaaaacccaaagaaagtggtttgtcaactcttttctttgtcatgtgtggactgtggggaccatgggtgccactcactcatactactgacatctaagatgacaagaagcacaggtagcctgtgcacagcactgacactgtaagtggtaaccaggcataatctacccgcttttccctctggtcggcagaggctgtctccctggaacatgttggtgctcaggctggtacccttccatctgtattagttaccattgctcctgctgagatagaatgccagggaaagcaatgcacggaagaaagggtttcctgtggctcacagtctgagagctcattccattatggccaaggcacatggtggcaggaagatgaggcagctgctccttttgcatctattaggaagcaaagaccagtgctggtgcttaaactggcttctcctttcctccctttctattcagcctgggaccccagcctgtgggatggtacctccatgttcaggagatgggtcttagttaatcttctctggagccaccctcacagactcaccccgagatgtgtctcctatgtgatttcacatctggcagcactgaaaattaaccactacaccatcctgtccagttggcacctgcagcctctgaggtaattgctctacttcacatcttaagcccaggttcttgggtaggaacgggcattgaagccacacctctctgacagagtccttatgtgctctgcgctatcagtcctcttcttgctgaggacttggagcttagtgggaagactaagcattctgggtaagtttagaatgtagctgttctcttgttttgtgttattcacgggcactgtaacactgcctagtattcccacgtccactgcagcactacctagtaattccagttttcagctattaagctgggggctggagagatggctcagaagttaagaacacttgatggtttcccagaggacctgtgtttgaatcccagcacccacatggtgactcaccactgtctgtaactccagttccagggcatccaacaccctcttttgtcttcctcaggtgttttgtatgtggtacatggacatacatacaggcagaatacccatacacactgtggtagtttgaatgagaatggcctccatagatccaaatgggttgcactgttagaaggtgtggccttgttgaagtaggtgtggtcttgttggaagccgtgtctcttcctgctgcttgtggatccagatcagagttttcagctaccttttctgcctgcatgccaccaaggttgacaagaatggattaaacctctaaactgtaagccagccccaatgaagtatttttctttgtaagagttgggtagtcatggtgtctcttcacagcaatagaaccctaactaagacacacttaaactaaaaataaattattcttaggaaaaaaaagccatagtcgagtggcctcacccacttagtgtaaggcaggttcagggtttcctgaatgtgcctcatagcaggtatgtgctgggcacagaggctaatactgtgataccaggcttctgtgacaaggctttggcatctggttctgtgctgcaaggctagctgattggagggggagcagctggcaggacagatgtttgggggtactgttgttggatatgccaagaagaaggcacaggctcgccccgctctgaccactcttaccactcttacacataagtaactgcttgcccaggcctgacgtgcgctggaaggctatgtgcacacttgagtgtattgtccgaggctggtgttcatgggtgagtccacgggtatgacaccacacctgtcttatgagtgtgatggtagtgactggaagatagggcaaggccacccctaagaaaacgcttaggaaaagggagcagggcaggtagatatcccaggaagcagggcaggggtggggtggggggtagctgtggttcagagccgtgtgcaagcaagcacggtgtgccagtcatggtgccagtcattcccagcctcagggtcacccactggtgaagcagcccttgaagtcaggttgtcctgatagagctgttctcaattggccgggctgcacgagtgttggttctgtgacaaaagcatgggcaatgggcagagtgcagctggctgctgggcaagcacttggttctgagagagctggcatgccaagaagagagcactgtaggtggagagaaggtgctgacatctcctccagatctgcctccacagcctcagatcttctcactactgacacctagccttgcctcagtttctctgacggtaaatgaaggaggtggtggagatggttgtcaagatctgaaagccttccagatttggactttgttctgggattagctgagagccgtgggatatttgtgggtagggaagtaggtgactggaactgtgcttgggggaggttaatcaggcttctgctcctttgtgacaatcccaatggaaggcaggaagtagcaacatgtgggcaacactttgaaattcagcagcaagtgaattagttgggctctgaactgcagctgttcggaactccctctgtgccatttttgggtctggcagaagcgcctctcccctgccgctgcctcctcctgcttgctctctccctggcaccagccctttcttctctgcacaccctgtggtcacagcaggctcaagtataatgaggctgtttggagctggctggtggcagagagagaacttggggttgttcatgaatcaggatcacaggccacagacaggatgctggcactcgaaccacacaggcccagggcttatacacactggctctggggtctcctcagctgctgttcccagctgactcaagggggtagcacagccctggttggaacaagctactgtctgccattttggtggctgccaggcctttgtctggttctttggaatcatttagaaatgggtttcagggactgaagaggtgggaattcgtggcaggctcattgtgatctaaggtggatttcaattggaggtgtgggcaggcggctcaagctataggtgacttttctgaacttagtatcttgtcaagttcagagactgctactccatttccttagacagttctccgacccctccaaatcctagcttgtttgtttggagataatcttgcacctgcttttacatttttttccctttagttccctgccagtctatctggtgagtatggttgaatagtcttgcatgttccagatctacttcttatatccaggctgctccagagactcatgtagacccccctgcctcttgtcctctcctgcagtcttagtgcagggcactggccggcactgctaatgcccttggtttaagcccttccagtgcaggccattgactgtacagcagagccccgttctttctcccatccgtttatggttattttctgaataaatgtctatggaattagtaagacacacatttcctttgtgtgctagttctctcggaagccattagaactcttttgtcttctatgcttgaaaatcatctccattacctaaagcacgtagtgaagtgtaacacctgcttagcaaagccattttgaccctcagagagaatgcagcatttaatttatggttatgtcataggggattttaaagtttctttggctaggatggctgactctttttttctttgagagagaaatcttattttcatcttaaaagtttcttctttttcttggggtaggaggagcatgcttttattacgagtggagattacttcattcagttgcaggctgtagagtgtttcctgagacaggaaggcagcagtgctgtgagtggctgctggggaggcaggaaggagaggcacagtctgtgtccagtcctgggaccacagtgagggatgcagtcctgggactgtagtgagagagggtgcatttgatggggcttggttggggtgtgttgtagtgccaggatggctgcctatgtgccatctgtgctgctggctactcttgtcaggggagcttccaccctggcccgaggcaaatgaactttacctttacccaagttgagtcccaccatgacttgggttgagttccatcttgattagggactggagcaggtcagggctgtgtaaagaggggatacctcgtgggccagaatgaggtctgagcatggctgcagtgctgggaaggtactgtggtctgggcagctgcgctttagaggcaggatgtgggaactggctggaggccctggcgtccctttaaaagagccatgctggtttataggtctgagcagcttttgcacactcagaagacattctgtcctctctccccggcggctggtgcaggagtagcggcggctgtgtcttctggaatatttatctttgttattcatcctacctcagcctgcatccctggctcctctttgcctggcaattccttcctccatctttgacagcactgaagatggagcctggcaggctctccactgttgaattgcctttccagccccctgttcatatttcatctgaggcagcatctcttttagtttcctaggtcagcctagaactggaaatccttgagcctcaacctcccaggtggttggtttatgtcagatagcatgcaaccaatcttgatttaaaatgacctacctttggtctatagaatttagccaacactgggcacactaataagaaaaacagtagtatctgatttttttgttttgttttgttttttcgagacagggtttctctgtgtagccctggctgtcctggaactcactctgtagaccaggctggccttaaactcagaaatctgcctgcctctgccttccaagtgcttccaagtacatggaggcttgttgctggtaccttgctttctttgtggcggtgctcggccctggcattactgggtaggttgatagcacctgtgactcattgctctctgccttcccacctcgtctgtattgttgctctgaattgaggctgcacaacggtttatctggactctctgctgtctccctcagagattgtgagcctgttttcccagtgtgccatttgccaagggttttccgcacagcatttcttggactcctcaaaggtcagtaagcagttttaacaagattgcagccaattctcattagaattaatttattcacccctcactaattaattcatctgtttgtgcattgagttgccccctcatttatctggaaacatttctgaggctcctgtctggctcaggatgctgaagacacagagctgtgcttgttagttgtgaatgtccctggaggagctgctatctggggaaccatcaggtagtcacggaggagtcccagtggtgtggatggccttctgaggactcaggaaccaagacttgcttaggcaggtgactgtgagagaaagtgcagggccacaggtgcagcctgcagagtgagttgtagtgacagatcttggggagcctctggatgggaggctagtttggaattatcctgtttatagttccttgacactgccttccttacctagatgtcatgccttaccttgggcttgtcatcttatcacttaaagcccagatggaagggtcacaagttctgggccagcctgggaatcctgtttcagaaaacagagtacattaaaaactaagtaggagctgctgctcctacttgtttaatcttctcctccctcggagctgcctcctgtgcccagcctgcctatctctctctggctcctccccctttccctgctgtgtaatccagaatgggctggggtcagggcatcggttagctccattgtccaagtacttggtgacctggcagataagctcagctctaggtggggtttggtcttcccttcatctcagtgacagattgtggtgtgaggaattcacagcctccctgaatgtggagggaggccattgccttccattgggaccacgaagcctctgaggagaagctgaaggagaagtagccctaagacaagatgcctgaggactgtgccaagtcaacagtgccaggtttttgtgggccagtggccagtggtgtaccagggcttgctgtgaacagcacactgaggtgggggcctttgtgcctggggagtcagagggcagttccttagtgtctccagaatggcacggccagccctgtccatggatgagcggaggaagaaaatgagttggttagagtgggcatggcgggcatggggcccttgagtagggctcaagtcagctggtggagggatgctaggaacatgtgaaaattgtcttcttttcaccccagcgtcatgggtagagtctgcattcctgtacctgagaagcacagtcagctagggcctgtcctctgtgaatcatgggtggaatcagcagtctacagtagtcagcaccaaggccagggcctcgggggcagcctcctggaaggtgcactgctcagcatatagaccacctatgccagtggcacactgatgtcctccagacttgctgcagacttgtgctgagggcttgatgtctcagggaatagcgctttgtaaatgtgaccatgtcatcgagtttcttcttgtggtcacttctctctcctgagctcagcttaatcactgagttcccttgctgccaaaggttagatgcacttggggagcttggcaggaggccctccttaacctgatggcaaagctgtcagtgctcagggaggggatggtactaggacggcatagcagtggagcactcctgtcccaggtaagatggtgcctcctgcagatgtgccatgtggaatctttaactatgtttaggaagagccaagcagctaggggcttagtttttattttattaattaacccagtaaataaaaatattgtcataacatactttcatgtgcgattagtttaagaaccgttccagctgactgtggtgcctagtgtgtgtttcacacatagggagcatcttatgtgggcatgttgtaggtgtctgcagacactgcattggaaagcacaggattgcagttaggtgggtcaagcatctccttacccaggtggttaggtttggcttcctcattaagtaacacacacatacatacacacatatataaaatatatgtacatatattatatatttacatattatatataacatgcatatacatgcattttaaaataaggtttatttatttattatgtatataatgctttgcttgcatatatgcctgcacaccagaagagggcgcctgatctcatagaagtttgtaagccaccatgtggctgatggaattgaactcaggacctctggaaaagcagttagtgcttttagcctctgagctgtctctccagcccctgaagtaacatttaagctttggtctgagtcctgtggttatttgggggcagagaggacatgagtggagcttactgtgctgacaggcattgctaagaaggctaccatggcttcggtgcagtgaggggaagtggcatggggaggtttgatagcaggctgccggggtggaggacagggggaatccattgaccactatcaagaagagatttaagtttcctgaaggtgctggtggcttatccatggaggtggtgtgaggtcaaggggaatgtgggctaaggagtgggctgtgggagtctctcagagctcaaaagaaaggacttattattggctgaatatggggagctgggggaggccctttgagagtgactgtcagcctgtggctggatgtctgctagctatctacttactgaggtgggcacttgagcaggttttaggagaaaagaacatttggttggaggcatataaagttgggataccagtgtagcatctgaggtacagtggaatagtcaggaggcatggtggcatgtctatagggcaggtgtccctggagtcacatggtcttctatgcactatgcttctcgccctcttactgacctccttgggctattacatatttctgtgctataaaaatgggttttactcaggtcttcctttaaaataaggtttctctatgtgctttgggtcttactgaagtctgcggtatcagggatagccgtccttatagaagtcaaatagctttgtggttcccagctgtccctgatcctttgctgttagatgcagagaatgccggtccctccattgatgtgaattatgtgaatcctctccacaaagatcacagtgaatggttttcaatagaacgggcctcacatacatattaaatacgtaatatgagaaaatatttttcaagcagaagttcatctaggctgcgaggctgtcactgttctttgtacaattaataataaccctccgctctctgcatgattagacgtctttctgcaagcaaacatttaataaccacacagggccgtcatctggagcggctgcagtttatagggacaccccctattgttatgcatttgttttgttcccaactttccctgccagacactgctttcagcatcttggtgctggcatcttggctctgtctctggttgttttcttgggataattactgtacgggaactcattgatttaagaccacacatatttaagacttgaccacattgtctttttgcttacctatcatgggcttctctatctgtcatcggttttcctgatttattactgtttattattactattgccattattatttttgaggacaggttttcgaatagcccaggttgggccccccccccacatgctttttctgtgtcttagattcttttccagttgctgcaatatgcgctggcaaggaggagtttcagggggaagacagttatttcagttcacagtttaagctgtagtctgtcatggtggggaagtcaaggcaataggagcttgaagcagccagtcacattgcatcccaaatagaaaacagaaggatgaatacaagctggtcctcagcttgctgtatacattttatacagtctaggatcccatgcccacaggtaagactttccacatccactactataatgaagataatctccctcaggggccacttaagtggttctagagtccgtcaaattgacagttaacaccatcacactctgctgcttcctcctgggtgctcagattctggtacctggttagggcggatcactgagcaacactgtctcatctgttgtcttgtaagagggcatttcctaaggagcccagctctcattgtgctggaaagtggatgaatgctcagcttaccaacagcacttggacccctgtgagtgctctataggacaagctcctggtgtgtgtgtctggggtcctagagcatgcctttgcctatggggctcaaggacacacttgccgtttaactctcacagtgatccctggaatgctgttatatttattttgccttagagaacagcaggccagctcaaggatcctctgtcttggtcaccatacacatttaaggggagggtgacaccttagttgtcacatctgttttgctgaccctgactttaggctcttgtctctcttcctcctgttcctctgtgtctcacctcatattaaggtgaatctgactggagtgtggcttcaggaacccaaaagatttgtgtgtaccttaggttggtccatttaaaaaagaggcagctccagaccgcgcgtttgcatacgtgcttgagtcgattcctgccgcctctcagccactctttctggaaagcaaggcttggctccagtctgactctgccctttgggagctgtggcccattgtaggtgctgttttctgcagggaggttaatgagcacccttccacctggcagagtggccgggaaacttaagagagatcaatgctgctagaacacagagtgctggcctggtaaagctactcattgattgtgcagcctgtacattttgatttttgaaaaattaaaatggtaatcaatgccatcccagcattgaatcggtgtggtactaaagccccggtgcttatggagctccgggaaggcccagccagccgacacttcactggctgctttcttagcaagctgactgctctgctctgtgagtcgctccagaataagtgcagtcgcttctgaggtgagctcctttaagttggaggtgtggctctgccttcctgtggcttctcttgcatagaagtttaacactttccatatgtcctgtaggcttcccaggggcttctgccatgtgcaagagtggagttatctcagttggccttccttggaggctggctcttccgatatatctgggagaggctggagcaagaacctgaagcctcagactctcagccacagcagctgggctgttgtgagccctgtcccagagttgtcacatgttgccattaccacctgtcagagcgatgacctattcccatggacaggaggctgtgtaaagcaactgtgggggccttgcagctgtggagaggggagcctgggtgtcccccatgtttatctgatttcagagtgtaacttaaggctaccgtgttcaggatagcttcatggctcatccagttgttgaatgaataagtgaaaacataaatccagcttcagctttcattgtttttattttttattctaaagacagattagctcactgtaaaatctgtttttcttcatttgccagaaagccatcaacagagactcttgcctctgttggggtatagagttgattgacacggttctttgtgcctggaaagcaaattatgttcgaatgttcttcacattctatttataagtctcacagtttagcagcggcacttggttctaatccgtgtcctgcagtgttcctggtgcagcagctgctgtcactcagaggagtgcggcatgggcacgggtgagtgcagtgtggggacagaggactggagagcctgattcctctgcagagtgtggccttctcactgcgagtgaatattgtgtttaagtgtgactgcttcagccaccttgctcatcctgcagacactatgagctctcatttccttcctcatgggaatgcagtgtgagtgtgccgcacacttcctcacctgtgtggacgctggaggtcaacctcagctgtcgtttctcaggatgcagcggctctgattaatagaactttgcacatagcttcagctggctgtgcagtgagtgccaggatcagcctatcccagcttcccagtgctggaagcacaagtcagtgccgctgccctgctccttacaagggctttgggggtcaagcccagccccttaagcttgcaaggtcaatgttttactgttggagctattgcccaggttgtcaccagccttttcctcctggatgtgggattccaggtatatactaccatgcctagttgtagacccacatttccatatatactaaatgatacttggtgaatgatgacctttgaaccatagaggcctgcctgccaagtagcatacctgcttcttacaggtgatgccctgcccaggtggtgtgggtgtctcttttacctggacacactccttggcttggtcagcgtgtacctcctctttccccatcaggtgagtgggtttctttgagggcaacccgcttgtctgctttctcagggaggtccctagaatggctggtactctgctcaggtgccttgcccacttggggcctcctgttggccacttgagacaactggaagccccggggcaggggcttgggacttttgtgtcttgtagcagcagaggctttgtttgcagccagttccctatttgttcatcatgagctctccctcagactaataacatctgtcagagttaggacgggaggctggggcatggatggagaaagacaaggagtggaagcggaggaaggaagacatttctcacgtgttggttgtattctcaggtgttcttgctctgcttggttggtggtgtctgtgctttaagtgcaatgaagaccccagtggtcctgcgttttattctctgctccatggttgcccctggagtccatattcctctggccttgggccactgtggatggtgttttcttcctgtctgtctcacccagggattgtaccacataagtctgctgtcgtagcccttgccttaggacctttgataggtcctgtctcgggttcaaagtgaagttcaactccttagcccagggcaggaggccaatcctttcctccttctggctctcacctatcctctggctcattgtgggttatgctgtacctcttagctccttctagccatgggagctcttctattttaatcactcttctcttctcttctctttctcttactcttctcttctcttctcttctcttctccctnnnnnnnnnnnnnnnnnnnnnnnnnnnnnnnnnnnnnnnnnnnnnnnnnnnnnnnnnnnnnnnnnnnnnnnnnnnnnnnnnnnnnnnnnnnnnnnnnnnnnnnnnnnncccccctacccctcctctctcctctcctctcacactttgagtgtgtagttcatatgtgtccaggcttgtcctcagtgccttatgtatatattttttgagacattgacattataagcagactctcaggtcacaggagcagggttagcccctggcttgtctggcctgtagtaatctccagctccaagcctcctccttgtttctgcctgtgcttccagacccttctgctgtgctggttagtaactgtcagtttgacaggactgagaatcactaaggaggagggagacaaacttcgacacacacccgtgaggacctatttagattaggacatacctttggtaaattttctcttttctcttaaattgttttattaaatttttttaacgtacaatatatcttgaacacatctcccccccctttccaagtactctttaggttagttgggtagaaagactctcccgaaatgtgggctgcaccattctctggctgccaccctggattgtgtaagtgtagacagtgagttgagcacaaacattcattgctgtctgcttcttgattgtgggtgcaatgtgagcaggtgacttgagcttctgtcaccaagcctgctcccatgctgggctgtaccctcaaactgggagccaactgaaccttcccctcacttcccctcaaactgggagccaactgaaccttcccctcaagttcctctgtcccagtgttttgtcacaggaagggcaactgagacgttgacattgctgctctcctgcctcctcttgctggcatctaataatcgactaattaattcactttgccttcctcccatccaagcaagtcgcttgtgcgggcatgtggagcactctcagtggcttgtgagctcccaaacgtaaggctgtctcttctttcacattctgccgtccctggtgcagattgctatgtgctatctcaccttcctggtcctgaagatttgaggaggactgccctgctgtggctccagagagaggactgccctgctgtagctccagagggaggactgccctgctgtggctccagagggaggactgccctgctgtggctccagagggaggactgccctgctgtggctccactgttctctatgtgctgtgaagtcagttctggttttgctgtggagacccaaatgtcctaacagacttaccagtgtggagtggatccatctacttaacattgctgccaaattaatactgcatctggaaggccagaggaaagccacttgagagaatctccctgcataatttatgaaactctagtcataaaataagcatttacaatggcctgtttgcccaaggtagagaatgctaattcagccattattcataggcatggggcagggacatttctttgtctcccaaaggtctgttggcttgtagtctcctcagtaggtttctgaggtcactcctagtgtctctttccaaagtgatctctcttcttgtttgaagaccatttctttggggttgagtgttatgtaaaaagggtttaggagactggagtatgccagtatttttgaacagtgggaatgtcatggaaaaagcaagccaacaaaccaaatcctagagcaggcagactcacaccgctgtcctgtgaacagagcaggacagtgttcaggaggcagaaaggagaattaggcaggcagactcttgtcccgggcagatgctgccagttggttggagaggcagtgggctcacctgccagcatgaaagcaggcctggtagagcctgcaggaagcagggctggccatggatttcaggtggcaagagtgggtgtgtggttgctggagaggcactcagggccagccagaatggtggatggcttctttatgagacccttggttgccagctccaagagtcaaccctagccactcatttgtagtcacttcctgtttgcaccctactccttccagttggccacagtctcccgagggcaaggtcttgttatccttggttggcagcattagttatatctgggaagagtagtgctccttgtagtctctgaagggctgtaaacagccctggtcctcccactctgggctcaagtttgaagctacaggccctgtctcagactgtgttctcagggctgaggtaaaagaaaggagctgctagaggctcccagtgcctctcaaagcctggccaggactccgtgcttgtcatcaccactttctttccagtacctggtggcccccagccaagactgacacagcagatgagaatgcataatccttttatagtgagtggccttagccacagggatgcaggctacctgggctgtctaaaagactctaatctctaagtgataatttccagaaagttcattttggtgtcatgggaaaggtgaaccaggcagtaagtgtggagagccaagcagtggtgtgtggtataggaggaaactgagtggactctggtgagagccaggaggatttggaagctgttgtatgggaaactgtatggccagcccagaatccaaagtagatggcatgaaaaaggctgtgagaggtgggacagattaggcaggcccagcattcacttggtcatagtagcatgaggcctgagatggcagtgggtgagaaggcagccctcccaacactgacctgaccctgacctggagggacactgctccaggatctcatttgatggacagaaactctgtagaagattctcttaccactatttgtttaatagttgtgagaactgaagctcacaaaggccaagaaccttgccccagggtcattcaggagttgcgtcagcagttaaaccccaagtcttggagtgtgtgccctccagggggtggcatccctttgagagtaggaccactcccagggcccattagttaggattatgagtgctagataatgaaattttgtttggtgcagtgtttttgtgtagttttaaaaaggggagttcacacccacggtctgattgaaaaagtaattagtattcagattagagctttccaaacaattccctgatatttgagcatcaacagaagaacaaagaacactgtctctggtctctgatttacagctgcccgtgcccaatggctctgggcagaaggctataaataaaattaaaataaatggaaacaatgcacctataaattgtgttgcaggaacctccaattgccttttagaggaaatccccaataaaaggctgtttggcaatccatttgagggggaaggggccgtccatcatcctggcaaagtcagtcaagtgaaggacaggctaactcgctggaatattttaagtatgaaaattagctgattccacggaaatccgctctttggtgttatagctgtattggaaggtcttctttttcttttttctcttgttgttagtgctatttttttttccaggtggaataaagctgttagtcaaaactgcagatttcttttttatttctgagtcaaattccgaggttttgattgtagaaagtggtggtggtctagaggggttgggtttgggcagaaagcacagcctcatgcagcctatgtaaaggaggggcagccttgtgtctcatggtggcgctggagaccagggctagaggtgggtgaaatgttagatgacagggtaaggcatgctggtagaggagacatcttgtttgtcttgattttgtgtacttggggctggagtggtggctcagtggttaaagagcgctcgctgtttcttgtagaggacctgggtttggttctcagcaccttcacctggagcctcctaactgcctagaactccaggcccaaggcatctgactccctcttctggtctctgtgggcactacacagactcacagtccacatacatgacttaaaaataacaacatgaaagaaagcttgattcttaattctttccttcctttacttcccagtagattctgtaatgtgtgatgcaggaagggatggggcagggaaaatggtgtggactggttcagttgcatggagaatggctgcgtgtgtaaatggggcctggggacaacaaagcatgcatgcagtttgagatcttgtcattccaggagtgggccctgctgcttgctggcctgtgctggttgggaagcctagcctccgtgcaatttggagctgtctggctaatgaaagatgatctgtttacagcctgatttatatgtatgatgagcaggctctggtccccatattctcacattaaagcacgattgtgactttgactcggccaagctctttgggagtgttactgctgatggccacagggcaggttccatcttaaggcttgtagtagtagtctctcaggaagactagtcctgggacaacctgaagttgaatcaaggcaactgttcattggctgtacaaggtcagaaactagatattaacccagaccagcagctccatgtcccatactgagctgtccagatcctcaagggctatagaggtgcaggcacccacttcagtgagtgagaaaggtttgtgttgaaaggagggaagagccaatctagccagactgacaaggagggaaggtggtacaggcagagggtctgggcttcaatgggcccacagattggggaggagtgttgaagtcgggtggagtgtgaagagtctggggaaggagcagctgcttctagcctgtggctcctgaccattgcacttcatgggtgagctgaggttcaaggatttccggcagggggagttgggttttcatccctgttcatccctggtctttgagtaggctgagccccagcagaggagcaggcccaaagctcaggtctagattcaggagcatgcacacagatttaagcctcagagggagccagagggtctgagggagggtcacatggatgtgacagtgtagggtggggatcaggactcatcccatagaggagagctgtgtgctagtgtgggagtctagcatttggagagaaaacttaagaatgcacagagaaggaggtaagaacttatgaccctgaccccaaagccaacactgcccagtgccaaaaacaccccttcagcttttgaattctgttttcttatttttggaaacatttatttagtatacattcacatgagtgtggtccatggtgtatgtgtgtgtgtgtgtgtgtgtgtgtgtaggtcaggttctctccaccatttgattctggggattgaacttgggtggtgggctcccttgcctgctgcatcagcttctgatttcagtcagaagtaaaggtgagaacacaaagaagggctagccaccatgggctgctgacccagagcactgaggggatcacgtggctgatcggggcagggaagagaggctttaaagcagatactgtcacagcaataaaaggcatataataggggaaaggggcagggctccccagtgatcgaagctcaacagaggactgtgtttgtaggaattgcctagtggagttcaccacgggacctgtccttgagccttataggctgctacacttgcagacacccccacctagaccatgtgtccttctagcagccccccaaagcaagtgccctctgaggtcatctttccattccctatatacagttcgtggccttcacagatagagcgtgagcacacagacagctaactgacttcactggcttgggagacagaacctgactttgaacacttacaagcactgccttagggaagataaacaggagccttgtagcacctgtgccgtgcatgcgtcggagagatcttctctcacacctgactggcagagggggctgcaagtggaatgttttacttaccggtcctcttgtgctgttcactctttgtcaacttgacgccaactctagccaccctcactttaggagtttgtgggacattttcttgatttatgagtgctgtaggagggcataggtgctaggtggcacaggaaggaggctgaacaggcctcgggagcagcagcagcctttgggattcctgtcgatgctcctgctgggttcctgtcctgacttcctcactagtgcactgtgactgggacatgcaagccgaataatcatgtgtctcccaagttggttttgattagagcgtttttttgccacagtaatggaaggccaactaggaaactccaagaagagctttctctgaagctactcagtgaaagtacataaacatgactacctaagactgcaaggagaacagagacatgtatgaagcacacgagtgttctagtcacacatcccacagcaatggaggcctacagaaagggtccagtcactgtgctatagaagctgagggaccagtgaataagactttatagtcgacgcaagaaaacagaaaacaggggcgaacaaagtgagccgtttaacaacagacagaaacaaactcgagagctgtagctaagcaatatgactgaactaggaagtgcgtcaggagcttcagcactaggctcttccaagcagaaggaagctcagacaggctgtgtgcagttacccagcaggagagtaggaatggtaagagtgaagtccgcactggggctccctgggcctgacagtgaaccgataggagaaaagccacagaggcccagcgcgctgtaaagagatgctcactggaatctctctggctgaggggagacaccaaaactcaagtccgctgagcctcacatcattgatatccagagagaattttgaaagcagaagcaaaaaagcaacttgtcctctacaagagagctttataagacttaccagaaggttctcaacaaaaattgtgacctgagtccgaaaatatatgaaaaatttcaaaatatatgaaaaacaaaccggctagcccaggataccccatgctggccaacccgtctttcagagatggaggtgagactgggattttcccagagaatggaaagcggaggacgctcatcatgtggcctgcttttaggacagaagctccagggagttcaccttgagtcagcagagtgagcaaagaggaaggctatcacagagtcatgggagttctcttgtggtgtagagtgactgcggagcctaaaggagctggaaggaactatgggacccagccccttcctctctgactttggacagagtgatatactgtggggcacactgtgacataccaaggcttccactgtgagatgttttctatgctgtatgtgtgtgtgtggtttattttgggaggttggttgtaagggcgaaaggagatgaatgggactggcctgtatgatgtgaaactcacaaagaatcagtaaaaagttaagaagaagagacgcatacacagcaagggccgtgcaggacaagaccactgttcgccccgagcctgatgatgagacagtgaaagcctttcctctaaagtcaagaacagtacaaggattcaccactactgttagcacagcagtgggaacactagccagtacagagagagggtaaaggagaaaagcagcagccccagccaaacccagggcctctaaccagaaaggaagcagccaaattgagtgctacacgtctatccccatctgcccatctctagctagccctccgtcaatttggggatgcatttcaaagcgagatgtgtatgttaatttaccccaactgcagtgtacatgctgttggctagatacagagtttctggagaaagtaaacattacacatgaaacgctcaatctccagcacaatactcacttgatgagtttacctcgcaaacgtattgagcctagccagtgtcccttctgcaagtgctagagagctcttttgcagcatacagactaggcaaacagaatccagtgagtagccttggtagactggcatggaaaggaggggtgagtgtcctgacaggcatggttgtggggaagtgcacagaggctgtgcagcatgaaggaagcctgtgtgctaacaggaaagcagaggaaagaatagcgggacttgggtcctgattctactagaccgtggcatggctttagttcctaggctactctctgcaaaccaaggcacttggctgggatgtactctgtcccacacactcaggggaattgttatgtccaaacacttctctcagcccagtccttcacctttgagccagttcttaagctttctaggttttagcttctttgtgtaggacatcgtctactgtggtgtggtggccacggggtccagcacattctgttatttctcactagaatgagctaagaacaccagcttctctgtgccttaccatcctctcctgtcagatgggaataatggtaacacagctggttggataagttagggtaggtagtgtgttagatagcggtgataaccttggtgagctgtgctgggaacagctgctatatgagatggtggtgctacctgctggctggttgaattgggaacaggcagtgtgttaggtaggagcaatgtccttggttggtcatgctctgagcagtcagtatatgacatgctggtgagatacctgactggttgggttactagcagcccctgactccagaaagtcctcagggtagcacttacacgctgctgtgctcagtgtatgcagtggtttagtatcattgtatgaaatcttagtagtgagaatggagccaggcatggcggtgcccacttttacacctaacacatggaaggtggttagaggcttgcctggtctacagcgtgagtaggcacaatgtggctgcctcattgtgttttctaggcagcttagcctgggtgttgagtgatggagacaccgttggccttcttcccctctttctgaagcatggggctgtgagttgtgggccatgtgcatgttaggcgaatgttctgcccctgtgctgtgtcccccgccgtgtgtttcacagtgtcactgtgaagatgcttatgagctcgcccgccctctgcagttactaagcctgcgtttgttatcgccacacaggagtccagtgtagaccaggatgccttcggtgaaacaagctgccgtagggatccctttgttctgtgtttagctcctagggacttttgggatgctctctgaggagggttgttggatccattatctgttttgagggcatcaggcaaacagagctgtgttacctcctgcttctctgggatgacaaaggtcaagtttctcttctattaatgaaagtgagctgcatctgtggagctaattcacctgcgaacagacactgacaggcagccgcgaacaacaccctaccttctcacatgatctgtaagggcagctgctttcaattcatcccataacagatgccagttccctactgtggtggggcaagggtgttaagaaatctcaggctggatgcaggtggcgttcagcaagacatgattccacagtctctctttgacctgtcactcgcagaagaggacagtcttgggctgggtgggctggcctcactgtggtgcagatttgagggcagggtgtggtgggtgtggggactggactcttactcaatccttctggtcctctgggcagagtccactgagaatcatttctgcacctccctgctgttcttaccgtacttaactgcctgcaggccatgagtcgtcgtcgtccatgtgctgctgcctttccctgtctctctggtttggagaggtttgcatgaacagctctagtgaggtgactgctgagagtctgcgtggccccttcatcttggtgtatccaccctcagggcttcataaacacctcctctgtaccatgtaacagccatgggctcaggcttcagatgggcacatttcaaaggtggttgggtatgagaactgggagagtgatgagtggaatagacagaccagcagtacagctcagatgggatgcacaggccaaggctgctaggtaattcctgaacagggttggcctgagtcggatcttccatctgggcccctataggatctgtagctggacccatgcgtgcgtatgacagtctcagcatccctttgggcactacagcagttgatgggtggaaccgcatgttgaactgtgggctgggaagcactgtgagcttgtggctcttaactgaccctggagtggacagcagcggagcatgttgggttagacatggtcatagccttatccaggggtcaccagtggccaggtcttaagttcttgttgcttctgctctagaactctggagaagacagctctgctgggccggcagcccaggggccctggtgtctaggactctgtagtcttcggtttctgtgctgtctgcaggcagtagttacctgtgtcaggagagggacactgctgagagtaggaccgcccttaattttctgattagtgaagaaaagacccaaacagtgggatactgaggtttttaatcaattgtttccggataaatacccaactttctctcatctcagctgattggatcccatctttgtgttgccgactgacggatgtctgcgctcaggcgcaggcttgtgtctgcctgagtctcagtcgtgtacatgtattctgaataagccttttgttccattgagaagattaagggcagtatttggttgggaaaattttaatgaagcacctaacagggctattattcatttttgaaacaagttgctctggttaccatagtgacattaaaccttttattaaatgttttcctttcagccttgagtaagtttttgggaaatgctggtgggggagctgcagatccatagacttggcatctggaagggattttctggctctgccgagttaaatcattcagggaatttatgttataggaacataaagcttataaatctagtttatcatatctatcatttaattgttcatgcaagccagctcttcatgtagcgatttacagtaatctcagtgaaataacagttttgtgtcacaaatgaataatgcatgcaaagaaattgttgagctccttaaaatcattatgctcaaaatattaggctcttatttgaaagtgatagagtgatgatcgcgtggaggctgcaggctggggacctcggagtgggtcgctgtcctcaagctggggctccggctcccaggaaggaagtggcgcaaggcggcttcggaatgacctagtgtcttgccgcagttcctgcttgcagcagccagccgggaactggcagtgcccggcctgtgggtgggctgggggtgttggctcagggggaacattctgtgtttaaagcacgagaggctgcttagacattcatctggctgggacaagaagcgcgtcatgttgccattagtgctgttgccaggccaaccctgcagagtttgccactgagggtctgcggctgggcaccttgctctttccttttcccttatgtgtttgccagcagcacacatatgccacaggtaagcaacgctgtcagatgccaaggtgaacggcagtcactgctctgatgttcagtggggaggacgccttgaatgtggctccttgttagcagggccatccatcccacgtgtgcatatcattgggctggtgacagcctccttatcaggacattagatctttgaatgggcacactaagaaatgtggatgatcctggggtgcctgggtgtgagagggaggcagctcctcaccagaagggggaggctctgctgctcaggaagcaggagttttccagaacgagagcatcatcagtcattgtcagaaggcctgtgcctcctttaccttctctctcgacttaaaaaaaaaaaaaaaagacctgcgttatgaaaaatttcaaccacacacaaaggtcaagagaacatgcaatgaagccaggacgccagtccccgacattcagcgactgtcagttgtggccacggtcggctcatctgtccctcttttcctttgctggagtatttcaaagaaaatcccagacatcatgtcatcttgcttccctgtacttcagtatgcattaaaaaaacctctacgtctccttctattttcagaacatggtgctgccaggagcccctcagacaggcctttctgagcagagactgtggggacacagcaggtcaggcctgtgccttcctcacagtcagggactcgtgtggtcttgggctgactggaacttgggctgaggtctcaggttgacagaaaccattcggaaggaatctaatcgtggcttgagtggcctcgtggcctagggacatgccgtgtgttctgaagacttagtttgaagaagagatgttgcttaggagcccaggagtcagggtgacttgtgctggggtgtcctgttccatggttcctcggtcccacagtcctgctccaggatcccatgctcacgactcatcatgggtctcgggtgtggactggctaggtctgtcttgtgtcttcttttccttcttgtggccgtggcgtctcctcctcctcctcctcctcctcnnnnnnnnnnnnnnnnnnnnnnnnnnnnnnnnnnnnnnnnnnnnnnnnnnnnnnnnnnnnnnnnnnnnnnnnnnnnnnnnnnnnnnnnnnnnnnnnnnnnnnnnnnnnnnnnnnnnnnnnnnnnnnnnnnnnnnnnnnnnnnnnnnnnnnnnnnnnnnnnnnnnnnnnnnnnnnnnnnnnnnnnnnnnnnnnnnnnnnnnnnnnctaccaggcactgtgattcactggagtacaagtgcgccccctcattcccgatatagaaaatagcatttcaggcatttcaagtttcaattccaagttgacatttataaacaaaacatctaaaaagcatgttaaggtccagttctgagggaccttgggaaacagtttacagactgagagcaagtgagagagccagaatgagagtgagagcgagaacacgtgtgctcacaagtgtgggtgtctgtataagaaataccaaatgagaacttccccggccacctcctcactggcgggccttcttcctgggtggcagtcttgtttcagagtggggtgagagcttgtttgttatttgagggatggctttgtcacggagggctttgctcattaggagtggcttgatacatttcctcggtattcagggcctctgatattttcactccttcagacagcgtggaggagagacttgacaggagctcttgagtatcctcatggagttagggtctgcctaggcccctgccgtgtaaatctcaagttggcagctttccatcagggaccctgagaaccacagggctgctgctgtggagagaccgtgcttgtgtagctagctggggttcattctaggcccataaattggcctgtgattaactgcagtggttttaaaagcaggctgcatgtgaattttaagtaatgcctcattgagacagctacttgagaacaggccatggggtcctcagagctgcggggtgacctggggccagggtaactaaccactgctttgcagactctctgccagcactgcagacagcaaagccaagttgggttctttgctagatatttatcacttctttctccatgacagggcctttcggttgctgtagctagcgctgtaagatgatgtttatgcttgttctctatattactttttattgtggactatttctgttgtaaacagtcataaatatgcttacagttttgactgcagtatgacatgttgctgtaagtgttcacatacactttgggttacagggctgagcagttttgagttcttatagcatttctcctggtgtgtgttagtctctggtaacagtgtctggtcccttcctttctgaaccgttggtcatgtcagggtctgtggcctctgatcccattcccctctggggcacttccagcacacccttggccttcaccagcctggtgttgactagtgcacagtccctgagatctttattagggaacagctaggccagctcacgtgtccatcaggcctttctcccagcctggaatggctgttgagagaggctgggcagtgggcagtagcagagaaaacagacgagcattggtcatgtgatccagcttacatactcctccaggaccactgtattcttggacatagagcagctgtgattatctgtttcgaatttctgtgttatgtaaattgtgtggcaataaaagagtttaaattatgtgccttttggcacttgtcattggccatgtcctatccctcagggaggttttggtttcttgcatgtgagggatggtattagatggtaagccctaggtgggaagattaaagatagtttcagtgtgttgctacctgatgctaccttactggttcaaacctgggctggctatctctatggcctcttatgtgtccctgtgcttgtcctggagtcccttctgttaccccagcagagaccccatcacaatgtgaagatggttggcttgggctgagtacagagccagcatgggttctcctcctttggagggcgaaacctaacctgtcctctctgcccatgaggcaaaatgcgagtctgttgagctttcccctgtggccctcgatgttgaattagaacagtgaccagaagtccacagttcaccacagaggggatgagatatgctctgaggaggaatcagaaatgtagattcagatggctgagtttgtggctattgactgggtagcgaaggggccaggcagaaggagggcattgcttagcatagagcagctgctgatttctggcctttgtggagcgcatacttttcctgcctggatgtcaaattatagaaatgggtactcgaaagagaacagtgttagcaaaccaacagggacttcccagaggccttcattttgcatattcagtgttggaagtacgcgcttggatgggcttctttctaaaggatgccttgtctcaccatgtggggccccagggatgctgaagtgccctccccacaagccaagggcaaagtcagtatcagatgtgtttcctgtacactgagtgcttggctctttgcagagatgctgtggatgctgtgtggtctggcatctcttgctgcccaaggagaggagggtggcggagagacaagggtgccttgcctgaggccagctctacctcatgaggctggctagattggagcaggacctctatctttttaccccacctgagctcctagggttgtagctgtcttcagtgatacgctgtgccactttctgggaatctggcttttattcccactttgcagaaacagaaaatttgaaggtattcaaagaccttgggtttgcccagatgttcttgagagatgagctggagccaagaagtcagttcagtttcctgattcagataaaaagaaactgctcccaaacgtggccatggattccagcagacatgagtgagttctcactggcgatggatggctctcaggccagaactggccagctagctccctgtctgctcactgggtacttctcagtctctctgcctctgagctcctctccccattcagcacatcttgaaaagctttctctctagacatctgtgacatgtcttccgggtgtcccctccccctgaatgttccagcgatggttccactctcttctaccctcacagcacacttactaaggtgagagtcatgatttttctttcaaaacctctccattcggtgtggacatttttcagctcttgggctctgcccattgatacccttctggagaggacctctgcctcgctgctgactcgttccatctgaaacaaggccagtgcagtgtagagggcttggccttgcgctgagagtcagcctctcctcatctgtaaagtagggatgggaactgccttgcagggtggcatgtcatcactgggaagtgacacggcagtgctcatcgtgttagacttcccaccacagggacagacactcttgagggacatatttatttgtgttcatgttgcattgagctctgagaacaatatggcagttgaagcctgtggcagaggctgagggaagcagagtggagtcagccggagccaggcgtgtgtttacactctccagtatgcgtgtgatgactcttttagtagagtgatcaactgactagggcagtgtctgtctagtcattttctaaagctcatcagctatcacagcggcaatgtgtgaagctgcagggacattgcttatcagttgtgttggcaggtggccgcaggccttccttttctctgtcctccctctttctcctcttattcaggttaactgcctttcctttccttccttccttccttccttccttccttccttccttccttccttccttccttccttccttctccttccatcctttccctgagattcttgtaatgtagtaacccaggttaagagtcctcctgactcagcctcccagcttctgggattaaagatatgtgccaccacacccagcactagctgccatcttgacctactctttacatggtaggtgtcactggtcttttagggaaaagtctgatggcctttgtcaaatcttcccatgcccattatagtgacagccaacatgccctgttctttcacttgctggccctcctctgcgcacctgggcttgcccttggtcagagtttctgttgacctggggtcatttttctcaattctccctctcctttgattccctgtcctctaaggagggaagtcacatggaaataggacctccccctgcaactttcagtcttcctttgtttccagaacagagcctagcttcttgcctgttggaatagagtcctgctcatacttctatacagcaagaacctggggtccggactgtgcctattgctcgcttcacatatgcatgactagtagctattaaagttgtgttacaataatagaaggctctgaggacagagccacaaggaggacacagggtggggcttagtgtttgtttcttttctttccagtttctgtgaccccagtgtcataaggctttggatccttgtggcagctagattatttcctgatgcttgcacacaaactggttacctcttgtcctggaatgactgcttactgtgtctcaccttgttggctctgaacagtgtgtcacatggttacccatctactagccttccggggcaggagctcctgtaccctatggtggtttgaatgaaaatggagtcacagggagtgtccctattaggaggtgtggctttgttagaggaagtatggcactgggagtgggcgctcaggtttacaaagctcaaaccagactcagtgtcacttctcttcctgctgcctgctggtctggatgtagaactcttggattcttcctgagcacaatgtctgcctgcatgcccccatgcttcatgccttcactataacagagtacacctctgaatctgtaagccagccccacttgaatgttttccattagaagagttgccttggtcatggtgtcttcacagcaatagaaacgctaactaagtcaagcctttatttcctacctgtctcatgagcccacattctcaggaagcttgtgaccagagtacacactagcgtggagcaggtcagctagtacgtgtacagtggggcacaggaggctcctgtgaagagggggcctcactaaagcactgcttccaccagcaacagtgtggttcccacagagtcactctttttgggtcactggtggacttctgggtgggaacctgggacagacagtgttttaaactaaagtactctggtgccaccctgagcctgagtctgcttggtgagttctgggctgacggatggcggctctggccaggtcctggcagccccagctgtctccttgccacctgagctatctctcagagcttcacaggtgacatcatttgtagggactggaggaatctgttgctctgcctttgtaatggcattaggtacttatctgaagttaattggcttatcacagcaaggctgtctctggccttcgagcacatccagcttcctgccagcagtcccttcagtcacatgtggcatccaggacatgtgcttcccagccttccgggtagtagaagtaaaacagtcagagagagtccctctggagtgcccggggacacccctgtccttccattgctgtctagggcttttggtttgaggtgcttctgcagatggtgtcaggatggcacaccagcacgagagctggtgtgagagagcgggtgtggagggctggggtcttaaccctgtacacagacaggacaggagctgggttaggagcctacactcctgccttttagcattgtgtgtggtggcatcagtacaagggtgcacccagccgctggtgctgtcgtcacaggtagttcacctctgtggagcagggctaagtacaacactttcagttcttcttctcctccgccttccctgtctcgcttacacacatacaaatattataaatacacgatattgtatgctgaaattcctaggaggcccagggtctgtcttcaatggctcttaccggaaagcacaaatgggagtctcaagcttctaatttgtttgcaaggatttagatttttaacatgaaatagcagtagcctttcctttaattaaatgccatgcagcattggctgtgagatcaatgtattgaagggaaagccagtgtaattagaccttgtgaagtgactaacaggtgattagggctcttgcaggctgggaagagggagctgattcacaaggcccctcccgggtttgcactttgctttccccgccccttctcctgtcttttgaagtccagagattctccttgaccatcttgggtgtgttctcagatacctcttgagtagcaacactcatttaggatctttaagataaagaacacccctccaaaataagtgtttcacctttataggccaggccaaatgggaggcctggaggccacaaatggctagagctctgattctgcactgtaatatttgcatgtgtgtcggggacagagcgggcatgggagggaaggagagtgggagaactgagaaagaaccaccttttctaaatgtgctgccatgggcattaagggtctctctgtattgtgcatgattccagagtcgcagaaacaaagctattggcccaggggtgggaacattttagatgattctggcatgtgggttagaggaaccttccttccacagagattcactcaggatcacctccacccacctacctctgacttggtgaagggtggagtgttccccgagttcctctttttactctgtactgtctgtccatcttgtggctagcctcatccacatcctgatggctccttccatcctgtgtgggaccagccctcctctgtctggaacaaaagctgcttgccaaagcctggccctatacctgctgttgcaaagctcccatcttctagatctccctttctgaggagatggtgggatttgaggggtagatcacataccacacaatccagcatctaaagtgtgtagttcagtggttctcagtgtatgcacatgagcggagctgtgcagtcactgtcgtcagtcttggggcattttcaccacttccctaagggaatatgtgctccctagtgtcattccccatatcccacctcttcttgcctcagctacatagccacttgtttagatttgtctattgtgagcacttttatgaatgaaaccctaagtagatggtctttgcagactggcttctttcccagtgtttccacagcctatcctcattgccacctgcagcctttgttaatatattttggctgaatagtactccattgtatggtggtttggctgtaccttccaaagatccctgtgttaatgtttgctcctctcagcctgtggtactttttgggtagggtacactgaaccttaaagacgtggtacctaccagatctcatggtccatggagcttagaccctccaagggaatgtgaggaccccagccctttcctttccccatctctcagcatggctgtgaacagttctgtgagccagtgacccttttctcttaggagctggttgtcttaggggttgccacagtggaaagctgacaggcgtggtgtgcaggctgcagtctgtgtgtccattcattctctgatggacatggatgtttctgcatcgtgtcctgagcagacggtggtgactgttcagatgcacatgtgtgtaagccttgtttccggtgctcttagataggtattgagggtgtctaatgtgccgaggactggcagattattttctgttgtgccatttttcacacttatagtagcgcaggagggttctggttttcctgaatttaaaaattttagcttttgcttgtgaagtggctcctcctgtcagtgtgattttgagggtcttttcatgtgcttattggctgtctgtatatttccatggataaatgcctcttcatattcttttcattttcaattggctgcatgtctgcttattatcgacactcatggtatttgctgtatttttttcttttcagtactgaggtgtggggggtcacatcccaagctttatgcatgttgggcacacactccatccctgagctcttggtcagtcagctcttacgtaagcctactcctgacatttagtaaaactcttggctgctgtgaacaggtcctaaaggttgggggcagcaagaaagctggtttgcaggttatgtggtatctgcttcctggtctgacagccaagacctatgagtagcttgggcagcaacagctgggttcggggtctggtgtcacaggctggtgtttagcagtcacaagcaggtacttgtgtagtgtccttgtctggacaccttctagaggcttcctcccctggtacagaggaagagcagagagagaggaggctcttagcaatgacagcagagggacgattctaggagggcttggaagagatagttttagcatccttgctggtaggctgagaagagatggggcatctaggagaagtgacacagggactgtttccctatgtggcccccaaagcagctttatgtcaggaggatttgttccctactgattaaagcatgttcttggtgtgtacagtattaaaaaaagttcacagtgctgttcaaagtagaaaagcatcaagtagaataataacttatgacagaaaagacttcctggggcacctgcctggtaggtaccagcaagcaggacagactggcatgtttctagggatttacacttgagtcaccgtagtttgtggcagcatagtgtccctgctggtgtctgccctcttgcagaagagaagcctcttgtgggcagctagtacatatattattattctgccatgaagccttgggcacagcccctaagtggtcttgcaagttacactagaggcttcctcaggtaaagtggctgttcaaaggttttaaaaaatctgatcaagtagaagttaccccagtctatactcacagcagactgtctgagagcagctgtgtgcccagtcctttgggtgttatagttcatttacaatttaatccaaccttattgtggagggtttcttattttaacatgtagttcttgatgatattcagacttttgtgtcctgcttttgtgtagctactgctgtttgttctggaaatcttcatttttttccctctgggctcttcgccttttaacttctgtatgtgctctttatgtgtgaatactgggatcctttccatgtgctacatgaaactgtcaaacctgccatcgctgtttaataatctaggtcctttcactgtaaagttgcctcctgacttgtatatttagcttattgatcttcttatttgtcgtttctgagattcatgtgtcattttggaaggcctttccccattaaaatatagcagaagattctgttcccttgcacacagaagcagccaggctggccacatttagacttggtatcattcagaccttgcttttgtggtaagatccagactctttgtagaagtaggtgcagtgtcctgtgaatgctgcattatcacatctcagcgctcatgtgtgcacaggcttgattttgaagcatttttcctgcctcatggggctctttcccataggctctcacagaaggctcctgtcttcatgcctgtaactctgccgtgggttttcttaactctcactgtgaatctgtttactctgtctgtctgtctgtctgtctgtctatctatctatctatctatctatctatctatcgacaaagtttctctgtgtagtcctggctgtctagaccatcttgactttgaactcagagatccatctgcctttgcctcccgagtgctagggttaaaggtatgtgcaaccatgcctttatttttttgaaaacatttttagagacatgtttttattattttaaattatataggcgtttgtctgcctgtgggtatgtgcacatgaatgctggtgtccgtggccagagtcacctggtcctctggagctggagttccagatggttgtgagctattgatgtgggtgctaagaattgaacttgggtaatcaccggaccatctctccagctccacagtttttatcttatttattgtgtggtgtattgtgtgcatgtctgtgcatgtgtgtgcacatgtgcatagaggccagaggtcaatgtcacatttcttcttcaaaaatttccacttattttctgagaaagagttccttactgaatttggaattcatgaatttgtctggcctagctggccagcaaggcccaggctcagcgatccttctggctactactcctgcctagcatgctgggatcccaacatgtgctgctgtataggtacatgggtatttgggattggaattcagaggcttgtgtggcagtcactctttagggagatgtccatctccttattgcccccacccattattattattttatttatttaaagatgtttgaaaaatttattctctcatatattacatttcaaacatagttccccctctccctccctcacctcccacattatttttacgaagaattttattggctttctttttgaacttgccagattctgggatacatccagcggagcccatggtgattttacttctctttgtattaaaactacattttcttttgagtgaaaattgacataaatttccggtctgagacccactatctatctaacctggtttgacttgttttgcttccctgtttcttctggccctttgtcttgagtggttggtttagttatggctttggtttagttatttttgctttggctgggaggtgagccttccccagtgctaggcatagaggccgtatttgttgttgctcatggacatggtttcttcagctctggttgcctgcctaccccagaggaggcacgtgcctgtctccatgctcttccaagggaaagcctgcaagttagcttcctcacatggcctgtacacttttttgttttgtctttgagaaagagtttccaagtgtagccctggctgtcttagaattagtgttatagatcaggctggacacaaactcagagatctctgcctctgtctcccaagtgctgggattaaaggtgcatgccaccactgcccggcttacctgcagtttttaggttcaggcccttcatagttttctcttctctgtgacacagggaaaagctgttgattttggcaagtctgtgcacgacccatcctaccctacatttcctgccttgttcttgcttcttcctctcttcagtaggttgtagctgctcaggtcgatgcttttaacagtattcagtctcatgtctaactgggacactgtcagatggagagagagagtggcttccaagggattccttaggagtgaggacttggttggagtcctgagcaattgtgctattttcccagtatctaagatggaccccagtcccatggcacatcgaccacagggagggggttagtcatgcattagtacctcacaggccccctctggaactgagtcggggtgtgcttggccagccactcatcacatctcagcatttcagtgtaggcctcaggagttgtaggcactttgcacaggcaacattcttctacagagggaatgcatgtttgggccatctgtcattgctgagagtggcttttctccaacagtagattcaacacacccattcctgcacccttggagtgaagcttgtgatgtgagctattctttagataaatactgtgtttggatctgaagactttctttgggatctctgtattgataagtggtatttgactgtgctacaaagtctttaagaacaggagttaatacagtgaagacagcttggtatgtattaaagaccaagttacttaacctctctgagaccagttctcattcatggacagggctcacagccttgattaatccaagctgctttgaggagccagtgagataatgtatgcaaagctctttttaaacactgaacctctacaagacgagaactttatctcatgcagtatattcaagactcttgactctgtgtgtgtgtgtgtgtgtgtgtgtgtgtgtgtgtgtgtaatgtggagatgggatcagagaacgttaaccattgtgttttctcagtgctttcttcataaaccacagccagaaaacagcactgtgtggagggagaggctcagcagggaggcagaggtgcagttagcaaacactgttatcagcatttggatattaggtccccattctccctggcgtccttggggagctgggggagatttgatgttttctgagggctctgtgactgcaggttatggctggtgctgtcgtccaattactctctacttattttacttagactttagtaattggaaaaagattagatgtcaggactttgcattttgttgattatattaccaaagtcttctctgtaatcacttctcttattcctggtattaatcatgagctctgagctgctagaagagtctaatagtagatttctaatggaagcaaaggaagcagttgcctttgtcttgctgggactgaagtgtgtggacgtctctacacacccacatgtgctctctagtcccccagggagatcagagaccagcagaaccagggcctactgttcttccccaccatctcatatggtgactttccttaccctctaaggctcactgccatggctgcaggcctctctctctggccaattcatctctggttctctttgttagtggtatttgtcaagacatccaggcctgtgtttgtccactctgaaactctcttatctgtatatctggtagcacacctttgccagctgtgtgaagacaagctcatctcccagagaccagcgctgaggagacaactcagataggagggctggagagatggctcagtggttaagagcactgatgctctttcaaaggacctggttcacttcctagcacccacatggcagctcataactgtctgtaactccagttccagggggatctgatagccttatacgcacatacaagcaggaagcatatcaatgcacataaaaataaaaataaataaatcattacgaagcagtgagtgggcgggagtacaagagagaaggagagccagctgagttatccaaatggagacttagcatgtggaccagggaacatagaattagtgggaggtgaggagtctgggatcctggatgctactgccccagagagaaagggtctcacctggcccagggtggcaccagagagacctggctgcctttgataaatgagtcccatctaaaatttatgcacaaacaggtagtgttctggtttgctttaataaagtggtatgactcgttcattatcttctgtgcatcgaggacattccctctgagatgtttatcatttaggcttactttggttccatttgtggggctccctgccccctaaggacactgatgggatatggtaaggtgctgtagaaccttttgtaaccctgcttttttctctgttctgtttttttcttccaacagaggaattacggaagctgagctggtccggaatcccaaagccagttcgtccaatgacatggaaacttctctcagtaagtctgcacgccagtactcagcctagctactttattcctgtgagtccagtggcctggcacctggctgggggagaatggcttgctggccatggccacgcacttgtctgtcttgggttgcataatgacacaagcctttgctgtgtccaagaaggcattgtctagttttagcttaatttcaaggttggtttggcaagtctggaagagagtgaagatgagcagcggctcgtgacagctgcgctcattcccaccattaaagaatcatgtatgcaggctcgtgactcaggagcttacagcacggaagcccatacagcccagaggaaatgggtatgtgtcagcaaagaaggatcagcagtgctgttgttgaacaagaacaagaggaagaggaggatgaataagaggaaaagagggaaggagaggaggaggaagaggagataggagaggaggaggaagagggggaaggaagacaggaaaaggaagaggacaaggaggtgggacaggaggtgttggacatagcttgttagtgtggtggagagtggggtccagttccctgagcctcagcactaagcagctgctccagaagcccccagagaaagttcagtggttggtggctatctccatgccctcacttacagcttaagattgagagtgaggatagtttactggcagctcgcttctctttttcctttgttttatttttggagctaagtcatggggaactccaggcacctactctaaattgagtctgacttcagtgtttaaaagactttcgtgctaatgagtcgtaataaattttcagttcagtacctcgtaatcctaaatgcagatgcagctctgaacagcaaatatttattgattaaatatctcttgcaattaaggctagacctgccgtgatcacttgcgctctgttttgtggtttttaagtgtttgtagccacatttccaaatgttctctagaaggggttacaactctagattggtttgtaggaagttatgatgtaaatgtctggaagcccctatgtcatagtgttgtgctcattaagaactggctagtctaggtggaaagacttataagaggttcttgccctttccatcacttctgcgcctgcacaagtcatagctgcagtgccctgagctgcttagctgcacactggttgccatgtcagtgggcatgtcagcatcagaggaacagcaggggttgaggtggggtgagtggtggacaaccccactgtgttggtgtggacctgggagtctgtttgcagaagtgctagcgatgtagaccaaagaaaacctgtagggggcttcctagaaacactgaaggctatcgagacccagctgcttctaggaagaggtcaggggcccaggcatgcagcagggtaagtctcgcacagtttggcacagtgtacttgtgaggtgctcagagcttaagtgtcagccaaggggaagggttgggatggtactatggggtggccagttcataggatcagttttgtgaagaggggattttacactgtgtctccaaggccactgtgagtacataaggagggcaggaggctagggcagttctcaggcctgaattgacaggtgagatggtaaattctaggttagtgggaaaatctgctctttgccaaggaggtgtagtatagataagtgggaatgccaggcaagactccttggcatgagcgcaggctcacagtgcatctctgaaggatgccagtgttgcttggacgagggagttgggcaggtcacaaggctgaagggtgcagtaagagtggggctggccagtgacacagactaggcaagtgcttcctctttaagcctccttgggacggcagggtggagggccagggatcaggaggagaccatatgtatggttgatcccagatcctcatcctgaaggacttgagccagggatgtgtagctatttctggaaggagaataacccgtaaaaccattgcttagtacgtttagttatttgctggagattagttgaacttttcgtgtttcagacattatatttggtcctggaaaaggacagggtgtgcctgagactaagtgccagccctattgggtcctgcacaacacagagaaaatgcctacccttctgttacgacacactgcaggccaaggctcactgcacagaaaaggagccatttccctaagaccccgtttctgtgccccaggcacactatgtgccccacttgtcctttgttggttgcttgctgtgtgcaagacaaggtacactcagatttactcagaagctgagttatgtcctccagataagcaagtgattgtcaccaggttagttatgtgcagtgtatagcagtgatggggtgccctccaaggggcatcaggggagctagaaggagtttgagttggggcagggccagttggaatggctgggaaggagtccatggccaaggccacatgtatttgtgaagggagtctggctgctagagcaggcagagcctggctcctctgcagggcatgggcatgggcacgggcacgggcacagtcacaggcaggctattgagcacttggcccttggttctgtgatgcttttcctgtgaagtctggtgcctggaggctcaggacctgcacaggaaagaaagccattagctgggccactggtcagacttggtcagaattggcggggttctttctcatctggaactagctggaccctagagtttgcatgagatgtttggtggcagtttgcagatgctgtcagcttcagcatgtgtcttactgtggccacgatgaaacatcaagccccaaaatcaagttggggagaaaaagtttatttggcttattcttctgcaccggtagtctatcactgaaggaagtcaggacaaaaactcagacaggttaagatcttagaggcaggagctgatgcagaggccatggaaaggtgctgcttactagcttgcctcttgtgtcttgttcagcctgctttcttataaaacctaggaccaccagcccagggatggccccacccatagtgaccccctacctgaccactccatgtctgacaagctgtggtctctttttaacttgtattttactgtcacttgggaggttggacagtactgataccgggacttgctattggacccaggttgaaccccattgttctagggttccaggcagtatggaagacagaaccaggatgctcatgaaccagataggaaactggtctctgaaaaatgcatggccccacggaaggcagttgctcactagacctgacatacccagactagggggttggactgggtgaccgtgggtgagtggggactagattatgaacctagttcaaggtctggcccactagtgactttcctccagcatgcctactgtttgtcatcagcatagttctagtgtttgtggacaagtgttacttttaattaacgagaggaaattcttctgtagaggagaaatctagctgtgtggcttttattctgaagagctctgtagccagggcaccccattaaacactagcgctaatatttaacttttaaattacatgcaaacagcatagaatctttttcaaaattagtcccaaagagaatcatcatatttttgattttttttttaactaactctttcagaaagagtgaacaaaaactaattaaacatttaacatttatgctagtgaggatattggctaaaaatgacagcgaggctccagtatcagcatagcttctttcagtgtgttacagttggtttgcatatgaacgcggtgggagggaacacattgatttttgtgtcaccaggacagtttggatttaagtatctgcatgcattgttttacatttatgattagtgtttttatagcatgctaatacagcaattaagtcttctgtagttctgtcatttaaaattcattgcatacttgaatgtatttcatttgcataatttctagtcttgcttaattatcaagaggcctgcacttgcacatgtgtttttttcctctaggaaggggatggcaggagaatgggtgggccttttatggtggcatacttgccttttagagtttgtgtttcattaagttaacattctgggagcaggaaacctcctgagagtgctcattctgttccctaaggaccccggtagctgtggctgtctccactgtgtttgctgaccactctggtgaccccactgccctgaggtgcagactgggccgggcccttactctggctgttgactgcagcagccagcctttcatctgccaggctctggttgggtctctgctcagcctggacccatttcctgcacgcctccaggctctgtgcagttttccattctttctactgtctcaaccaaaccaagccaggaaactgctaacttagtctctccctgaggccctaggtctgtgtcatctctcttcaccttgcttacattatccattcatccagcaggcctttgctgagtatctgttatgggaccagtgttctaagcccttgggtatatctctgagatgaaagagggagcttacattgtgactggaagagataaaagcacattgggtagggaagttggcagaggtgattgatgagtgctggtcagggtgcagtcctggtgggcctcactgaaaggtaaagtgtgcatctccaaagccacagtgcagagataagtctcaccagggtggagagttcagggggtggggctctctgcaatctggcttctccgtagagccaccttgttccacacattgagcaggggacacaggtgtggcagtgtgtggcctgtgtctcggctctctgagccaggagtcagctggcatccctgacaggtgtgggattgtaggttaaggcagggaagatgttatggagaggccttggcttgagtctgatctcacatatctgtggctctgatcatgccaccatggtttgccaagtctatctccccatctggaagagggagcgttgaccacctctgaatggctaggattaaaggaacaccgaagtgccctgtgcctggtggggctgcaccttccttggaggcccagtggatgggcagttaccatacaaagaataagatgtatcttaagaaattgctattctttaagttcatacgaactgaaactgagatagctccaaggtgaaaggaagtgtggacaaaacctactgcctcgatgggtgtccccggggcagctgttaactggatggagacatacttgtcattatgtctgtttgtaccctacccttctaattttgtgccttcatctcaggggcagggctgtgtccctgtgtctctagcactaagagctctgttgggatgtccactggtgtgttgcaagaggctctgattaccaggtgggtgacatttgggctggttctggtcctattggtgctgcatctgctgtgtgtggcagactgtgccatggagtcttggcagtctcctctcttcattgaaaagaagcagcatctgaggctgtgttttcctgtagaaaacactgtgtcctgaggctttctttcccttgaaagctaacaggtgagcattttatagtgtttgctgtgagttgtatttgacacattagtaacagggctgtggaggtatatcactggtcacctcctgtgtgctccttgggagtaagtagcaggatctgtggtgctcacagctcacatggaggaggaattcgtatcaggaaataatcagatgttgttggccagtgtgttagagatggggcagtttatgtaaatagatgtagaacacatggtgtgttctgatgagtccatggatcacatgcagccatgcactgctcagtccatggatcacatgcagccgtgcactactgtgaactgtgcaggagcagccacacactattcaagcaggcacagtgagctcgacaagctgtcatttacagaagaaggtgtcttctattgctaaatggctgcttctgtaagacgtgtggctgtgattttattttttcattctttgtttttgggtttttgagacaggatctcactatatagttctggaactctctctgtcgaccaggttggcctcaaactcacagagatccacttgcctctgccttccaagtgcttcaaggcacgggcctctatgcctggctatgattttcaagtgcattatatgaacctggatgttgggtaatgggtgttttcctaaaagggccaattgtacatcagcaactgggcctgtctccaagtgagggcctgctcttcatcacaggacatgggcacagcagctttccacaggcaggaatggggacgcttcccacaggcctcacctgcagacctggaagggacagtgacctgactggaagtggacttcatccatgcttgcccttcagccttgctccctgctgggtcaccacagcctcctggggaaggcaaatttcttcctgcgttgttctgctgaatagccacaaagcagccagaatggcgaccgtggcaactttggttggagtaactgtacaacagctttagtctcacccatgtgctcatgggtggctgccgccgctcagactgtctgtattcacccagattcatggaagcagcaaagaaaagccctggactttgggttacccaatggtgtgcccatctagtgtgtcccaatcaatgctggctggaatgtgaaaggatgtcacctccctgggaaagacttggcagttccttaaaaacttctgtctagattctgatgcagcaccttggccccttgctatttagctttgagaaatcagaggtacatacctccaaagtctgcaagaatacccagtaagctttgtttattcatcagtagcttaccagaatggcctaacacgggccatgcagactcattcccaacggtggccaaatctcagaaggcagggtgcacaaaatcctcggttccgagtttgtgtttggagagtcccagacaggcccagtcagctgtagtgagaagctagcactaccagcgtccaggtgggatggtggcaatggctgcagagaacaccgtcactttgggcaatggtaaatgcgtacatggtaaagaccgtctttctgggaacagtagtcaactgcctaggcttaaaatgaacaaagtctaaagttatccatatgtatcatattataagactaacttagaccttagacaaggaaccaaataagacgccacatagaaaagtgtccattttatgtattgaaaagtgccaggacccgcagagactttggagaatacatttgcccccatgacagctctgtgcacatataatcagtacgtgtgcatatgtgtgcatggtttgagtgtgagaccagacaaactccccattccttgtggatgtaagccccgtggagaagggcttgtatcttcattgggtctgggtgtcctgagacaacttttgttagatgtgagtgacttagaactggttggtgacactggtggggcgtgctggtgctgcgtgctgtcccgctgctttgttctgcctgagccattctggacgggctctccatcttcactctcatgatgcacagtaaccacaggtgcctgtgtttcttttcttcctccagggttaccttcctgccaatgttgaccgaagaccagccacgctgcagaggaaacagaaggaatactttgctttcattgagcattattacagctctaggaatgacgaagttcaccaggacacgtatcgccaggtgtgtgtgtgtgtgtgtgtgtgtgtgtgtgcgtgtgtgtgtgtgatctctctcttcactcaatactgcagtttggaggtgatttgtaggggatgtgtttcatctatcaggaacctgataggcttgcagatgcatattttctaacaataaccatttgaaagcaattaatgtcaattggctacctgcagcagatctgacttatttgtgttccttctcagaggtaaagcatgaggcttgagtcaagttactaaatagatgctgagatctgttagtgatgaccagctcctccttgggtgatggttggcatgtggtaccatggtctgtgccctgcattctatagcctgcttctctagggcagtgccttggccccgggcctgatctagtgtcttcctgcagtggattatcgtgtttttactgtctcactgagggttatgtccaggcacatggagctagttagcgatgagatttgcctggcttggcttcctctctgcaggttagtcctgctgatatttgtggccgttcccctattttctcaggccagtttttgatgaggcagaccaggggcaggagatggggtatgatgctaacactgtcctggctgcataagaaacacattgcctgtgatctttgctggtactagaggcaggtcaggtctgcttttcatcttgtaagaggccagcacacacatctgtcactgaagagagcaatatactggtggtagctcccaggatgtcttgctagtgaacctgggcaaccttgttcgtcacccatacctgggctcttacatgtggccctcctgagtctgtttaggtgtccctcagtaagggtgcctgtggagtttctttctgtgcactctgtgtgcaagtttatctcatcttgttcccttgttcgaggactcagactctgactgtcaccagtagccctttgaaggacacagagagcaggtaggtggagaggctgaacctaagtggctttctcttggccacaggctgtagtgtcagagtgaaatggtgaccctatttattaggtgttagctgcctctctgcacatgggcaaggatggaactaaactattgagtcccctttgggtcaaaatatgctctctccctcagtttatgcaggctgtttccatggagtcccagagtgatgctagtgtcgctggtgtggggtgtactcctgggatgtggagccagcctgtggtgccagctgtgttcagagcactcctgttgggtcacctcttaaacctcaccctcaggcggtctccactgtaatgctggcaaacattgccaaaactctcatgtcagatggtgctcacataggagtctgctgacgccagcagagactttcaaatgcttcctttaatgtgtcctagattcctcatggacattgagaagtagaggagaatgtggcccgtgttacagacagccctgtcactgctgaaacagggcactgtcagtgtccttgaatcccaaccagtgtagggctgaaaatcagtgtgcactgatgacattggctcatgctactgagatgctgagggcccactctactcctaatgatgcagtgagcattgctggactgtgaagggtcaggcatgcctgccacctgaggacatcaagccttcctcaggtggagtgtgcttctgggcgcttcctatgcaggagcctggtgacagtcctctcagagcaggttaaaggcaagtcacacgtgtcatcaaggactgctccatcctataagataaacatatgtctctcctgcatctgcagatccatatcgacatccctcggatgagcccggaagcgctgattcttcagcccaaggtgacagaggtaagaggaggctggccggggattctctgctgatgcctgtctctgcgtgtgaccattgctactactcgagggtcctgatccaggagcccccaaagtccataatttgtggatatggaatcactgatggttctcaaaattttttttgatgtacactaaaagttacagcaaaaagaacatatgcagtatgtgtaagagtatttatagtagaaactaatgtccttgaatttaggagttagaacctctccaatgatgaccagctgcctctatgagtttgaaactgggcgtagaaactatttctctatgcttatggttctgctactgcagctctgtttctgtttcctctcacacctccctccaaagaattggagggaatcgtctctaaattgtatttgccgtactttgtgacttcaacactaaggaagcagtgtggtggtattgttgtgtcttgatctgtgtattcctttctttctgcaatttagtctctgcagcttgtgctttcttcttcttgggtagcagtcagggtgaacgttccggctcttcctactgctctgcagtttggacagtgtcactggaatcatcacctccatttatgcaggtatatccctgtgagaattttccgaggctcccaggatgccgtcagcgtgctttctggaggggtctgcagacggggctcacctgaagtgctggaaacctggatttctactccttggcagttcttggaacatggccaggctcctgagctctgtatgtctggcggatattcccatcatgcttctgccgtcactttccttggctgctgttggtcaaagagcttctctgtatacagagatgggcgtcttctgtgtcactgttctggtaaatgcttgttactgactgtcccagcccctttcttgtttttacccacttaaaaaaaaaataagcttgtgatgtttatacatctgggagtctaattctttgccagttatttggtggaacagatttagctttgctgaattgcatgtgatgtcctcttaggttatcatgggacactttctttaagaactctttttccacaacatctgtctggtgaatgctctcccatctgaaagttttctttctgcatcctgtgtttaatttgtagctgatagcagcacctatgggcagtcatcccagtgggggctgtgtaggggcttgagctcatcatctcagtgtctatctgcgccacattcctaggcatccacagggacctcagctctgcctcctgcctcttcgaagttgtctgggtcctcttagtctttatgcaatcaagtcattttctgaatcatgttgctgggattttaaaagtctgtttgatttatgaatgggattgcttggactccttaggtctcagcaggccctcttccactgagctctgtctccagtcctattttagggttatttgagatcaggtctgtctgagttgcccagggtagtcttgaacccactgtgtagcttgcatgcatataccctgaacttcctgcctcatcctaccaagtagctgagatcactgacctgggccttcagactaaggcaagcctttatgaaaggccttatgaatgtcctattagatttattcctaacctttatattcttgtcactaaagtaagtggtatctctttaaagtagacttactatctgaaatactttgtttttcatcattattttcccccagtaaatgcattttgaaacgtggacatctcttgcctactcagtaaagctgaaaaaaaaaattccgacattgctgaagtaaaagtgctcgtagattgtggagcacaaaggggagaatgagtttccctaggagcagccgttctgaggcacttccctttgagtgcccttctcagtggtgtgcttgcagtggctagagacaaggggaatgcattatgacctcttctttacttaagtttttctttaaacatggaaaatagaccttggtgtgtgtgtgtgtgtgtgtgtgtgtgtgtgtgtgtgtgtgtgtgtttctctatagcttgacacactgctcacaaagctggccttgtggcctctggccccagttatgaatcaaagtcactaccactgttgtgtggtcaggccttgaaccttttacttagcatctccctggcagtgggtttgttcagccctgagactcctccagagagaagtagtgtgtatatttagcagttggcagggttgagcaggggctgtgcagtcttcaggacaggtagacccctggggaggagggcagactatccaggctggccaagggtgactgtgggtcacttgagcgtgaatgtgtatctggggatttgaaatgaggagcaggtccttgaagaagcactggatggtgagtcttgtgtcagccagtatgcaggagccacttagatttctggcaccttagaagttgagatgcatatatccatggtgacagcaaatctattgccatggtagcttcatgaggtagaagctgatgactgagtctggagctagttgtttgttagacagttggttgccactgtgtgcttggcttgaacctcagagtctaagcagctgcttggctctcttgttcacatttgcatcccactagcagggaattagaataagacacagataggaaagagcaggcacatctctttaagtcatgtgagttggcagtgtggtactacttgtaacctggtcactttgcttggtgacatggaattactttgctggatgggaactgggaaggtgaagctgggtcctgagcgcagaagcccatgtggcagcttggtgggggctctgtggtgtttcctgaaatcagccattttggtttgtttttatgtactgttatgtgaaagaaattactttttagccacctttcactttttagtcccttcccattttgttgatgaacttgacctgtgacacttagttgtatgtagctagtcctgtatctgtgttgaagaacatattcaagtgtagatgtgccaagttcaacatctgcccagtggcctttcctccacagctgtcctgttgtctgccctctgctgctttagagcagtctcaagggcagaagtaaggttgctgctgtgtgtgatgtcttgttatatttgaacaggcacagaatagtgaaccacataggttgtgaaactgaatttttgactggaaacttggagtggatatagaagccacctgtgactgggaaagaaagagcatcagcctcttctgtcagggtttaaggcttcccaagtggaggtggcagtctccccagatccagatctggtccccatgtgcctaggtatggttggggtgggtgttggggccaggggtcacatgctggtccctgcttttggagtgcagttctcccaccctgttgacaggccccctgagctgctggtgcatctgtgcgtaccaggtggctgaaggtactttgagaccctggcagcagccacctgttccccatcttgccgtggttgtgctgcagagtctccccaccctaagttctgaaaggcaagaacctcatttgatgtttcctagtctcaccatggtctgaaggccctgccagagagaagttgtcgctcttttcactgcaccctgattcttctcattggcttttctttcccatgtgggcatgctgcatttagagcaatgaactgggcatctccacagcctggcaatactggggcccgtgtctcccacatctgttttacccttgtcactttacttgatgtcttagttatagttcttttgctgtgagaagctaccatgaccaaggcagcttattgaagaaagcatttaatcagcccgccttacagtttcagagggtggtgagtccatgatcaccatggcagggagcatgacagctggcaggcaggcacggtgctggagcagcagctgagagaaggtgtgagacggcctggtgtgggcttttgaaacctagtgacacacttccttcagcaaagccccacatcctaaccctttcccaacagcccgccagctgggaaccaagcattcagatatactgtggggctattctcatccaaaccaccacacttggtgtcatgctccctgcttctaatttagagatggggccacagtttaagagtccagaagactcttacttgctgctgaatcagttcatcacacttttctggtgtctcttgggtaggggttagtctatcatttatgttcttttctctgtttttgtggcaaaaatgtcagatcagacggctacctttaacatatatgtcatatatgtcacatcaaagagttttaatttcaggtcctcactgtcaggcacaagatagagaatagtgcttctgaagttccttcttgtgtcacaagctcttctgtatgatgtaagtaacctctgtgattatggtggctctccagttctttgtcatgtctttaccagtggcacaattatggactgcccttcttgatggtagccattggtgtctgatgctagcagtgtgctcatgtggggtgctccttgcccttagtgagtgctccttgggcagtgcagtcctgagtgtgtctgtctgcctgtcatgatggtggatgttgacagatggtgccatcagtgtgctgactagagtgtttcactagggtggttttgctcatctgtaaagtacatcaattgtatttacaccatcatcacctgcttacctgttccctagtaatcgcacttttactttctttaaaaaaacctactaattaatataatatatttcactaaaacatttttacacatgcaataatatactttgcttgtgtttcctgccattaattatccttattttccccttcttctattcttttcttctacttgtactattcccccccacccaatactcccttccagtcttttatctctttctgtctctgtgtctctctctgtttctctgtctctttttctctgtctctttttctctgtctctgtctctctctctctctctctctctctcacacacacacacacacacacacacacgcacacaggacatgtgatactcgtttgagtctagcttatttcacttaacatgttctgcccattttcctgtagacagcatacttttatcctttgtagctgagtaaaacgtcattgtctacatagagcacattttctttatctacacatctgttaatggatatctggggtgattctgttacttggctgttgtgcgtagtgttgtgttaattctctccagctaactatccagaagtgttgtcatgggatcatgtgacagttctatcttgggtgctttgagggctctgaactgattttcacagtggccgcaccagtttgcatccccagttgagggatgaagtgctcctttctcaccagcgttagttgctgttttaaaggtgagatagactttaagtgaagtcaggattggttatgcccctcatgctgaacttttgatgacatgtttattgaccctatctctttgctttgtagggacctatgtgttcagttcatttgcccatttattgatgggatgagtttttggtgtttagctcttcgtggtttttgtagattgtggattcccaccttgtcagatagggaagacctcctcctgtctgtcctgcaggctgtctctgcagtctgccaagttgtttcctttggtgcctcatacagtcctgcttatcagttcttgctgaggtgtcctcaactgaaagccctatgttttcttctagaaggtcagtttgatgtcttattaaggtttgtgatccattttgaattgatttttttattaattgggtgagagatagtatctaagccatccttttccagtggggtagaaaaaggctgtctgtccttctctctatgcttcggcacctttatggaaggtcaggtaggtacagctgtgtgggtttgtttgagtcttgtgtccccgtggtctgtgtgtctgcagttgtcgttagttagtaccttgctgttttggttcctgtgtctctgtagcgtagtttgaggtcaggggttgtgagacctccatcattgctccttttctcctggcttgctcttctgcacctccatttctggaatggctcccatgtggaaagtcaccatgggccaccagcagccatacctggctgctgtctctcaggatttcccatgcgccgggctcctttggctggccctggctcccttggctggtcctggctcctttgactggtcctggctcccttggctggtcctggctcctttgactggtcctggctcccttggctggtcctggttcctttggctggtcctggctcccttggctggtcctggctcctttggctggtcctggctcccttggcttgtcctggctcccttggctggtcctggctcccttggctggtcctggctcctttagctggtcctggctcccttggctggtccctttggctgttcctggctccccttggttggtctgtctcttctgccctgacttggccttgattactgtagtactgagtctgtgggccaggcctgggctgcctgttcctggttatgtttcttggtcttccttgtgtgttaaagtgttaaagtcagcttgttaggtgttgtggactctcccaatttgagttgtgtttgctgatcgggttggagggaattaatgctttgtttacttagtttttgtctttattttttttaagatttatttttattttatgtatatgagtgtttggctgtaccacatgcaagcagtagcctgccaaggctagaagaggctatcagatcccctgcaattagagttatagataattgtgagataaccccacccccctccttccctccctccctcgcccagtgctgtgattctggtcattctccacggaacttgacttctttttggtgggtgctaggattctgaactcagggcctcatttctgcacagcaggcacataacccacctagccctaaccaggctcttgatttcttcagacctgggggaacatgtggcagcaagagtttcattccagactttccgaaatgagcctttgggaagagttcagtttgtgctgcttctaatgcagcccctccaacagacatggatattaagaatggtgaacagaattccaagagctagtaatgtctgcgagtgttcatggttgaggcctctcagaccagtctgtttccagtaggcacatccatggtccaaggctgctgtacatcatgccctttggtggatcatttgtgcttccccacagcacttcagcttgagttaacattctgcacctgtgtgatcttctccttacatctgctctttgctaagctgatcctgccaccacagaccatcctgttcaagtgagcatgctgtttctacccttctgttcaaattgctagaaaaatccaagggtttttcatggagttgtgggctgtggctccatgaagagtatccccatcccccagaatgttttcagatgctatgacaaagaagttccaatagatattaagtgaccaagggatcaggactggttttgcagttccagccactgcccattgactggacgtcagtcttggcttatactcccgaagcctatgtctgtgtggttctagaaacaaagctgtaaggtagaaatttcaggtcactgagagaggtctggtggaattaagctgtgaacagctgagctaacggtgagctttcctttgctcataagaaactggaatatttctggatctttctgctttttcaagtgcagtataatgacagggtgtgctgtgtcaccagcagctggcagaggcctgctttgaggctccttcaggggagcactgttgtatctgcagagaaacaggaaagcattggcctcttatttgcaaattgggctcctctgtgctactactggtttgccttgttcctcctaggaaggtgctggcactattgggtggtcctgagtctgccttgagtttcaatgacagaggcttgagcttagaaccagtcttacgagctcaggctagccctagtcttttccgccttctcaggcctttcatggtgtgtgcaaggccaaggcacagcatatgtctggtttgcctgtgtgggtgtgagcagatggagctctgcttctgggtagctgtgacagtctcctgtgtacggggtgggggtggggggaggggctctgatgaggttctgattttgaagtgtgtgcatgcgtgtgtgtgtgtgtgtgtgtgtgtgtgtgtgtgtgtgcgcgtgcatgtgtatcgtgtatttgtgtgcatgggtcccagctcagcactcagtgtctttcccttattgcctctgcttttatgttttggagccagcatgtctcactaaccttgaaactcttagattcacctaggtaggctggacagtgagctgcagggatttgccttctctgccctgcttgctaggcttatatgattatatgatagggattatagccgcccctggcttttcacatgtgttcttgggcggccctttgactgagctatgtctctggcctctgaacttgtttgtattttatttcatttcagtttttcggtggtgctagtgattgttgcagggtcctcacacatgctaggcaagtgttctgttagtaagctgtaccccagcctctgaactttgtttaaatattcatttctctctaggaaactgttgactgatgaaaaatgtatatgaatctatatgcatgagcgtgtcactcactcagcaaatattgagctggcgcctgctgtgctacaggtggcggcggcttgttattcacttgagcagtgggagtgattctgttctgctgtgggggtgggctctgagtttgccaatggtagaccccatgccttgggattagaagctttgcttgtcaaggctctaggcctctcttttttaaatcctggggttcatgtgctttgagggctctagaccaagcccaatcatgcttaggatggtaggtgatgtaggaagggcctgacttcccagagtgtgcagccatcgggttcttcgagatttggtgtacttagaggttctaaaacaccttcactcatgtgagcactctagcactgccttcctctgctgcttgcctgggtgaagtctgggcagagcttacagtaaagcctggccttgtcaggctttggagcccagttccaagtaggagccaccagagaatgacagtgggaaggagggagaccagagagtcactaggtagaatgtagctggctcttccataaagatggtgggcagagagcagagagagcagaaaggagcgcttgcaactggtctcaaatacgagcagttaagccagaggcgaggagaagccctcagggctgtgggaaggagatgtaatctgctgggctctgatagggtacagagtgtgggtgcagggccagagtttggggagacctgggagataagcttatggatggaaggaaggtctttaagccatcggtgtgggtgtgcatacatacgtttagggtgatgtgtagggtggtgtctctcgatctactgtaccttgataagattaatctcaagagggaagatggagaagagtgatcgggataaaagatggtgaagaggagggatcagccgagcatgagtgtcctgaggaagaaggaagctagggtattcagcagtcatggctcagggtgcctacgtttgtctccttggatgaagataactttctagggagttaagaatccatttcccttgctgggacacggatggagcacatgtgctgcatccctctttccttcctgtcctccttccccttctccctctttcctgcccatccgtctatcactgagcaaagagccattgtctgccaagctctggtttgctctgtgtccctatgacctacctgtcttcaaggagccgagaagcgagtgctggtgaagagctgaacccagtgtttggtagaaccactatggtgcttgggagtcaataaaaagctaggattgttgaacttctgcaaagaaactagaattgatgtgtctatgtgttcttgtgccttagtgttggagacagtgagaaatattgatggcatatattttaattaaaaacgtgagtgcattttaaatttctaccatgttatttcttgttttactgccaattccattttctttcagattttcgaaaggatcttgtttatatgggcaatccgacaccctgccagtggatacgttcagggaataaatgacctggtcactccgttcttcgtggtcttcatttgcgagtacacaggtaggcacacaccatgacaccgtgcctcctagatacccagtgtgaacgtcagtggatttgctgtgcttactaaatatttacaccagtgccaaaaattgtctctcaacatcacagtcctaacgaatggcagggtgctagtcagggttctctaaagagtccatccatccatccatccatccatccttccagaaagggcatttattaggcttgtttacaggctgtagtctagctagtccaacaatggttgtctaccgggtccaagaatccaatagttgttgagcccatgaggccagatgtctcaattggttttcagtaaatgcctgaattttgaagaagtaggtcagtgaaggatggacttgctagcaagaattagagcaagcaggcaaaaagagcaagctccctccttccatgtcctttatataggctgccagcagaagatgtgacacagattaaaggtggatcttcctacttcaaagatctggattaaaagtggatcttccccaacagggtcaactaacctggaccctaggagggctctcagagactgaaccaccaaccaaagagcatatatggggtggatgtaggttccccccacccccacatgtagcagatttgcagcttggtctttatgtgggtcccaaacacctggagtggggggctatcccaaaagctgttgcctgactgtgggatatgttcttctagctgggctgccttgtctggcctcagtgggagaagatgtacctaaccctgcagattcttaatctgccagggtggggggataccttggaggatggctccaccttctcagatcggagaagggaagtggggaaaagattgtgggaggaggtgaccaggaggaggagtagtgagcaggatgtaaagtgaacaaattaaaaaaaaaaaaaaagtggctcttcccacttcaaatggtttaattaaggaaaaattcctcacaggtgtgtctagctatttgggttttagttaattccagatgtagtcaagtttgacagccaagagtagccttcactagtcctggagaggggcagtcttatcctggaggccagctttagaaaccaccttaaatccatacttagtcactgtagatatactcataactgacaggatcccactttaaaataatatatgggagcaatgagcctagttgggagtttggtttctcctagtggcctcagtgcactggctttcagggctgggctaatgtgctcgagtatgacgagtacagtgctctgtgtatagttgtgaaccagacatgctcctgttggctttcagcgtcttctgaccctgacaacagtagcgttgtttcatgagaaggtggatcgcatgcagacccagttagctgtgtgacaggtagactgtgccatgactcagagttctgtatctccacattttttttggcttgtgtgtgtgtgtgtgtgtgtgtgtgtgtgtgtgtgtgtatgtataggtaagttgtttggtagatacatgcctgtggaaggtctgaggacaatctgtggaagtcatttctctccctcttgtatagggatattggggattttgccaggcttagcaacgagtttctttactgagtcctcttgccccttttctttcatttacattagagaagcacatgtgtcctttccttttgtttacattagagtagcaaaccataatatgacatcacctgctttgagcagtttataatgtgtcataagtgatgtgtgcactttctgattcatgtgcgaaaacatactaagcacataggatgggccattcttcggtttgaacattggtttaaaattgacaccattttttatcatgagaccacctcttatatggtactgccttgtttttgtgtggttatagactggggcattttagcctgcagtcagctgcagatccttccttttgtggtcatctggagagatgggatcaatcaaggacaggtcactctgaggatgtcaatagatccagtcaatgagctgcttctgtcataggtcattgctaagcaatgagggagagccactgtttaccccttagcatctctgttctctcaggaccatctgagaggtaacaagggtactcctgaaggtcttggagctgtaggacctctgtctgtggccctcagtcaatggcgaagttcagccacatgcttagaggattgatggttcaggctgaatgggccatttgattaatgtggtaaataagtttgttttaagtgctttaccaccatcttatgttgtaagacccaagtgattcttaatgcatttcctgatcattagcagacagggtgagtagccatgactctggtgttaattgtctaggagaaacagtgatcagaggaggtaggaactatgctctgcaagtcaatctggacctgggctcagaggtgctcttgcaaggccttttctcacgtgtgcgcgcgcacacacacacacacacacacacacacacacacacacaagcaaagatacatatgaatgtgcacacacactaaataaaagttgaaaaaaatttttttaaagctataggactcagaaaaaaagccccacgtggaggagagactctgggctcaggaaggatgggctggtgaccataacagtgtattggagagctttagagaggtggaccgttctcatagagaatgtcctgagctgctgttgattggaggggatgaatgacccaggcttgctaacctgcctacagttgatattcctgcaggctgaggaaaggtctgtgtgtaggctgcaagtctcagaagtttcaagaggagcaggtaatcactgctgtggactagctctgaggaaggcagttcttagtgaaggacaggagagggtctgcatgatcttcaagatcactacaagagaccacagacatggagagttggctcagatgggaggcaagcaagcagctgaacccattggcttattataactcatttacatgcaccctcctgggtggccttttccttgtacttgggtctgggcaagttggtgtcatgctgtacactataggagtttggcagctccgtttggattgaatccctacgatggctctctgttgtgcagttgagatccggggcttttaagctcatgtaaaagaaagagggtcatcactttggaattacagattggagggaaagagtcagtggtgccatcctgtcggtagacctcttttgggctgctttcctctatagctcaggggtcactcaggttcctgggactcagtaaacgttatcagatgggagcaggcctgttgtataggcagctagtggtcacttgtgggcgatggtgattttggtgctctgagtccttttctgcatgcctgtattactgcagttggcagtacctgtgtcctcagtgcgctgcctgcaccagtagtaacataagctttctctgttgtattgagacgtcttcctgcctcactctcaatcctgcctcctgcatgtggtggtctctgagataatgtcgtataattcgtgaactcattctgctggtattggatttttttaagtaccccctccatggtatagtttttaagtaaatcctgtacttttaaaacagtcactatcttattctgtccaagaatgttaaatttggcttaaaattaaaaaaacatcagtccatcaccttggttcacacattttcagcagaggatgtattttagtttaaataaatattttgggtataggagggaaaaaaaaacaacccacaaaaccccaaaaaacaaagatgcattccccccacgcgtctttgctatttcaatttagaaacaattttgaccaggcactctgggctgatcccttagggtaattgaatgctggttggccgctcgggaggaatgacgatgactgctctgcgcgagggagactgtctcgcagcggattctcgctcaggaggtttaatctcaggctgatttgattctgtatgtcatcttctcataaattactcttgaaagcaaacatggcaggggactagaacaaacaatgcatttccccatgagcattaagaatatttatttctttgtttcttgtgtaagtcagaacttacagtacggcttgctcttagcgttgctctctggagcggatgtttctgaatatggctgaagtatgtggtgctgccaggctgttaccactctgcttacccaggaagcacagtgctgccagaggactggacgctggctgggttacacgcatggttgccccaacagcgtgcattgccacagaatttgagggacggcggcaagaggatgctgctgaggcctctcactcagcgtcagtttcagaagtgtgtcctctcctgctggccttcagtcttccctcagtgtaccagtctttcctctgtgtgatgtgagcctggactgcagcaaagttcatctgcccggcttcccggcgtgctcctcagtgggaagctgctgccgccgtccacagtttgttcccaagcctgcagcctgcagagacacactaaggcacgtctgcgcacagtgcagcttctgtggccgttgccatccaggaggaagtgcagacatggcgtgagcgggtagagtgttacggacaggtgtgaaccccagtgcctgtgagtttacaaacatttacaaaatgtcagagcagtgggcttctgctgacagattggaaaacaaatttggtcatagtgtggccacatgggccagaggctgtcactggaaggtttggagttttttttaggccttgtcagtgcactgctctatgtggcagccacgatgtatgtattgtttcaggattacctgtctctttactattcagatacagagtcattcaacagttgcaaaaattgcttaaaaaattggtagcatagtgcttatcacagtgggtaggaaaactcagcagaagaccagtgagggtctggaagatggtggtcagcaagaaccatacacttcttggcagcacagaggacgtgctcctttccagagcacgggccacttgcttcatgcaggacaagtgctaacactgggtgagcctgtgcaaattaggcatgctgtgttcttcttcacagtagcatcagagcagaaatcagtgagcatctgaaaaaattggaaactttagaactcaggacacaagaagcccctgagagatgaagaaggtgaaaatagatgcagaacctggaggtgcagcagggctctacccacagtgggctgaccgcactcagacgcggtctccagctgttagcacaattgctgacactggaagagcagacagaggaggggagcaagtgaaatggacagacagcaggccagagaaggtccccacagctttagctgcccagagcaggtccgagaaagagtggaagggagagagggaaacactcaagcaggcaggtgacactgggtgatttcagagatgcagagcaccaaggggatttcacgagtaaccctgcaaagtaagttcagaatggaggaattctgtgcaaggcactggtagtcaagctgcgttggctgattcggtgtagccaggatgatggtcagacaccagtgtgtgttgctgcagatgtgaattccgtgagcaggatttaaatcagttgcctttgagtagagcagataacccccaatgtataggtgggcctcctccttttgggcacttgaaggctgtggccagaaagagtgccgtgccaaggaagcaggggttctttaagtgtgtgcctgagttgctctgccctatatacctttagatttcaggtttgctcttctctacagtcccatcgggcactccctggaagttggtttctttccctcccctcccccctcgctcatatacatatgcagatataacacacacctctatcttacatatatatgaaattgcattagtaatctttaaaacagtcccataaccccaagacaatgtgtatgataaagaattaacctgcttgtgtcaaagagtttcttaagcagaagagggaggaacggattatatttaccactggaggccattactgccccatgaacagagccaggtaggaggctccgccagaagaaaactacacagagattccttaacaaatgctagcaagcctggtgtggcaaagtggagaaaggattctgtatatgagaaatggaatttattccatgactacaagaatgtttcagtgtatggaaatcaatgtattaccttaatctacagaccaaagactataaaacgaagtgattatgtcttttggtatagaaaaagacagaaccctttggtgataaaaatattttttctttttcttttgtttatttatgtttgtttgtttgtttgtttgtttatttatttatttatttattttttgagacagggtttctctgtgtatccctggctgtcctggaactcactttgtagaccaggcttaccttgaactcagaaatccgcctgcctctgcctcccaagtgccaccacgctcggtgataaaaatattttacaaaggagtactagaagagacggtcctagaacagctggatatcttcacgagaaggggtaaaccttctcgggacaatagcaggcggactacagacctaagtctgaggggtcatgagaggccaggcatggcaatgcacatcttttaatccccttacttggggccaaaggcagatagatctctgagttgaagtccaacaactctgtctcaataaataaataagtaagtaaataagtaagtaagtaaaagggaaaaggggactttaagagatgatggagaagaggggtcagccatcacaacctgggttagaccatgatttctcaggtgtcttgccagaagcaaagacacaaaattaaaaagggggctttctcaaatgaatagctttgtattgtgaacaatactgtcaagaatgaggtgacaagccaaatagggagagtgtatgcaaattgtaagtctgctaaaagtcttctgcctggtgtgtacagagaactcttaactcagtaagacggcccactttaaaaaaagtacaaaatgtttccatggacatttctccagagacgatttgcaaatggccaataaaatcaggtaaaaatagtcactgtcattaatcattagggaaggcaaattggacccagcgagccagcactttatatccaccttagaaagggtagccacgacaagggtggccatgacaagggctgtgacttcaatgtgaactgtccccacgggctcctgtgtttgaacacttgctctcagcagttggcaccattctggaaggttgtggaacgtttctgaggtggagcctttctaagggaggtgggccactggtggcaggcttagagattttgtaatcttaacctaccccttgtctgtcttctgctttctaactgctgatatagcgtgggcataaggcccactcttctgccaccatgtcctctgtgctggtctgcactctcacactgagccatggtaaaccttgtaagaggcttcatgccaggcatttggttacaacaacagaaatgcccgagacagagcaggtgtggagacccaggatgtaggtgtgggactgtctgggaatgaatacaagatctcctttggaggtgtaaaatgctacattagatggtgattatgactgcttaatttagtgcatatactaagaatacctttgaataacctaattgtgtggtatgtgaactgtatcgcaaaaagaaactggagccccttatttgtgaggaaagatcctagtttggtagtttcctagtgatggacacatgcatagcttcttttctgttgtggataatatacacagtatttgaataaatgtattctcagttgcatttgtattctttttcattgtcgtatcagaggcaccaagaatgactgactcagtcttggaagaggtgccactgaatcaatgtctgcagccatttgtagatcttgacagcatttactgggcggtttaccataaagatgactgactacgtattttcctcagccatttgcgggatttccatttccccttgtctttggagtgatctaacatgattgactggagagagctcatctgtatgtgcgcttacagacatggtagtatccttcaaggatgcatggcccagagctcagacgctcagtgactcagagggttaggagaacagcagcagttagtattctctaccgtactcacattcctgtgacacacacacacacacacacacacacacacacacacacagcagcagcagcagcagcagcagcagcagcagttagtattctctcccatactcacattcctgtgacacacacacacacacacacacacacacacacacacacacagcagcagcagcagcagttagtattctctcccatactcacattcctgtgacacacacacacacacacacacacacacacacagcagcagcagcagcagctagtattctctcccatactcacattcctgtgacacagacacacacacacacacagcagcagcagcagcagttagtattctctcccatactcacattcttgtgacacacacacacacacacacacacacacacagcagcagcagcagttagtattctctcccatactcacattcctgtgacacacacagacacacacacacacagacacacacactgagggcggggggtggggcaggcacatccgtgactggtagtctcttgggcatggtacatgagtgactgtgcccagcaggaatgttctggttctgggttagtaggaagtggaagattggtcagtgcgggcagctttgtagcaatgtagccgccatcttggttgccttgtggcagcctctgatggatgtttctgggaaggaagcctgtgaaggcttcttaggaagatgtctggctctggacttgcccttgcccttgtgcttccagaggttcctggcctgtctgatttggagtcagtagtgactacccaggagttgccagcagctcctcctgaggtgtggccttgtttgtgttgggtcacaggcattcccctgagttatgaggtcctttcactgtgttctgatttgtcactttgtgtttcaactgacaacctgagaagacagatgtctgccagcgcactgatggattgttatggaattcttattctggtgttatgatgcttcatttctggctcatgtgcgaagccatttgtgagattattgaaggtgtaagtgctttgcggatggaggcttaactgcttttattaacgagctcactttgtcggatgctgtgctaagtgcttaattactctgcagcctgcatccttaaaagccttgggccatagcaccctcttcctcattgagcacatggtgcttgcaagtccctgaggctgctagggtgcactgagcccctggtatggcccgagggcctcagaactcaagcttcatccaccttggtggaccacaatcaagggaagcacatgaagaggactcagattcctggcatggacgtttgctctgtaggactttttttttttttttaaagatttacttatttattatatgtaagtacactgtagctatcttcagctgcaccagaagaggtcatcagatctcattacgggtggttgtgagccaccatgtggttgctgggatttgaacttcggaccttcggaagagcagtcgggtgctcttacccactgagccatctcaccagcccctctgtaggactgactcttaggccgggcttgtgacactatctgggggtttgtgctgtagtcttgtctcagatctagggtccatgctgcactaggaacatcttcatgccaggttcagagggagcccttccttcctgttggaagtgttaccctccatgaagctttgaggtgactggccaggaaagagcctgaagagtgctgcctgctgggctttctgttggtaccaacacttcttttgaatcctgcttcctctgcttccaggaggtactgagcacatagaagcttgcttgtgccttccctcttgatctgttaatggagcggaggctgggggaagagatgatattggtaagcagtgtttggtggcagccattgtctttctttacctgtgttactttaattttctgtttcaacaaagtggaaataaaatcactaactcaaaagcaaactagcaaaatttttgttcctcatgtgaacaggatccatgactttttaaaaaatggtctggggttccatgactctatcaggagcattccctcaatgacctagggtcctcccaccgtgccttgcctccgaaaggttccactacttactagtagccacctccttaagccatgaatgatggagggcagtcagcatccaccctccagcaggcagtgtcacattgcattttagaacaacactgcatgagcatcccttctttctggtgtcttcaggtcaggtgtaatagatgccattcctaaatagctgactgctgaaaggggaggaggagatgcagagacaaagacatccaaggctcacatctatacataaacctaaaggtgaaaatattgtacattgtagagaaaaggatttggcaccctcagaaaggtagtaagtccttaaaataatgaaaaagaagtgtgcttagggcatataagaagcagaaccttattcatttggagtcatgactccatctcagcagccgagtatgtgaggagccctgggcaggtggggtttgtccacagtgaatatggaatgtgccatcaggatttgcaattctgagatggttcagttttagtcaggatggttgctgagcaatcaccgtccctctgcatctatggagattggctcctgggcccctgtggacagtgaagtctgcagatgctcacatccatatatgcatgcgtagtatttgcatgcagccttcacctcctcctgtagactttaaacagtctctagatgactcatcataccgtgcatgttaatgtgctgtaaacagttgttttcctgcattgatcagggaataatgacaagaaaatggctgtgcctgttctgtacagacagagatcttgagctgtgatttttagaatccataagtgagggtctcatgaatatggagggccatgggcagtgagtggcagagggcttggctcactgtcctgaattccagggagatgattgctcaggctgtcttacatcccagagtgattggctcaggtgatggggtaggggcagtcttcccaaatgggcttctaatattttaggtctggaacatgtatagactatgcagatttccagctgattttcagatttgaaaataggttcatggtgctggagaaatggctcagtggttaagagcactgactgatcttcgagaagtcctgagttcaactcccagccaccacatggtagcttacaaccatttgtaataggatctgatgccctcctctggtgtctgaagacaggtactgtgtactcctatacataaaataaataaataaatcttaaaaaaaaaaggctcagtggtaaaggagtgctctggctagtttttgtcagtttgacacaagtgtagacgaagctgggatgagagaagctcagttcaggaattgtctccatcagattgtctgtggggtatcttccagacatggtggactgtaacctgtaagctgtaacccttaggacaatgagtatataaatcctggatgcaaacccctgccctgcccacgttaggaagaagatgaaggtctggcaaccaccgtgcaccacagactcaccttcctgctgtggccttcgtgcattgtgccccacatcttacatatattctctctaatctttaaagtcaatcccatgtcacagtagggaaattgatgcttgtgaagttcaggaacatggttgtgggtggattccaaactttctccagttgaaaacacacaactctctccgttctttcattctttgcttgggttcaggacatcagacaagatgtccttctgtactggtctcctttgggcagtggtagtagagctgtcttttgttttcattttgagtgctttctcactctgagcgatggatagggagagtgtgtctgtctgtgggtgaagagcttggccttatgactgtgtcttcttcactcccaaaggcccaaccttagcttcggccatctgtttcttcaggggagtctcagagagtctcttgtaggtaattagaagtggctagtttggccacgctttcacgactgcttagctatgccagtgatgtcagatgtctgtgtttttgcttcagtaataagcattcaagaaggattcaaactgcattaatatttaagagcctttctagatccagaaagtgcctgcgaacccctcctgaatgtaatgtatacagcacatgtcaattaggaagagagatgatgtgcgcttggctccccgtccgctgaggctccctccactgcatcccaggacgtgcttcttgctggaacacgaagattgccagcctcccaaagggattctcatggaaaaacaggctttccattactttactgttcctaataggtctgtgtcccaagtaggaaggaaaatcaatttaattacttatgaaacttttcctttagggtgaatgaattatgaggaaaaaatgaagtgtctgtctgtcatcagcgactttatctcaggctgagatgagagatattaatttgctctgaagactaggtgttgggtcactggcggacctagagaaggcaggccaaggtgcacacatccagggctgcaaggcagaggctcctcccttccagggctccatgggaggaactccaggaccactgacagctaagatggcactgaaccgaagccagaggcctgggcaggtgtcagagtgggagaatcgtgaaggaggagagcgttaattgcaattaatgtaattaggaggggagaaatgttctctggagggagccacatgcttcgctgctggctgctgctcccagcctctcggtggcatccatctctctgtaattaatgaaccccatctcccatcggaagccgtgagatgctgtgctggctggagtgtgcttagctgggtcagaaggtagctagctctcagcttcctctccacatggtccagccttgcaatgtggccatgtctgtaggagcagagtttagaaactgaggcagggagagagctggtctttcagctgtgaaggacagagtattgctagatggccaggctgcaacacccagatggtgactaaaaagactttcagggacttgtcccatcagccttcagcctgtcattggcctgctctaccgtatcccacaggagctcaatgcatccttcccaagctatggccaccactcagctctcatcacttctctgtgtggatttgcccatcacacatgcttagtcgtccactgtgcaaccttttttgattggctgctttggtgcatcctatgcttctggacctatccctgggcagcacatgccagcatcctttctgtaacaggagtccttctgtcacaccagccattgctcagtgggtgagcactggagtagtttcacctatggtattttccactgatgtgatttcacttcttgaattctgggctaaccagaccctaaccccacccttgtgccatttacagtcttgttggtaacacagtacttttatttaaccacattcttgtcagctctgattactattttttttcttcctttttagtcatcctagtagatataaaatgctatttaattctagctttaatttgtattgtttggtgactaataatcttgattatgttttatgtgcttattattttctacatagcagttttatttcataatgattggatttaagaaccttttaactttaaatgcacttctgtttttctttttggagacaaggtctcatcaggcgacttgggctgacctagaatttgctactcagttaacgctggccttggactcttggtctccttccaccccagcttccccagtgctgagccaggcaccgggagcggactgttactttaaaagtaaactcttccacctgggcttttccatctgctataaatggttctgaattgtcttcaggttttatgcaatgaagggacttaagtccctgcagataggacagaggagtgcaggtctttgtatgcacagtgtgtgaaagccattgtctgcccgtcattatttcctgtctgtctgtctgtctatctgttgcacatttctggttttctttgaatgggagttctggccctggctggtatgattgttctcttccttgctccgggtggtgtgcaggaaatgaggtcgtctaccctctccgtgtctatctgcttgacagcttggctgtccttttgggagagtctgctgccccttccattgtgttgctcacttggggggacctgtttgttgagctctttcttctccagagagatgcagaaaaactgctaggacttttagactcctgctctcacctgataaacgtgccttttaatgccagctgtgactgagagaaggatgctctttgtacacttgcataaatgaggtgttctgagctgtgctgtgttgtctaggaaacatgcctttggaggtccgcaaggacagagggctggagcattagagatgaacaggagagattgacagagcacaccgagcacaaaacaacctgcatgccatcaaatggagccatttaggtgaacaagagacaagaagtcactgcggctcagccagcccagggtttcccttcagccgttaaactggcaggttgtgctcctcactcatttctcctcttgctaggtctgccccagagcaggcttcgagagcaaacaacaacagttgcttgctgaactcctgggtatgctccagtaaagactcacttcagcatgtgaccaaagctctgggtgtgagacccctttggttgtcccatgggctgggcctccatgggacagggccccatcttcagcagaacatggtgcttcttggctcatcatgggaactagtgtcctttgttctgtagtggtggcttcagctctcattagcatgggactccattgatgcaggcacagtggtctttggccaaggcggaggaaatcacaccttttaagaagaaaaagtgtcatagttcagagcctgagacacatgtgggcagtgtgcttctctgttatatgtcacctccctcccatggccatgctacactgacatataaacgtatgtgttagcacacttagaaacctacctgatgggtgccccatgtcccgtgcaaattctgtgctgggcacagaacacacagagggaacagacacagtacaggaggcatctctgcccccttgactcctgtaagatgtgtggctcctctgatgctctgacttttgagcactgtccttggaactgatcttcagacaggtgtagcttgaaggtccattcagatactggcatagccctgaccagtatggcaggatccattcttcactgtggaggcagaggctgagtaacagaaggaggtttgtgagcctctggccatcttctcatccccacaagaggaaactgaaccttcaggagggctgtcttttctagaccttccagaatggaggtgttcgctggaggagggggctgggcacccagagaggaggtaaggaggtggagaaaccacactcgccttccttgtgctgcacctgctgtgctgtgctgtgggtacaggggtgggatggtgtgggttcaagtggctggtgcagttcctgacagttgtcacttactttgtgataggacataagaattgtttcttgggagtatctgatctgatgtctgcttagcggagttgtgccttgttccctcgtgccatgcatgcttactgcatctctctgcactccagacacttttattcttctggtggcattaaacatatttaacaatgtattgtgttaaaacgtattataagatagagaaaaggtagcactaggcagagtgagtgagaagaaggggttactggggtaaggaagggggtggcacgtggtcaggttgatctggaactagtctgtggttccccacaggtgggttctgtgagtgtaagcaagccccatgcttcaccatagagaagcctgcacagagctggaggaggcccagacctcacaatggctggagcaagcccagcaggggaggctgcactccatgcttggggaggggacccagatccataggcagagaaggcagtaataggacattggtcattgtacctcatttgtgaggggtcaccttggaaatgtgctgagactaggttctaggagaagctcgccaaactcaaggagaccagataggccattgtgctagtctaggtgggcagcccgtgctggtggtgtggagttaggggttgctgaggaaggtggtgatctttgtttaagttgagcagggcaaaggatttgttgatggactgagtagtgggtggaagagcaggaggaagagaagataacaagaaaggccaccatggagagaaggaggctttggaggtggttccacagatgtgccacacaggagaggagggtgggtgttcctgagaaggtgtggctgttggaagcctaagcttaggcttcgatgtgctgtgtgtcctgaccctgcagcattgcttttctatcaaaggaaacatgggagttgttgatctggccaccgtccttccaggtctttgtgtctactgtgaagtgtggccctctcctccaggtagccagctggaggcttgcggcttcctgactcttcctgctctaggtcagagctagttgccagcagtctcaaaactggctgggcctcatttctagcttgggtgcggtgacatctgaggacccatagagaaggacagtggcagcatgtggatcagtgtagaggccacagaccttcctgagaagagatgagtggtaagtgggggaccatgctgctgaaagggaggagaaggaaggagaggggtggacctctactgtctttgcgccttctgtgtgctcacgtgtgtaaagcctaggaaatcagaacaacaggagcactggagcccacccctctgctctgcctttgctccagtttgcagacagactttgcattattcctcattagagaaactttttgcaaatgtttctgccttgtgttccctgtaagaacacaaggcctggcattgtcctaagaggcatggggcgggggctgcatctgcacccatgtgtgcatgcacctgtgtgtgtttgtggggaaagccgccagcagcttcccagccctcatctgtctgcttgcttttgtctctgcgaggacttagcatctgcagaacacagacagcgccggcagcttctctgctctgggaggttaatgactgagacgtgagtgctgggaagtctttgaaataaagttgcgtgcgttacggttatagctctgatggtatttatatttaaaacatcattataacaataatgtaccagtttgccaataaaatacagaatcacttcggaagagcagtctccataccagtgcatttttgaggctgggccacacagtctaactttgggcctttgcaactgaatgcaggattcatgtattatatatttccaaagagtaatgaaggttgtgcgcttttgcctagggcactaagtattgaaaatatatggccagtccagtagtgctgaaggacagattggaagtctacgctgacaaggctgtctttcattccaggttgggtgccactgccttccatgccttggagtttgatgtggtgataatgcgtcattagggacaagtccttgtgcccgctgtccagctacagtgaggctggaagtgggcaagcatctcagcagtgacggatggcttctttcctttagatccgtacaaaattcataaatctgatttataaccaatgaagtctgagctgcttggagcagaaggctggaattcacagctttcctgtgcaggcagtggctttgttttgttccccagtcctggttatgtggtgaaagcacactgtatctgtgccacaggcgcaggacagacaggtctactcactactcttgcgtctttggcatcacatcttggagcagttatggtaagggtaggagtcagccagaggaggccgttcattattgctgagaacaagatgagccatgtggcaagtcagggatatctgtacaggacagcagaactctgtgtgttctcagagtcagctctttctgaagctacttgtgaccatttgcccagcagtcactgtgttcctctgtggcaggttcacttgtctttgaaagcatttcccttctggctccaggccagtgagccctcctggctgcttctatggtccccttccttgctgtcacctctgactccttgttctgctgcgtgagtgtcttctactgtttggtgtttgttctgtctgggtttccttctctgttctctgctctggcatgctaatggcttcactgtgccatatgtgtagatgcttataagttccttatagctggtttgtgaacttcagaagctaagccacactccacacttgtgtttttctggacatatgggttttcttaccacatgtgcacaggggtgctgatgatgtgcagggttgagacctggtgtttgttattttttatagtccagctttgcacctgagtactcctccctacatcacctggctcctggccaacacctaaagccataggtcatataccttgatgtcaggggataggcctgtgctttcttctctgattgctgcatctacctagtatgtggagacaccaaagaccttgccttacacctcgggctcaggtcctggtcctatgccccacagtctcttccatcttctatcttctatctttgaccagctctgtatctctggctctgacttccctggtaccatgcctctgctctcaggacacagtaagcaggagtatcagtttctcccagaggcatcttgtcatgctgttcacacccctactcttccacaaagggattaacacttgttccttttcagcccttgcccaggacctgtccccacacagtgaacttggccatgctgtttgctagacctttgtacatcattctggatttggttttctgtggtgttagtcttataggtcgactgggtaatgggctcctgggaggcgaacagagaaagaggcatgattttctcatatgggatcaagactgcacgctgtcaacatggcctcagtactgttggtggtgatcatgatcccaggcttgggctaattgctttccagctgtctccagggtacatttgtgctccggcttcacaccctgtcctttggatggaagtcactgcccagccttcatttaagggagttggtgctgttctcttctcgagggtctgtatcagtgttcggagctctgcatgggagggctgcctacctctcacacctatgccctgtcccgagtcatttctcttaatagggatcgcagagtattttaggatttgggttattctttgatttactggtgattctttcagtgtggtctctgagagcccttttagttggctctcaggccctgccgacctccttcatgttgtctgtctgtctgcttctaggacctcactctggatatggtggcacatgctttaatcccagaacttcggaggcagagccaggcagagctctgagtttgaggctagcattgtgtacatagtgtgatccaggctagcctggtctgcatggtgagttctagaccaaccagtactccccaaccctctttaatatattgtatcatagtgcatgtttgcaaacaaaacaaaaacaaaaaaaccaaaacaatggttctgtttaaaacacattttcagttggcgtaggattgtgtggccatttcttctctcagtgtttgaggatgctcctccttgtctgcagcgtgaggttccttcccattggaagtctgctgtcagcattacttttacacacttagactgggagtcggtgggagtcctcagaaaccagttgataccttcttcacatttacccgatgttgacttgtgtcaggctttggtaagcagacgatttcctgtgtgtctccttcagaaaccccgcagaggagcaggcactgctgtccactccctaagttaggaagctgggtagagaaggctgctgagctgggccgtggaagcgcctgcggagtttgaactctctgcgtggggagatctgcaggctcataccagctgagtccagtggacctggaggtctggggcgcaggtgttcttgtcagctcctcagctctgtctcactctgcccctacaggccagtgcctgctgagtgcttttcaccgtggaataggggagcatgactgcctaacagctcactgtgagtccaggaggagacatgcgatactcgcagtgtgagcagttttgtggcccctggaagtttttcttggttgttgtgccagtcttgtctgttgcattaattaaaggatatgcaggtcagagggcacacacaggttccccactctctaacaagagccacggccacagcaggcccactagtactctgttgcttttcctccactctgagctccagagcttctgtaacttcccttatcgatgaaacctgaggacttagagtatggaccctgtacagctcgtctctgttccttagtctcgtctgtaccaccaagaataaatacctcaaaggccttgtgtgacagggagcatttgcaaactgtaaagccctgagtaagggctgcagggcttccctgttgtctgttttctgcctcacgtctcatgcacctatgatgggtgggacattgtgctaggttctttgttcttgcagagcctgtgaggaccttgatgattggggggcacagctaagaaccttggaggaaggcagggtgcatgtgggcctgtggggaagggctctagattaggggaaggaagttgtggagtgaggcatggactcgaggaaggtcatatgaaggagtgcacacggaggcttggagtataagggggaagctggcgttgcctccaggctatcaagctagtgactggatgggggctttaggggacagcgactccacactctagataggcctctgtaagagtccttgtggagagcattatgggccagtgtgagtgcctggcttctaacaggagcacatgaggcattcagggagcttaggtgacaagatgtatgcagtttaagctgaatgcttttttgttgttctagactgaaatcacctggaaatctactttcagaagcctctgtatcctctgtctttcaagtagggtggacattggctccttcttcaagcagagtagggcctctcatctctggcagtagcctgctctgagcctcttccatccattctgcttccagttgcctgcctgggtgtgtggctcttattcccatgtctctgctgtctgtgactccactgaacataactttcaggtcttgcaggcccacccctcatcccacttctgtaattctagctgtgtgcattcattctcacaggggacaggcagggccgtgtgttgcattgagtggtgtctggtgagacccctctgtgggttattgtagctctatggtctcagggcagaggaaggtgggcactggctcgtacatagcgcttgtgactgatggagcatgaggtcacattcagaagtagagccctgccttttgttccagtgcacggtgtgcttgccttctgtccctccagtggaaggtcctcgggaaggaccactcttggttacccatgtgtgctgcagctcatctatgggtggcaagctggaaatcaggaccccactgactgaactggagggtggacagtcaccagctctgaacacttaggcactaatgtcttcattcagcctcaggagagctacagtgaactgggttgtctgcatgctaggatctaatgggagataatgctgtgtaatttatacagccatggcataacagattgtgtataaattagcaaaaatgttccagaatgctaaaagcaggtgaaatggaaatgactgaatcccagataaaatcatccctgaatatccaagaagaaaatttgatcagctttgggagtgaaggggttacccctggtggtattttattgaaccacaaattgttatttataacccatgtcaggagcaattaaactgattgatgattaagaaagtttaatagttgaataataagatgcggttcttgacagctattttttctcattctggaagcatattttatgagtctaataacagtgttgaggatgggctgtatagcatgttgtggtgtaattatgtggtggtaatataatattcagtctagtgttacgtggtctattatgtataaaaaattaaaatactaattacaatttttgatttatcattgaagtggtttattaattttggcttaccctaaatttacatccagaagccttgttgctggttcttgttgccctggcttccataccactgtcattgtctttacaaataacttcttaggttggtggggaaaatacatgtctcaaaaattgcttgagatataggtgttggtgttacaaagtaggagatatgaatacttacaactaaaagcacattctagctcctcaacagcaggtgcatatatagagaaaagaggtttgattccctgacagacagggaatatggtgtaagctgttgaaacatttggctgtgcttcagcaacaaacagctgcagttgttgtgtagttgctcaaaggtgttcctcgtgtgtttacaatggttggtgctggtgcagtggtagtctgtccagctgcttgactgacagtcctttgctcaaagcaggcaaggaaccaggaaggagtctggtacccctttcccagcagtctggtgcagccagttcattcttggaagcagaagttttttcattgacatagtttgtattcattatccctttgagtgtcagcctggactgcttctctggaaggcactgatcctgttagctcatgtatctgcttcctttgatgctgtctggctcctcagccctttgagctgacctgtttcacttggcccttccagcattccctccctgggtatccctgaaagctgcctccattttcatcagcaggatcctgttgacttctgcccaaaatatggttctgattccttggaagtgggggattgtgtcaaagactcaggcttgtttttgtttaggcccttggaggatggagaatctcacagagggactgcccgctaatgatgaatcaaggcaaggccacacgtccaagctgtccttccaatttaccgagtttctcttccagcctccaacagaggagcctctgagtctgtttgaaacctggcaccaacatgatgtgtactgctgtcaaaccttagtgtgagtcacggtgtcagacccaatttagaaattgcgttatcctttgcatccttttgatgctcgactcaaaggccctcaaattgacatacagtggacaagtctaggccatttagcttgtcaacaccacctgaacacagcacagaacaagactcccaggcaacttttaagagaatgaattttcttaaagatgagaaacgaaagcctttggccaggcttcctgtcataaagaacctttcatacaaccctgctagaaaatacaggcataagctggacacacttatctgagatgctggggctagaggcctagatgtcagtacttagggttaacagtgtttccacagatgtttcaggtagaacactccatatgtgaaacccaattgctctggagttaaataatttgattgctgcatggtactctgaagtcaatgggccaggagcccttagatttggaggttggggtcaagggtgttcaggtctttgcccttggtttttagataacttgcattcattctgatagttaacctttttatctcatgtagctttagtgttgatcctaatttcttaactgcttttgaataaacatcgatattcattatactaatttatgacaatctaggttttgaaactccactgaaaatgtcatggaacgtgacaaatgaatgtcaagaatgtttccaagttccttttaaaattgtgccgtacattcactgtgcattctggctgtgggttgacactgaggctccttctcacactcacccactaaaacccctgcagcttaaatgatgaggtatgtctgtctgtctgcctttatactcaggcttctgtatctctcatatcgcattgattgacccatccttagagttgatacacacctacaacaagcacagagaccttaggagccaggctcctgtctcagtaatgtaccctaatttctgtgtggcttgaggctttctaggcccacaccccaaattctgcattttgtgcatttaacacaaatgagggagaagaaagcttctctatgtaatttggttgatagagaccacatttttcatagctcttctcttagtggccttgtgcttaccccaaaaaattgaggcaccaggttttgacagtaggccttccaaggccaagtgctaaggattcagtctgagtctttagagtagggaggcaggataaatgacattaattcttccctatctccatctcctcccccaccctctttttaaaaaataatgcctctccatatagcctaagccagactagattcactctgtaggccaggatgctctcaaggtcttgatctgcctacctcagcctcaagtactaggatttcaggtgtgcacctccatgcatggccaccagtgtccttctaactaacaggtgatttgtggaggttgcatgttaggtagtattgtgactgtggactgtgatgggttgctctgcagagaaagttaatggaacagcttttcacttgtgtgctgatgcagcgttcctgagcccttttgaggtgctgagctagaccagtgcttgctgtgaaaggagagccagatgcagatgtctataggaactggccagggagagcctctggcagtgggaaatacaaacatgtagatcccgccttactaatgctgatatttcacctaccaatgtaaagggacaaagggaaagggtcaggttgaggagcagtcttcaagatagccagtgtcagtccctgctggcagcctgtaactctgagcctgcctctagccagcctgtgtcaggggccccagcatggcctgctcttccaccttctccctgaagttgaggcggctgccttgattgctttaggtaatccttctggcatccgtgtgccacattccttatggtaggaggatgtgaggcagagagatggttcagtagtttaaagcatttgttgttactgtagagaacttgggtttggttgccaatacccacatggcagcttgtaactgtgtgtagctccagtgcaggggatctaataccctctctggcctctgagggcaccaagcactctttcagagcatataggcacacaggcactctacacacagaaaataaaataaaccataagtcatgtgatttgacgtctgcccccacaagaagggatgtggctgagccactgggatcagcttcccggaagactgtgcagcagcttctgcagtgcccatattttcagtgacagggtgtggctgacttcctcttgcaggtagcactttgagtgactcagatttcttctacgctgattttgaaaaaaagtgcccagttgttttactccgcggagaacttgaacctgccctgcagaactcttgtgtgttagtatttgtgatgggcagtgttaattgtcaattcacagactctagaatcacctgggagtgccatgagagccagctttatctggattatgttagttgaggaagacctgcccattgaggctgaccctgttctctggacagggaagactgctgaaagggagctgagaaccagcatgcattccctgctgtcttctgactgtggatgccctgtggccggctgcctcaggcttctgctgccttgatttcctaaccatggcggatggacctttgactcttcctgccacactgtgctctgagagtctcccaggggtctcggtgcattttgttaacccctccccacaaagtcttcctgatcctcttagggctgagtactatgtttggagctggccctgtaggttctaaaagtctgcttcttattccttggattgggcaggcaccatttttaactgaaatgaacctcccagtgtgggtgagtcgtatgtgttggggatcagttagttttacttcatggctttagctggcttctttcctacaaagctgtttgagggtgttttctttattctcaggtggcctactgccatgtgtttcttactgagaaataactctttgtagattattgttatgagccgttggcctgtcataaatttgttggactttccctcttacaagcacttaagagtttttacaggatacagtagccctgcttttctgctgccttcctgacctgccccccagggcacgtgcttaagccacacagctttcccagagcctgcactgcattcatgtttgtgacaagagtgggccctaaacaacccacggaggtgaattttgtcccagtgaaagaccccctggtgtggggtgaatgaaaccatctttgtggggctgactgaccaaggattcagggtgagcaggctgggttgctggtcttattttggtcctttattctctctgctgcttttatgcacaatttgaatcagggctgctttgttggttgatatgaagaccctcggttacttttgactaattagatagagatgaatcactttagtagattgatttatgatgtttgtatccttagcaagttcatttccataggtccccactgctgagaagtgggtgtctgtctgtgtagtctcctaattggaatacagagtcagaaagaaggtcttagctgaaagtccaagatgcctttcctcattaaggaataagaaagggacccaaatctgttaataccacactcaggcagacatccttgaggtgctggagggctgagcctgtctcaggtgctcatcttgtggcttaatgacccataaggaccctggattccctgctgtcccgtgtcagggagagcagggttggggttgagacagttaggatcccccagggacatatgagcaccctgctttcctgagaaactgcgcctataattttcaaaggcaaactcagctttttttttttttttcacagctgtagtttttttgaggctttcaaaatagccaacttgttctccaccttctgagagaaccgagtcttcttgagggggtggcaagggcgagttaagggggcatacttgcttccttcgatttgagtgacttcccttttactgtagtgttgcttgcactgtcattggcatactcaaatgagagttccgatgcacagccgtcagctcagtaatagcctgaatgttttctgtagctgagaaactgggctgttgcctacttctcattcctcaaggagtagtttttctcattatggttgtaattagtcattcctcctagaccacagactctttgaaggaagtctgtttactccctcgtcctgcattaatgaacatctgctctgtgctagcaccgttgtaggcctgagagacacaggctttggggtacccttccgggttcagggtcagtaccaggaagcatagatgggagattgagcttgtggcatgtgctgtgtggggcctctgcaagctacattctgtcctttgcggtggggactgtgactgtgggattgacttgtcccctgtgcaattgctgactatagtggaccatactcatttgtgctgctgtaggcattacccaatagcccttgtctacctcagagtctctgcatctttctctgtcctgtcctatggcaaccttcagttgggttggctctcaactttcagtctctgtgatgatagggatttatatgggtcagcccagagctgtgtccaggctctatgagtctcacccgtctcaacgtcaccttccttcataccactgtgaacttagtatgggcagccatctacactggacagacacccctccacttccatctctgtctcatttgcttccccacccccccccctttttttttaattggcaaatatccctacaaatgagcagccaaaaaccactgagtccagagggcagtgaaggagcagtttcctttttcagacattaaaaagatgctcttgtctcaccctctcccttcccaccccagtttcttgttagtgcttcaagcttgagatagaaccagttactgcttcagcgagtaatttttctatgaacaagaatgcctactcacagtggtgttgtgaagccaagagcccaggcgcggtaagattgctatgttgtgaaagaacagaaagtgacatcgcaggcccagggagtgcctttctttctgtgcttgtctccccaccagcatcctgcagcacagcatcctgcagcacaggcccaccttcttccggagtcttgctttcctgactgcgggttctgtgaggttggtcagggctatggagggcgggggatagggagctaactgttgctgtgagaagcagccgccggtgctcttcagctgggactgtctcccaggccactgaacagctcctgggtcgtaaatatgctcaggctaacccatctcacccttatcttgtggttcttgtctgttcacacccctccctccaatcgtaggtttgtgctgtggccccacaggtggtggctgaagttttcagcagtggagtagagagggaacggtgactgtggtgtcttctataaccttgaattgaacgttatttatattagaattaaacattcccactgcaaaaccaatttgatcacagtgttagttgtttttgctgaaccagagttttgtgaatttatagtctggcgttgtggtgctaccctcaccaaagcaggaccctttctccacaacagagcccaaatctgcgtaattaagtggtacaatctctatcaccaaagtgtcagggtttcaaatttaaaactcccaagttgggaaatgtgaagattagatccatagagcaattccagcttgcttataaagaacagaatatttttgattaccagttaagctcctaattatgtgaagaggtttattgcagggtttgtgcagcataggtgattagtgtcgtcatgacaacagcctctccctccttcctaccaccaggagcttgctctctgccaggtgctggctctttactctacagcctggcatactagacatctgtaccagtgtcgaaggatcctttggtaggaggggagacatataaactggagtcattttcctcctttccaggcgccaccctctgttatgtgaattgatatgaaagagatcccagctccactcactgcctcatattagaaggtaaaattcaagtgctcaggtaccttggccatttcaaatcctgatgccatccctggaggcctccccagccgggagtccttaagttggggtgatgtcatggcatcagttcagtcctttgcttgagtgacagcccatgcgctgaatgctttactgacagtttctactcactaagtcctacttcctaaatccatacagttagctcttataggagctcctccactctgtcccccagccagaggctgcagtgtatcagagaggcaggggaaatgtggagggagtgcccaggactcacaccaggccctgaagcttcctagaccttgtcctgaggctgccactgtgctctctcattggcgctttttccctaggtggttgagtgtatgcaaacagaacaaagactcagtggttagaaggtggcagatgttgatcctgccaattacttgccaaatgcatgaaattcaagaagaatgaagaccaaagtgtggacactttaccctttcttagaaatgggaacaaaacgcccatggaaggagttacagagacaaaatttggagctgtgacgaaaggatggaccgtctagtgattgccatatgcagggatccatcccataatcagcttccaaatgctgacaccattgcatacactagcaagcatttgctgaaaggaccctgatatagctgtctcttgtgagactatgctggggcctagcaaacacagaagtggatgatcacagtcagctattggatgggtcacacggcccccaatggaggagctagagaaattacccaaggagctaaagggaactgcaaccctataggtggaacaacaatatgaactaaccagtaccccggagctcttgtctctagctgcatatgtatcaaaagatggcctagtcagccatcactgcaaagagaggcccattggacttgcaaactttatatgccccagtacaggggaacgccagggccaaaaagggggagtgggagggtagggggttggggggtnnnnnnnnnnnnnnnnnnnnnnnnnnnnnnnnnnnnnnnnnnnnnnnnnnnnnnnnnnnnnnnnnnnnnnnnnnnnnnnnnnnnnnnnnnnnnnnnnnnnnnnnnnnnnnnnnnnnnnnnnnnnnnnnnnnnnnnnnnnnnnnnnnnnnnnnnnnnnnnnnnnnnnnnncattgaaaatgtaaacgaggaaaatacctaattaaaaaaaaaagaaaaataaaacaggcaaaaaaaaaaaaaaaagaagaaggtggcagatgtcctagggcaggcagccctcctcactgtcactgcactggtctccattttgagcctgtttcacctcctgctcctctttgtttctgggtgtgggaagatgggcagacattttcattctttgctatcctaacatagcctttttacattgcaaaacaattaaatacctgtgcctgcctcctgtctaagtcatttagattgtttcttctatctgcccacccaccacttagcacctactttctgtcccctgcagctttctgtctacactcacatcagtgcagacttttgggatgactaggacttcccccagtgctgtcccctccttatagcactggccttgtccattgaacacagtagcaatcttcacttggttctgaccacagggcctgtacatgtcccagtcatgctgtccttagcagccctggggaaagatgagctgttgagatggctccagcagcattgtctttcctgctatgcatgagactctttcttcctttctaccccagacccttctacagagaaggccctaggtctctatccttgcctatccacagtgtatgtggctgctgtaaggactaggatatttattccattctaacagtgaggtcaagcatgatcctcttggcgtttagaagacgaattggcagagggcttcttggagttaaatgccattacttcgttacactgaagagtaacaaatgacctgctgtgagaaatgacacccagaataggctgctgacatttccttggataaaataataggctggctaaacagactaagaaatattgagacttctgcttgccccacacagtgcctgtgttatgcaggcccaggctgtgctagctcagctgcttctgtgaaccagaggtctgagagggcctttcttggtgtttacctttgattctgcttgaggaaatgtctctgtgcttggaaggcccttgaaaaagggtatgccaatggaaaacatctcagaagctgtcctctgaatgcggttgttgattcgatgccctgagactggaaaataaagtcagacttgctcttagactcacaggatgggaatcaattctgctaaagagttttccccagggagcaggaggagacagttcacacccacatatgcattcttgatcttcccatttcagtcagtggaaagcgggcactgggctggactggatgtgaagcaggctgaggtgttctctctattgcatctgtcacctgagagaggtgataacttctgccgctgcaacctaagggagcaagcagggagagagcacctttctcacagagtcactgaacagtgtattcactaaagggtgtgctcagatcaaatgccgcctttctgagatcagacattttccgggagtgggcctctgaggactatcaggagaggattcttgcatccctgcaggcagtaggggacagagctgcaggagtgtatggctgtcacaagacaattcaggagggtcagatgaggtaccacagccatgcctataagtctgacctgtatccaaggggaggggggaaagttgatgagcaattgtgtctcttagggttgtgaatactttgggtccagtgtgacatgagtgacagtatccttcacacaggggctggctatctgacacctggctgttctggtccctgaacatatgttttcctttaatgaattagcctcctggggtggtggtggtgcaggggtcgttgtctatcctgtctagctctctgcacggggctatgtctgtagtgataggtcccataaaatgtatcagcccagcacctgctatgtccttcccccgtaatctaggcaatccgctgtttgccagcttacagagaacaagccctgctcagtctctagcacacacgcaccctgaaggccacaaggcctgggctcctccctgggaggcatccagaataggcacggatacagacaggagttggtggatgctgccaggaactgggaagagggtgggaagggggtgactctcataggatacagggattcttacccaggtaaggaaaatgccttggagtttatggtggtgatttcacaagctctttccacagacttgcacatgtgtttgcagtatgtaggtgtggcaaaggtcttgcttctactcattgaaagaatagatttcatggtatgaactatgtcacattttaaaaagaaaaccccaaatctaagcagtaccatagagagaactggggtattagcaccatttcttacagacccagggtcactgtaggtgaggtgtgagctggtgccaaagggctgggtcctgctgttgtgtgtaggacagtcaccatctccagactccgtaggtcagcacaaagaacctgcctgtcagcttctacccagggactttgacgtgacaactctctccccttaccttcctggtctctgtcatacacaaagaaccaggaaggcagtgtgctcatcctgtgtgtgccaggagcccttcaggtgctggagaggacgtcatcactaaggggtcggaagctgatgggctttggcccaggcgctttgtggggaacagttaggaaggtggtctgatgtgatggctaaggatgattgggtagctagaggcctgatccaggtcccaggtctgttgtgggcttcctgaattccaggctggttatctctgctgtgctgctgcttctctgcatgccataggctgctagagaccctgacagtgggaatagagttgtagcaggttgcttgagtgggtgtgtctgagacacggggtggtgggaaaatgataagctcttgataattgctagcagtgttgttagcatcgctggctttgcctagactttcaaaatggatgtgggctaaaatgttttcttcttaaagaacattttctttataaagatgcacatgtgtttgcaaataaaatgaaaataaggaaatgataaaatgggcggtcaatttctaaactgtttatgagcgttttcctgggtaatagtccttctcaggggccaagatgagtttgctcagatatctgatgaaccatttcaattaggcatctgttttctctactttcagaaggaaattattttgaacaccactgtcttttctgaagctcatctgtgcctctgccttctggggcattagatagtaacacagaaatgtttacccagagcagtttgggaagctctacctcaggaaccgcgctccagaggaattagtacagaatggatatgtaaacttattagaagcacagttttaaaaactctgatagagaaactttcagttctgttagggctttctagaatatgagctgtttgagaagtaataatttacaatatattaattatgataattaatcagaatgtattcagaatattaattatctgcaactaattagatattaaagttgagaaccattaagtgatgaggtgtgggtctcttgagccatttattcagtatgatcaaaacgtggtggagggaggctggcgtgcatgcgcatggccgggtttgctgtttgtttatttcacatggttgattgcttcttgtatcttccatacttggttctgcacagaccgggaggacgtggacaaggtcgatgtctccagtgtgcctgcagaggtgcttcgcaacattgaggctgacacctactggtgcatgagcaagcttctggatggcattcaggtgagcctgcagcttgggaggcttgggaggctctggccagtatgctgcagcccactgggaaggccactgggccacactctactagctggcttctgagctcaatctgtctacctgaaaaagcaggcagcctctctttgtctggagcagcacatagtcacctcagcatcataggcatgagataggtcattcatgctcctggttctgggaacagacagtgtgtcctgccaagtgttccagtacttggtgtgtgtggagtttgattcccatgctctgatctccccttgcttcggcctgtattctctagcctttagcaatactgtgggcactggttctcgagtccttggcaaactactgggcacctattccttaaaggccatcaggtcccttgactgtaccttctaggcttgtgagcagcccatagccctcttgctttggtggcatggctttgtatgcatgtattactcctactgtccctgatccatggagaggctctagctttcatagtcccgaatacctggtcatcgtgatggggacactggtgatctccatatggaagttagggttgggggctgtgatgttcacagaaaagccccctggcagcttggttttatgtaaacagtgtttatgtgtgtgttgaaacctgcacagtgcctaggacgtatctcattagctgctggggacagctcctggatgatttgtatagcagtggccaaagcaggcaaaccagccttcaaatgccctgcagaatggttttggtttgttctggcccagaatatctttcctaaacacctgctttgtacctggcattgtgttctgtgcttgagaaggagcaaggtataaggcatgctgggaggaccacactgtgaactggggcccagatggaggcagcaagcaccggctcccaggatcaagtgtggctaaaagagatgctctaggaggacaaggatttttgttgacagaggaggggagggactgaattccatgattttccctgggagccacttgcagaagccatgcaaagaaggccacggcctgtgccatgccagctaagggagcgtcttagccctcagggcagcaggaagccagctgggccacagtcgccctcatctttctgaataggtgtctcggctcatctactggacctgaaggtcaaataatgcttgagaaaatgtatggtttagaccccgaggcttaatctgagtggctcagccaagtgggatgtcaaggagacttgggtttgcattgcttttcatacccgaggctgacggagaaaaattagcatcccctgtgtaagtgaagagcgggaagctcttctttactctcaacgcagatggcccttgacttattttgtttctcgtaaagacaaatgtgcccactagagacttgtttgggcccaagcatcaatccatcacttcccgcctttgttaatgttttcatatttactccttcttcaggaacttcaggcctttccctgttagagaagggattgagctgtaatgtaaaagtttataaattatcactgtcgcttctctgattatgagtgatgggacttgtgccatttaaatacaagattatctggcttctgtttgtaaataagatcgccgtacaacagaatcaatgctggcctttcatttttcacctgagctttgttgtcgggcaaagtggcttattgacagggctgacaagcagaaggcaccacagtcccctggtgcctatgtttatagcacgttcacagctcagtgggagctatctgtctttccctcacatggttaggactgacctcacaggagcctcctgtgagcaggaaggagtagaagactctcagttccaccgttcgggatttgggagcttggctggactcttgtggctcaggcaatcccaagagcctggagacattagggctcttccatgcaagagccagtttcgttttaggttagcctgtgaggtataagcttggttaaaatacagcctcgaaaggaccagcagcctattccccaagggcctgcatggccctgtcctttaccagtggtggcttgttttctagcccactttccacttctggtcacacctctctctcctccattattattattattattattattattattaattattattttgttcagttggagtattcttccctgaatatccatttccttgcaccatggtctaggttgaaagcccttagaaaatagtcttgttttgttgaatgcagattctccttctggcctttacccccgtctctagttcttctataaggctacgttgacttatcaaagtgtgttaaccatccatacacttcctgaggggcttccatggagtcatggttccgaacgatggaccaaactagggccaccagcttgtggctaataggcagtgtcctcagggatgaaaaatgggtctatctcctgcatgtgggcattgtgccttgtatcagatccaaggtcctgcacaccaggtggatgctcagagagaaaggccactgccccaggttacacagcctttgaaggagcccacatttggaccccacggcttctatggcttctggtttgctgaagtagatagagtaagttgttttgcagggcaggttctaaaacagtgattctcaaccttcctaatgctgtgaccctttagtatatagttccctaacctgggttgatccccagctacaaaaggcggatttctgagtttgaggccagcctagtctacagagtgagttccaggacagccaaggctatacagagaaaccctgtctcgaaaaaaaaaagaaagaaaaaagaaaaaaatactttccttgttacttcataacaataattttgctataaatcgtaatgtaaatcgttttggagacggaggtttgccaaaggggttgacccacaggttgagaacctttgttctggagagtagaaaccacatctgtcttttgttttggtttggacactctgggtagctatagctatgtttgtttcattgtgagcctcagttggagattctgtgcccactaagttattgtagttgatctgctggctgttacttcctccagggtatggtgggcatgcctgtgcaggtgctgagggtctctgtggtgggtatggtcagcactgctcttatggcccagacctgaagtccagcggggctaggcgggagacgggcgagcagtggaggtgagcggagagaactggccaggggctgtgtggcccaggagagcagactttgggaaaactgttcccactgtagctgcctggagaggaccatgtacagaacacatgtgacttgctttgatggcttgtcaccagcaaggacagtccttagaaaggaagtgtgctggcctgctaacagccagccagtgcatttgaggagagtctgcagatgcactgtggcctagggtttcctaacatggaaggtgtgaagtaagagaagaaccctccatcctacctcaaaatgttgcaagagatgcttcttccagacagcttgagttctctcagtaggaaaactagtcttacttacttacttaattaattaaaaagattttttttgagacaaggtctttctgtgtagacttagctgtcctggaacttgctctgtagaccaggccagccttgaactgatagagtcatctgcctttgcctcctgtgtgcttggattaaaagtgtgacaatcactgtccagctagctttagctttattgcagcagttagattcctacttcatgaagggtgctcttcagtgaggctgccttttgattgaagtcccagtgctttgggaatgcactgacaccagcaaggcttggtggtgccgcctagattcttgctcatgtgctggtgtctcctcactgtgctgtgtgcttcagtacaagtgtctgcacagtgaagaaggtcgtttgtgtccctgtattgttataaaaacagctttgttctaacaggccacttgacaaggtctcaggggccctaacagttggctggctggtcattgaaggcttctgaatgagactcatgcctccttaaaccaggcacatagccgtctcactgagaagccccagaaggtgagctcagagaaagtactgagtgatgtggacctggcagagaggaccaggggatgagaaaataaagaagatagggaagtttgtgatcaggtgatgttgcacagctgatggctcaccccaagcatgcctgctaggaagcacaacatcttatgtactgtttgcaggggggaaatgggactgaatcagtggacagctattatacaatggcatgaagtcagcaggaagctcatcaagcaacgttgcacaaggagaacacaggatatcccaagctcaccatagattaagccttgggactgataaccgcagtcctttaggggataagagttgagtttcaggaactgaagttgcagggcccccaagaccctggccaagctattactggccttgccaatcatgctcctggtcttagagtaagaactagattttttttttctctgcacaccaggaccttaggaaatgctctcaacaacagagcagccagtgagcctgtgtggtaggaagctccagtatcactgttggcagggatgggagtccttgtatgttgactgaaaggtgtatactatgcctaggtttaaataaaatgttaaattaaaatgtgaagtgtggagacacagtttgtaaccacaatacaactctgaagactttgaacaaactaactggaacttctggcagctagaattccagtcattacattctgcgtcccagtagacataagaggagaggattagtggactgagagggtctgaggagatgaaggggcagagcaaacccagacagagagaatggctggagggaagatagcagtgggaagatgacaacagaagcttgggcttttggtttgttttattttatgtgaggagttacagtgtgggtgccacattcaccttagccttggaatcttgacccttgttgcttagagttaataaataaaaatgaatctgagagagagagagagagagagagagagagagaggcagagagagacagagagagacagagagagacagagacacaccaagtgcaaaccatacagatgagaggtgggagagagggacagatatgagggacatgcagagggagggtcggtggtaactataggatggagatgaggtaggtgagaaacagggatggcagaggctggagaaagcgagaagatatgcttgccgctatgaagaaaagatacctctgaaggagactggattaaaattttggacccttatggtctagctacccctcaggagtcagacttgattgggtgggtagagctctggctcctgattaaaggctttccagatgaccactcagctagttcacagccacctgtaactctagcttgaggggaccccatgacctcttttagtgtatgtgtgtatcaccccatattaaaaaaaaacaaaaagaaaagcaaaatatgaaagttggacatggtgacatatactttaatctctgcacttgggaagcagagttcaaggccagcctggtctacatagtaactttaggccatccaggctatataatgagagcctatctcaaaaaacaaaacctaaccccaaaccatgatagtataaggagtgtagctgggggaggaagggcatgtaagagttggagggtggggcactgaggtgcatgaaaatacatccaaacacattgctgtgcataattagtaaatgctagtgaaaaactggaagggtttctaagatgaggaacatttgtactgcacagtcttaggcttggccagtggacatcttgagtcctgagtaccagatagcaaacttactcttgtagctcacatgggaagtatctgagaatggccaccccaggagctgccgagggactgtatggctcacagcctggggagtgttcctcaggcttagaggagtgttctggactgtgctcaggccttctatgtggacccaccatgttgttcaggttggtgtggtccatgctggaaggagatgctgaagaggcagaggccagagggtcatgagtttgaggccggcttgggctataccttggtggaggcagtacatcctagtgcctgggggatcatagtcccatcccgggaagtagcactgtggaaggagtccggcctgcagccacagacactttgaaggatgcaggagcagttgttttttcccctaagcacacttagaggccagcaagaggtggagagtttacaaagaacttgattggcctagtcttttccagttgttttccagttttctatttttcttttaaaacaggtctttcttgtatagcccatgctaaccttggtcttgtgatcctcctgtcttggctctgttgctgacacacaggttatctgtaaatgctgctcttggtgtctatagcttcctctgggggatgacttctggtgtaaacagtgggaatatacatgaacagattctgctgggtggatagttctttacaaaggattgcatgaagacaggtagctggcttctggcctggtgaaactggtttgaatgttagtgcttgggggtgcaggctggtgattgacccctatggaagtctcagcccatcactgtcatggagtccaaggtccaggtagttaggagttctgggctgccagtgcccttctctggctcctaggggattattcttgcgctctagccagtctgttcatttccctaacagcactcatgccagggtttgtcggctggccattacttgctgaattacggctccgtgcttgcctaccctgaagtcatactattactcttggactcattacttagcaggacagcttctttgaggagaaaagaaccgttgccttttataattagtcatttacatttccttttccttggggaagaattattcaatctgagaactggttggtggccctggcggaataggaatgggaggggaagtaactccattatcctggaacttgctggtgagaaggccaccagagaaggctggtgcctggagtgggcattgtcctggcatgggaggtgaccttctagtagagcttcagtgaccctcgggaatgagcttagacagctgggacttcaaacttcctgtgtcctgggggctcactgttacttactcagttcaaaggagggagagtaagggaggaccgctgtgctcggacaggaggctctggcctggccttgtggacagtgaggaggagaacagcctgtaggacaacctactgcctccggagcgagtggatggaccacgtgccagctcacagacggaaacatggacctcagtggggtccctgctgagcctggctctgtgtcctgaagaaatgtgatttgagagtcttggtcaataaaatggaggtgtattaaatggacaaaatcattccgtaactgcgctactgagattcactatgagtgaatagtaagcaagttacaaatgaaataaaaactaataatttaaaacagtcttgaaaaaaaacataaaaatccacgtttttgcctgaacgcgagggtattcctttaagtcacctgactcgccattgcctgaatacgtcagtcagctgatctcctgctgagagcagccagggtgctctgaaatttctgtgaatgcttagcgcatcccttctgacatattcacttttcttgagtccttctagtctcagtgtggaaggagggccacgtttttcagaaggccaaacttctcttcacaaaactgaacggggctcacagaattgggtgtgccataccagggtcctcaccagctatgcttgttaattctgcctgtctaacctacaatgctatttctgtcacatcgtacttcctctgtgcccttcacttatgcttcatagtaatcctttgtcaagacatatatctggagatgctctctccccattatggcatatcagcttctttttcagacagtgccttctttttttgttttaaagatttatttattttatgtatatgagtacacactgtagttgtacagatggttgtgagccttcatgtgattgttgggaattgaatttaggacctctgcttgctctggccaaccccacttgctccggcccaaagatttatttattattataagttcaccatagctgtcttcaaacacaccagaagagggcatcagatctcattatggatggctgtgatccaccatgtggttgctgggatttgaactcagtacctttggaaaagaagtcagtgctcttacccactgagccatgtcaccagctcagatagtgccttctaatgaccagaaaagtcttagttttgatagaatcattttgggctgtgtattatcttctgtgtcatgactaaaaaatccttcaccaactcacaggataccttatgtctctcttctagaggccacagatgtggtagtttctttttccattgctgtgatgaaatgccccaataaaagcagcatgaaggaagaagggctcgttctggttcgcagtcagatcatggtggggacatcctggctgcaggagcaggagctggcaggtcacatctcattcacagttagaaagcagagagtgacgaatgcatccacactcagctcactctgtctattttctatagacaagatctcctgcccagggttcaggtctgcccaagttaagttcatctgcttattcaggcctggtcaccagtgagtgcccaggccttattcaccccagagtttggctgtcaggaattctcgactccatgcttctagtgtggggagctgcttcacagagagcagcactagctgggaggaggggtagctagagcagcaggcgcaccaggctctgtggtgtctgctcatttctgcctgcagctcttccagactcactccagggaccttgaaagtggaccagccaagcggctgattgatttctggaaattctctctctctctctctctctttctctctctctctctctctctctctctctctctctccatatatatatatatatatatatgcacatatatatgcatatctatctatctatctatctacataattttccccttctcccttaaccccttcacatgttaccccataagtcctttgcaaatttatggccttttattctttgtttattattggtgtatgtgtgtgtgtgtgcgtgtgtgcatgtgtgcttgagtgtgagtccattcagtgttgcttctgtgcatatgcttttagggctgaccacttgggattggttagccagtcagggtgctgatctttggggaaggctaatttgccccctctaagcagtttttaattgcctggtgctgtttatctaggggtggggccacataggatttccctcatccacactggcaagtcacccgaatgttgtcactgtttgggccttgtttagggagccataatgttaggatgtcacaggggtagcttcactgtcatgtagaagacacaatgctgtgtaagtctttcctggggctctggctcttgcaatctttgaacaccctctccagcagtgttccctgagcctctggtgtagagttgtgtagaagatgtatcgttgggactgggctcgccacaatcagtcgttttggacattttagctggttgtagctttttaaatggtttctgtctgctgagagaagcttctttgatgaggggtgagagctgctcttctctgaagttctggaagttcaggttcacactccaagtacagagaatgtgtgttcctctatgtgggcgaggttagtgtcattgccaggtcacactgctggatgtcctgccctagtctgctgtcctcctggtgctgtctgccttccttccctgggttgctgaggacattgagacttccagctctagtaggtgtgtctcgttcttctgtggctttgccagacttcaccatataactccattcttagtgttagctgtgcattcgagggccactgtactgttttggcagattggtatgtcacagatgctctcctgttatgatgccacttgcttcttgtcaaggtcccatcatgactccctcttgtctgatggcaccaaacacttgcatctcctttatttgggcctcttctctcctctccctcctgactgtgtatgtattattgaaagtgctcatcttcttgcctcctttccttccccttttccnnnnnnnnnnnnnnnnnnnntccctccctccctccctccctcccttccttccttccttccttccttccttccttcctggcagggtctcactatatagctctacctgccctggaactctctgtgtagaccaagctggccttgaactcagagatctacctgtttctgcctcccaagtattgggattaaaggtgtgtgccaccactgcctgacatctagtaacaaaatcttattttttgcttccttttcaaacgttagtggctgtttcagagcaacttcagataaaccataaccctggagtgttcccatgtcatccctccctccctcccccacagccacacttcccctgttctgaagaacacctgcattaacgtaacacacttgtgactgacagggcactgtcaatgagtcatgaccaactgaaactcatagtttaattaacattgtaaactatgggtctggcagatgcctaacaacatgtgctgtccattagtcctcagtaagcgtccgtgtgccacctgttcatccacctcgccttctgatggaacctggtccccatggttttgtttttgccaggatgccacatggttggcagggtggccttcccagcctggctttgctcaccctgttacttcatctctggtccatgtctgtctgtcctctatccagcagtagctctggcctgaccactctgcactgtcttactggatcctgcccacagtgttataactctgagatgctgcttgccccgtggctacaaatgagcccagggcatgttcctacagtggcttacacaaggaggctgctgtcctgctgtgtctgtcaggacctctcagtgttggacaatgatctgtaatcagcaaagctggggacaggaaggttgggaatgcacttggggtaggtgctgtggtaggctccagtagatgcagttgctcaccctgcacccttgtgagggatatgctgcccgtctttcataggtgagaagcaggaggaagttgagctagcagatgggaaacacagagttaggcaaggcgccatgtgttttcagcggctggtctgtgctgactgcactctgagaggcttgccacaagcctgtccttgtcttcgtccttcccacctcttctcagaggctgtaatggagacattcagggtatcgctttaaccagtgcttctaagcttggagggacagctaatgtgatggatgacataatcacgattcacaatgagttcagctgcctggaataccagcccagaaccaatcaagtgagcacgctaataggaataaatgtaaaatcctgcattcaagttcaaaaacccagtcagaccaggtcagtgggaagcatttgggacagtttgggttgactgtgtcctcggtgggaagctctgtcatcattttgtctccattatggctcttgtctcgtagctgatagccctcaccctctgtggtcccgctctgttatttctacacggcacaatcaggatccttccacaatttgaatcttgtagctgcaacagtggacagctgccctttccccctgctgacatcattgggcagctatggttctttctcacctcctgcttgtaactccttcagaatggcctcctcccagctcttgtcttgccccacactccccctttcctgaatatgccatgctccctagggaccctgggacctctctgctttactgcagcccaggtctcacatcctcaccgtgctgctcccagccaggccctgtcctgtatcccaggaccagcattcaccatgctcttcccttctgtgctgtgctgtgtctatataatacatgttttgtccccagattagcacagcaggtaactgctaagtgtggcatttcccgtgtcgtgtcgtgtcaggtcaagtcagagagagagagagagagagagagcgagagagagagagagcgagagcgagagagagagaatgaatatgaatatatgagaattaattcaacagagtggccctaaaggtgcgccctggcctggtctgtctgtctttgttggcgtaggctggcagcccagtgctgggccagtgagaacgctgctggttttgctgctggttttgtcttctgcctttgccagagtgccaaggccttgaaggttctttcaaagcaggacccccacttccccttttcctcttatagaatggtatcattcttgcctcagtgtttggattctaaaaagccagcttccctttctgagctctgaacaaactgagaagtaaaacaaaacagtggcagatggaagcaaaggagagctgtcgttcttgctgcacagtgagtgggcttgaaatggtttctagtgtggaagccaaataactggctaaatccacactgtctctagccagtgttggtaggctggggctgggcaagaagagcccatagggcctctgtcctcccatagagcactgattagtctcgtgggtgggggtgaagctctcaccatgtaaagtgtggggaggttaggagatgtgtcaccctgatttcttcagctgtaattggggtagccatcacagccccagttagctgtgtaaggaggcttgtcaacctcagggaggtgtatcagactagaatatagtaagtggtcagtagggccttcctgacccagaggctgcaaaccacccttagctagtctctctcatctctatctagttcagactgttcataaattcctccacccaaatatgcacccacagactggagcagtaacctcctgctaacctcctcggagaaattaagtctcccaagttatacttggcaagctcagatccaaagacgattgatgactctctgaagagctgtaggctagaaccaaattttctatggcttttaaggttaggtatgttagaacccagttagtcctgattctggcttctgcttcatcgcagctagcaggatgcttggccctctgggattcgtacagttcctcgggacctcaagttctgactatgagactgagcccaatagttgctcctccggagagctgactttcacgagagtgcatgagcctgtcagagatctggccttccaaatctgggtaggaggccatcctaaggcccagggcagttcccaccatgttcccagatcctgtctttgttgctgtcttatgtctctggaaggcctggcctggcctagccctcacgaggttggtagacacagttcttcttgttctaacccttgcatatgagtgaactggaagtctagaggctctcactgcagttttgtctgggagagatgtcccagcatgccttgctcttcctgttgtagatagacacctctatagcttgtaggctttgttagtactgagccacagtggcattaagaacttctgccagccagcgtctgtccttaattctttctgtcttcctggaaggctccccattcaggatcaggtgctgaggctccatgctattggcaggctctgaaggggacggagggctgatgcttcctcactctgctatgttgcctgctgactgcagacacttgctgcccttgggtgcaggccacctgggtgccccaccatctgtgaagctgcagaacgtgctccccgtgggctgagagggagtaggcattcttccctgctctctcgcccgtgctccatgctacttctgagtgctctgaggtttgcgggctgccatttgccatgctatgtcgtgtctgaaagccttcccctctgctggcttctgtaatgtctgaggctcagaaccgtccaacaatgcggggtgctgagtctcatctaatagatgatgggacccgtgcccagagagagcacacactgtagatgtcacatgtagctaaatattagctatgcttctattccaagtccctttcacaaaggctccctccccaaatctgcccccaacccctgcctccagtccatatgagcctcacccgcatcactgagaagagtcagcgcatgccacttctcatgcagtggctgcattcttagcacttgagtgctgcgctgtcagcacatttgccgtttctcattggctccctggtgggccgggtgctggctgtccaggtgcccattgaggtggtcattccagccagtggttctgctcaatgagccagacgcatgggtgctggtttgttcaatttaaatgtaaatatccaacattaacaaatagaaatgttccatgaagcgttcctgggagctgtgtgcatcctctgacatcagatgggagtgagacctggtggtgctgtgctctgttggtgttatgcagagtgtggccctggacctgtttctcgtgaggcaacctagcagtgtgtagttggtttgtttataaaatggttttgcattataaactcttttcaccgctttttcctctttggaggatctgggttaccggagcgggtggtgctcatgtgtggtatgtctttatgtatgttcacccatgtgtgagtatgtgtacagtggtatttgtgtgggcctggagttgacattgcttgccttcctcagtcacactccactttacttggagatacagtctcttggttgaacccagagctcactagctgtggctagtccagccagccagcctgatctggggatgccctgtctccttctcccaagtgctgggattacaggtggcttccacagcgacttggcttttatgtgggttctgggtacctgaatttaaggtctcaaagttgctttatcctgtgtgcatttaatatatgctgtaatttttcccccttaggacaactacacctttgcccaacctgggattcagatgaaagtgaagatgctggaagagcttgtgagccggattgatggtaagtcagtgtccagcacagccttccctggggcagggagagttctagcgggaggttagggaggcagccttgctccccagccctgccagacgccaccatcctgttctcatctggccagtggtacctgggtctgctagctctcagccaagtgcgtccttagcaggagaagctgctgttctgcccatccagcctgtgctccagtcaggactcagtggggaaggagatgcagtgctcttggcagccagcctccctcctgggtcagctgcagcttctcatctgggcagcagggtggttgctgatggctgtcctttgccttgcctcccctgcctgggtgtatcatttgctatcaaggaggatagaataatttctccatggaatccaattaattaccaagtccagaaagaacatcttcaatattatagaaaaattatagtgtgtgctccggcaattttagattatgctttcatgtttaagtgaggcctttgaaatactttttaccttcgtccttaaaataattccccctgcgatgtgctgaatgtcatattgcaatagcagagtttaattaaatgaaacttgagagataatgcttgcccattccaagcggagcctcctgatagtttgttaaattaatgagcagagtattaacaaagtgacgccaagcagaaccaggcctgtgtatatatgtgacagcagcctgtcagctgtgagctgtagaagacaccctgtttcccagagtcccggccgagtcggctgagtcacttgaccaagggtacagagaactctattgaggtggagtcctggctgtgtgccctctgtgtgtgcaggccccttcccagccttcccctggctgctcccatggtggaagaaaattgtcatagccctcttcataggagagacttggtttgggaagtgactgagtgacattataaaccagagccaaaaacttcgaaactgtgctacgttcgttccttgattgagcctgggagtcgtctctgtgtctgatggttattacctcatttccatattatgaagtctcacgcacttctagggctgctttattggattcagtgtgtttagctgcttttcaacctccctccgaagtactgctctttctctcgtcagtgcaccctgtgcatttattctgcactcaggttgcgttcttgcttggctctggttgaagttttttcctaccagcgatttcacaagtgtccccggcctcatttagttctttgaaatactatttgcaggagctacgagttacacagttctagcaggttcttcttttcctcctgtgcccctcagaaggcctattttatattttccatgagccttaagttgtggccagggctggcttgctccagcgctgcagttggggaaatgcttgaattgattttttttctcgtgctgcggttcagaaggaggcacactgcagatttacactgtgattgttccaaagagcagcagtgactactgcagagctgcccatgtctgtgctctgggtaaagcatctttatctccatgcaaggatcagctcttcacagcacaggatggatgccagtgtcccagggcaggctgtgcaacctgcttgcttgtgttctcataatagaagctctgaaaatctgtgtagctgcaccattgtgaggatactggactgtgcaagcaggaaatgcctggtccttggggctccagccctggctggcagcctcctccttatcctgcacccacagtatttggagaagctgcagggctgcagctcccgtagctccactggactcactgtaagcctttcatcagtggcaggatacactgtgtagaaaaaaccctaacctgttgcctgatttctgcagttctagggagtagaaggaccgtgcttgtttcagagagcattaactagagagggaaagtggttgtggccctgctgacagagctgttccaggtggatggtgtgaaaaaggacaattgggggttgcatagagtcagaagagaggcagagtctagaaatgagaagcccctgaagggcagtgactgttgaaggtgggttccatcccccttttcttatcataaggagtagttaaagaatttttcagagacacttttaagaaatttcccattctgagtaacgcctcccaagcacggctgaacctcttaaggaaggtgccgtgtggacatgagggtgcataggtgatgggtagtcatgtcttctttggagacagaggaggaagcaggcagcagcctttgaaatggcactggctggggaagcaaatactgtctctagagtgggcagatggccgatgagaaattgtggaaggctgttggaatggcagcttgagccactggagatgggacttcagagaaggtggagagcgaggcctttcacttctgcaggttcccactgaagacaactcaccaggcannnnnnnnnnnnnnnnnnnnnnnnnnnnnnnnnnnnnnnnnnnnnnnnnnnnnnnnnnnnnnnnnnnnnnnnnnnnnnnnnnnnnnnnnnnnnnnnnnagagagagagagagagagagagagagagagacgataataataaaatatgattcttaaagaacaagagctaaatgaagagttcagtgagcaggcttaacatcagatgaaagtggcaaagctgtctgtgccttgccactagagttctgaacatgagatgcagaaaggtagagatgtggacgtgaatctccgtaggaagggagggcagaggttagtaatctgaaaaaagaatggtgccagctctcaggttcaagaggccagtgaatcatgcatggaaccaacagagaaactgtacaaatacattgcagtggatttaattaaaccaaccaagggaagaaatttcacctttctagaaatctctcactatatagatttagatattttcaatctctgatcctcctgcctcaggctcctgagtgtgggaatgagtcactaccatccttccagagactgtttaagtcatagccatcagtgatggctgttccttgggaatggtctcaataaatacaccagacgatgtcatcagtctgctaaagagcatcattctggggtctgcatttcagcaaatgcatcctataaataaaggtggaaagtgaatacgcttgtaaccaggagaccggtccctggaagctttagacccaatgtaggacacagcttagcaccatattatcccgtggggagagaaaggctgttccccaagaagtctgcagcagaccagacagcatacttccagagaggtacaatctctttgaggcccaggcagatcactggctcccagggcatttgtaaggatttgagatttctcatgtgagcacagctacattccaagcaagagctgatttgcaacccttactctccccgtgggggctgcatgtttgtagccaacccaagtgctgtggttgctggtaagggccccattccttcctaatcactccgttttgccctagagttgaaggagcagctcctgggaaaggagtttattctgggccaggcctgccttgagaggccacctccccacctcaggagaagtgagtctcacttgggacacttggattgcttgtactgggtattaggagacactgccacatagtgccaggtgccctggggcactgtctgaacaaggccaaggcatggcacctgtgctaggctcaacatcactcccagtgttttcccctttctagacacttggtttcttggtctgctgtgagatgcacacactgcttgtttctgtggggagaagcaggtggaacctgcagctggactgtgactccagccctccacccagcctgtgtggacatgccagactggatgttttcggaaggtgcatgaaagcatttattcagagaaatacagacccatgtcaccattctgcagagccaccaccatcagacacctactgattgtactagtgtggtataatggtctttaccatctgccagaagtgctgccaggaggagcattagtggtcttgggacattgttgtgcagtctccttgggctcttctattccaccggaactcaagaggacccatgtgaaggactgtatgtgacaaggaccaaggtccacaggccagcctcgacagcccaataggttttgaatactctgggtgtttgctctgtggtgcttgtcctccaggcccgctgcccctcaccgtgtggctctcctctcatgcccgtgtgtacctgctgctgcctccttcttcctgactttctgtcagcagtggttttttcctcttctagtgacctctcttgatttctgtctgactcagtgctgttgcttctccaagattagttgtgacccctctttgtagttgctgagagcatggccatgaactcaaattgcactgggtaaggtgttgaccaaattccaaacggctgaatgtcaaagtccacaccactgttagaagctagactatggcttatggcttgtaaatcacagtggctgcacttgagtagcttagagcagggtttgtccttatacagcttttcttgtggtgggttggggagggctctgtctgatggtagcagcgggcagagtgtccttggctagtacctgaggtaggaggagaaagggcttgagaaagggagaaagggtgtgtacgagttcctagtgcatccaccagagactggaacacaaagcccattttatttggcagcccagcatttggccacagtgatatcagggggcagcccaagttgagagggcacttttgagctaaaggacactgtagtcaccagctcagaaaggacattaggaagttgtgtaagttttagtcctattgaattcattttacaaacatctaaagtcaggaaaggttaagggcttggcatttttattcaggaagaataaggctcatgccaagggacttcaatgactaaaagctacacgtgtcttacagttggttctgtccatattcaagtaggtgtgtgtcacagagcaccctagaaggcagaattagagtgctgcctgtgctgccttgtcctgcctctctcattatttaaatttatttaggagtttttggtgtgttcactgtctacctagtctgagttattaaagctctttataggtagtaaccagctgctcccacaagttagtaacttcctattgcggtgataagtgttcgttaggctcctgcctcctagtggaatttcagtccaaggaatgtggcatgtgattttgcccatgttgcatctggaatgcttgtgtatatttgaaagtgagattttacactttcccatcaaatcttaacaagcccctgcacattttgttgtcattagcatctattatatctgaaatcacatggcctagattgttgccaaagtagaattgccagacatgagcaggcttctagcccttgcctctcaaaggccgtgaccaaagcacctttgcagtctcaggccagggtccacttcaggccttctcttcatgtcatgtctgcagtagcacaggcacttctgtataagtgaaatgtctggtgtgtcttttgacatatgagacataggagcttgcttgatgttagatcacttgagcatatacggcttcagcagtgcccaaagagatgctggtcatgcccagtcagaaggttagactatagagggctagctcacagacatgagagtgttagcccttcagggagacactgctaccgtcttcaagaagcctgtttcgggaggcccagggacgctgtagggtggcttcagggagtagagaagaggcaggaactggagaactcttgactcttcctggagccgtgggtctactgggctttgtctcaggttcttagaggtagcctaaagtagagagacaccgttgggcctggtgggctgggaaactccgcagtgagcaagcctgagcaaaaaggttgttgaggaaggtcagccagagacgctgctgccataacattgaagctgttgctggaccaattaagctgctgctgagctactgaatgcaccttcctggtttctcatttgtggtgcgttctcttccctgtagtaaagacagcactaacgttgtctcccacctaatctctcaaccctacatggcttcagtggtcgagggtgccagattcaataagtaaaatacagcttcaggtgaacactgacaggtttgaatgtaacatgcctgggcagtaagtaatcagcactcactgaagctcagtcttccctgggcttcctttttcttatctggaacccttccatggataagcgcagaggggaaaagtgtaattcaagcccagtctaagctataggctcacttttctttctagacactggacagaatggaggagaatatggccttaaatgtaatatattatttgaaattatatacacacttgcatacattgatatatacaaaccatttgtatgtacatagagcacacatatatgggcctgtgtgcacaaaatacacacatacacatatctgaatacacatgcatacatgcctatatacatatatttgtttcaatatacactagctgtatgcgcttatacatatcctagtatacacatgtagataatcctatgaatatatctacttgtatatttacacatgtgtataccatatacatataccatacctgcacatacatgtatagacacttgcatatacaaaacacttttatatatatacattgtcctgtgtatatactcatatatatctgtatatacacatttatacacatttgtatacatataagtacacatacacactcatacataaatgtatgcttgtatatacatacatacatacacacacacctgtacatataattgtacgagtctaagtacacacaactgcatatacatatcatatacctgtatatacacacatgtatctgtatatactcatatacatatctttttacctgtttatatacacaataaatgtaaacacacctgtgtataacacactagcatacgcatacacacatctatatatatatatatacatatccacaattgtatacatatgataaacctacctacctatacacacacacacacacacacacacacacacgcacacgcacacgcgtgtgtgcatgtaccctttagatgtataaacagttcattggccattcattactgttcttgtcattgtcctgtagatgtttcaaatacctgtgtcctggtctgttgggagcagcttctcatcttctccaggggattctcatctgtggccaaggcttactgagctctataaagcactcggctttcactgtgagatgctgtgctgaagctggcatccactgttcttcctaagtggagattttcctcttcagtcttactagtgattctttgcaaggctagcctagggttcctattctgtgttgttagatatgtttgtcatcattcagagcctcaggaggatgggattgtctttgtagtgaccctggatattggcctctgtgctgtatcactgtgtcaatgaagtctgcaggttcagccatcatgacctcatctagcctaattaacaactcctcaagggctccatctcccaatacaaataccctattaggtcagatggcatgctgggcacagggcttgtgttccgctgtagctactgaccagatgatggcagagctggctcctagaatgaggcaggccaaattggaccatcagccttcaacacaggggctttagagaatactaatattgtgtttcagagtgttatgtgtgtttacattggagaaactgtcatcatgacttcacaattagtaggaggcagggtcatgtcttgtggaagtgacatggaagaacttgctaagtaccagatactccaagacagggccatgatgtgacaggaagatctgagggtcctccaccccttggttttgctcaatcttagataccaaaagtggtggaaaatttagattgtactggctgaaactgcactcaaagcgttgtgttccagaaagttttgtcctcagaagtttgggagctcgtgaagtgctgagcccggcctctgtgagtggaccacatgctgagatgctgaagtatgagagctattgtctttgctcttctcgttcacatcctaggagaaggggccagatacagacagacacatgtatagatttgtggaaagaacttggtgtgtcccaaggagtgggacacacttacaaagttggctggaggtcctttttaatgtcctcacagccttgtttgcatctgcatgtgggggcaggccgtgtgctgctgatatgtgaggtagtctctagtttaccaactacctgagaaacagcccacccatgtagtcagcagcatcaggggaccagttttgtgaataactggcagcctgtcttatagaaagtgcttcctgtaactgtatatagcatcagggaccattgtggtctggtgttggcatggagacaggacggagagactgaccatgaagagtaagcaagctagtaccacatcaactggcagagaagtctaagggatgggttgatttccagcttcaggtttagacagactgtagatccaaggttttagaggctgagtgtcaggaaagatgtcggtattgagttaaaatagggatttgggctctggagactagtttgagtgttccagaagaaaaggagacctcagacctgcccaggaaccagctttgagcacgttgggtctccttttcctgtccagtggtagggagtagttccagcctcagttccggaggttagctcacctgccatcacctgctagtagcataggttcgtttgtcctgtgtgtgaggtcaagagagttataaggtgcttatagtggctgactcattgtagctcctgggtattgagttacaggagaggccacttctgggagctggggaggggcctgtggtcaatatttttaccaatattgctcccatttccttaaggaagaaagcactagaacttattactgagcagcagtcctacctctgcctgttaagtggctttatctccttgtacattttccctttcttgggtttttaattccagttaaatgtgattttaatgaaatttctctgaaagctgtcgtgactacattgtaaggttaaaattgacttattctttcaaggtaagattcagttacagctagtaaactagattcagttttattaccagctgagtgaaaatatttttattaccccgacaaggtaagcagtcggagagcagagaataaatcagcggtgtggctcaggcccgggccgtccttactgtgaccgcctcttgccacacagcagtccgtctccagtgtgtatcctcattaggcctcagaatgggcgattctaagctggaaatgatggtggtgtttcatttgagacatgcagataagctgattgaaaagcatatgtgtaaatgaggtccctatgggcccatgccacagcctagggaagttcccttgggtagaggaagccctgtgtgaaccctagcccatggggtttcccaggaacatgccacagtggccagggctaggcgagagccagtcttcaggacttgcttatgaggcttgctctgagggttggggccccagttctctgattggtgtctttgtatgcccatttacctaccggccccttgggcttcctggctttcttcctaaatggtcagagtgttatgttctcctgcttatacagtcatgatctgtggagacaatgatgacctttgccacccagggctgcccttccattcttttgggacatctctgctctcaaggcctgatttggaggctctgtgaaccagcatagggctctctggcctcccttagagagcctggagtcagccagccccatgcttgaatgtttctgtttttgcttttttctggcttgctcttctaccagcttttgtttcaagtctggttgcctcagtccacatggttgtcttgggatcatggtttcaggccaataagccatcttctccatctccacttttaaactggcaccctggaagaatagcctgtccctgccttggggcccttcttcaccctccacttcttgctgtttgtaggccctgctacctcttccttttccttcccagcacaagctcatcttcagtgctgttccagaacaagttgagggctctattaacaccaagagtcagtttgtcatcccacttatagaatggagacaccccaaggatcctgggacgtgtggccttctggtctgtccatacataaatttcctgcaggacaagattgcggtctttctccccccctaccccccctacccctcacccccattttaaggcctcacactgatgggcagttggcttgtgactgcagaggacattctgtcctacattagagtgttaatagttgttctgagagccctttccccaggccacacttagcacagctgcagtggagtgccgttagaaagaggcccccagcaaatctccactccccacccagcccatttcatggcttgtgggaaagccaaactgcttcagttactgcaagatgggaccccacagagacccagccactgccccttggcattgattcttcactgcccccgcctcttccttccaaacgctgagaagttctgggacaaggaggcagaactgtgatgggcaccaagtgtggagtgtttaccacctggaagtgctgtgtccaccatgggcaataaagtcaagtgcatgaagcccagcaagctctggaccagatgatggtgtctccatggcccccatgctgagattgatctgcagggtttattgctgagctgagaccagttaattacattgtaagcagagacttccaaatacagagatttgccctgacctcaagaagaaaagtcttggcctgaatgtaggccatcagttctgcttctgaaatgtccccagcatccttcctattcatggtttctggagagggtctgcgtgttttgtctctcttgaggtaaaagggtggactctttctcaccctccagttaagtagctgcattggcagggcctgagaaatctaggacaaatgagtatttggaaggtcctgttccctcccagcccattagctaacccccttcagttcagaggtggactttttcagcactagatctttcttttctctcagaattaggcactgtgcctcttaggcctttggctgtgatgatgaccatgagcaatactgtccttgaaatgacatttatagcaaactctcaaatatagtatatttattcttataaatccagacctcaggggctcagtgtttagagggcctttggcttgctgaccaattgctgcagggataatcagctttctggatggtggctttgggggccgatgacaaacactgagtctgctcaagaataactatgatgtgaggttatgctcctggatgttggcatgttggggatggcctgtgtgtcccagcatctctggtgccctgagtttcatgtccgatggctgggtctgggtgttgctgctatgctgggtcttcacagaagggtctaaccctcaaggctctggtttcactgtagaaagtcaatgatgaagttcaggttctgctgggagcttccatgtgggtgtttatcacatagtactttgaagatgctccatcccacccacctgtccaccctcctcataagccttggtcctttcttctctctcttgagtcattcatccgccctgcagttgctggtctgtctgcccagctgacccttttgtcaacatggaaatcttttcctatgtgttgttccttgggtcctgagcctggaaaagagcaagtcttacaatgaggtgccatgctgattaccaaggccagcatagtacttacagacagatagaggctcctgtccattctccatcctccatcctccatcctccatcctccatcctccatcctccatcctccatcctccatcctccagggacttggctctgtggaatgcagggaagtcaggagtgggcagggctatgatgtgctaagtctgaacactgagcagacactggcagctgccacagggaggtcttggtctagattgcagctcagacagttttgtggtggctgtactcccagcattaatctggttcagcagaggggaagtgtgtcctgagaacatggctgcttcagcctcaccgtgactgtgtcagggttgactctgaggaactgacctatcatgtatctaggtttttatgctcctttggctgggagtgtctgccttcctcagtttagttagggtcttagcatgtcatttggagctgtctgtctggcacagtggctctcatcctctctcattcacagtcttgggtgctccatgagctggactcaggtgagtcaggccccctcctttgtgccatgctgcagagaggagcagacatgaggtgaacgtgtgggcagaccctaaggtggtccgttaagagctatgtcctgtgtggtggtatgtcttgatggcagtgtggcaggaggcctttctcatcacatcatctgagagtctaccttgcaaagtggtacctggcatgctctttgctcttgaagcgagcagctggttggagaagcccatgcagtcagggcctgcaggtggccttagccagcagtcagcacagcttgggtcttcagtcatacagctataagcaagtggatttccccaagcatggcattctgtgacgttaaagtggggtctcctcaggccagcctctggatgaaaacccacctctgtttgcagctctgtgaaaccctactttaaaactggaccataaagctgtattgtcatctgtctgtggcgattgtgtctctgagcacaatgaggaggaacccacaaagaccccagtgatctctgtatcagacagcagagtctgaggaaggcctgaggttgagaggaaaggcagcatagggtatgaccagatgtgctctatgaggctctgccagaatagacataggcaaggccagaagtctccacgtggagactgagtctgctcctgaaagcccaagctgggaatgagcatcccattcaggaacactgagcagagctcacaagggtttcctgtatcttcagtctttcaaacctgatttttaatgatgttcttaaatgcgttaacttcccttggagccctctacccgtagatcagtggaaaagaaagcatactggaaaggggcctgtttagaaaggttctttagaacaactcccatctgtgttgtctggaaatcagcagtttagttcacaggtcagcatcaactgctccacttcacagatacttcacggatataccagcagtccagtttggtagagtcaggttagcaacagcagtgacgtgacctagtagtagccaggcttcagtgtcggctcgagtcagcaggagggaccaggaggaacacctagagaagttctcagctgaacctctctcagggaagtgaagatcagcaaagactcagaattattgcacagctagctgtaccagcaagccatgtgctgtctctgttacactctggagtcctgtttatacccttcaaacatcagtgtcctccatgtgccttgccttagcacttatcttgtctcagcacttgcatggactctccacaaatgcagctcaattacacagtgtaaagcggaccaatgcatgcatgtttttagcagagaatccttcactatgtgtcctttcacgtgcttgctttagcagaacatcctttctcctgtgtctgcttcagctaaacattccttcatgagtctggcttagctttttgcctgtgtctacttcaggaaaacactccttcatgtgtttgccccagcaaaatagcatccaacacaactgactctccaaggaacccttacatttccactttagttttccttagcactgaggggataggcccaggcacccctctgcccaaagccacaaaggaagatttaaagttgctgtgggtgaaaacttaaaaacatcaacaagaggacacatggttaataccaaacaaacacagagtctcggctccacctcccaggggcatggtgggggtagggtggcggctgcagtggtgacagtggtaacacaggtgaagaaggtggcagtgatggtggtggtggtggttcagggaactacagtgagccaaatgtcagtcaaaactgagccttaccctgctcagtggctgaactggttggacagggtcactgagacagtgttgtgtgaccttgtaactagagaaatagagatcacgccaagcagaggcagagtggtccccactgagtttgtggaggagtccagtgaggcaaatggaaaccatgctgtgtggattatgagagattggactctggagaagctcctgagtagcaggaggggctgcttggagtgaaagaactaggaggaagatgatggggtgacacttgtggtctcacggctgtgtacctgtgattggtgtccatcctagggagttgtactggcctaggagaaatgtactggccttttagaaaatatggatgaagctattaagttccgagaaccacagaggcaagcggaaagtgagcacgagatgccagcaagtcagcccgagtcacctcatagtcaaagtgcttagccccactagaaaagtccagggccatgacagatggcttaggaacatctcaggctgaatgcagtagagccatgtgttcggcccactaaaatgaaaggagaaccccaaagttgctagccaggaaaaagcatcccagaaatggaggcaaagtgaacactttccagaccaaaaggtaaaagagtcccaaagagagcaggaggaactagaaagttaaatcggaagcagtgacaatgacagctgctgtgtggagagagggaggagaatcaggaaaacacagcatcatgctggcagggaaggacagattagtgtcagggtcttcatgctgcgcacgaggctgtgcaaagcacacgggggaactgaccggcacccaggcgatgaactgtgtggcgacaagaaagctgagctgtggccagcgagctgtgctggaggcagagcagactcctaggaaggcaagaagagtgtaaaggtgagcagagaatgatggggcagttggagcaccaggagtcatgctccgggctccagctcagcatgcagagaagttcaggttaatggtcctgccaatcaacaggcagatctgtcacactgcactaaaaagtaggatccacctatgcgattcatggagaaagttcatcttaaagacaaagtcacttgatttaaaagtaactcgatctcatgccactctaaacaaagtgaaagtcactgtccaaagtcagagttcagaatgaagaatataatttttattcagtataattgtatatgtatttacatatatgctatagaaaccttcatatttaatacataaaacattttacaaaattttataagagcaaaagtcagtcacccgctcttactaccaggtattaatacgtgcaccgatagtttcaaaatactcagaactgaattctaaacttttaagaagtggatggctttgtgtcatagctgcaggttttgatcactcctccttaagcagtaggacaatagacagagaaccagtgagggcacacaacacctgaacagcactgtcagtaagcttcatctgcttgacctacagagagctctcaggatgtgtgtcttacctcacacatctgtagagcagacatttcagggaggctgagagggtttaaggaatgtgcggtgtgttttctgagaacagtggagttagtgtagaaatctgtaggatgtcggggagctgcccagtgattctaaatccatctatattcctctaagtgaccaagtaagagtaccccataggagaaaccacaagggacagtaggaggcattttgacatgagtgaacagggaaattcagcagtgcagcagcagagagttcattaaacccagacaaagcagtgggtagaggggagcacatagtaccagacacctgttcctgaaggagacccgggttatcaaatcagggaccccaattgtgacttaaggacttggggtgcggagttaggtggagtgaatccaaaagcttgtttagaaaaagtcagtaaacagatgtttatagtcaactgttcaggaaaaacaaacaaacaaacaaacaaacaaacaaacaaacaaactgccaatatgagggctgggacagacaccactctgcaggccccctagacatgaagaaaatagggactgttgtgcacattttgacaatacatttgacaatgttatgaaatgagtatagttttctaaaaactgaatgacacagccagctagccctagaaggagcagatgttctgaacatcaccaaacttatgaaagcaaaggagccagagcttaaatcttccttcaaagaagaccccaggcctccactggaaaacactcagcaaagaataactgattctacccgggctgctacgaaagtaaacgggcccatgcttccccgtttattccataggctggtgtctctcttcttcacagtctttaaaaggtgcttttaaagaaaactatagaccaggatcctctgtgaacgtaactgaacaaaactttttagcaaatcaaatcaaacacagcattaaaagaataatatatcattgtgacatgtgctgtattctcgaatgcatggctgatttaactgttgaaaagcctctgatatagtccattatgttaaaatatcaaaaaaggacagacccataaaattatctcagtgtgtgcaggagaagcatttgacaaagcccagtgttcgttcttaatgaaagcaggcagcaatccgggagtggaggggaacttactaactctgccagagggtttctgcagcgatgtgagtctgaatgcttcctccaggcctgttcattctcactacttctattcagcatgcattcaggtagtccagccaatgcacagaggcaaaagcagcaaatggaagcacacacagtgcatgaatggcccccaggctggaaaaggagaaaggaaaccccttcatctcttgagagctggggaagcaacaaaagaactgactagaacccggaggagagtttcgtaaggattcaggacaccaggccagcacataacagtgtttctacataatagcaagaagaaatcagcagtcgaaaggctgagaagattgcttggttggtgggtttgcgtttgacactcagaactcacatgaaaaggataggcatggtggtgtgtgcttgtaatcccagtttgggggaggcagagacggggatcctgggtagccacccagcctgcttacttggtgagttaagtgcaggccagcaagagaccttgtctcaaaaataaccaggtgaatgtggatggcaccttctgaggtgtgacattccaggttgaatgcctgtgtatgtacatacatatacacgcatagatattagcaattgagggtgaataactaccactggttactatagcataaaaatgtgaagtctgtcaggaaaacacaatatggctacaaaaatacagcggagaaaattcagaacgacccaatcatgcccatagacttggaaagttaaatgacactttcccctaactgactacattcagctcaatcctagttaagatcccagcctgcttttctgcagaaaaggacatgctgatcttgtagttcatgggcagacacagagcccctggcatacctagacatacccagcaagatgaacaacatcgcaggcccaggtttgactgagctcaagagtggtgggtgatcaaaatcatgcatttttgacattgagctaaagatcaccaggatggaagagcatgtggagggagctgcacataaggacaattgatttccacaaaggtgggaaggaagttcattggcagaatacacattctatgtaaagggacttgcaccatgccttctccatgttaaaaagtgaacttgactggatgaggccctttaaacctcaagttctatagctttgtgcagtgaagttaggttttggagttgatttcttaggaagccatgtaaaccaggaagcgagcataaaggagatttggacagatatcagaattcaaatgtgctcttcagacgctcccatccagagtgagcatagctgccttccagatgctgcagttcctttttggatcttttcagaatcatctcttcagggttgtatgggacaaggcctggtaaagtgcctgtcttgttagcatgaaacctgagtccagacccctccttccaggtaaaaaggttagggtggcactgtgtaacttcaatcccagatatggagacgtggagacaggaagatgtctggggctcactggccagccagctcagttgagtttctgagctccaggttttatgagatatactgtcaaaaatacggtagagagggattgaggaagccacccgataatgacagctgatctccgtatacacacatcacctggacacacacacacacacacacacacacacacacacgttgaatggagaagaatcaggaacgaagcctcatggggctgtctagctaccctgccatctgctctgcttttcttccacaggctttgctgctcggtcatggagagtgtggtcagacctactgagtgctgggcatccaggaaactcagcacaacctcttccacgactctgttgggttgctgctttctggtgtggtgatagctctgtcttggagcggcttatggagatgcttaggagcgcatctgtgaagcaagagtgatctaatgcctagttgcctcagctctgtgtagctcaagaagagcctgtagtttagattatgttactgtcaaaaaatggaccttaatgcctctccagggatgagaggactgtgctgtggtgtcagatacatgctgatgctatacagcctgccaggaggcttaattatattctgggcttatgtcccaagaatgagaggtattgtctcctggtttaggtgaccagtccccaccctagagctgtctagcacccaccaggatccctgttagtataacagagacaaggcaaggttttccaggctccctgtcagcacctggcacaggagctggtgaactgcccatcacacagcagggggcagtctctgtgtgaggctacaacttctcgggctctcctcttgcctcctgggctcctgggatgccgttgaggggcaggtggcccctccaacctctctggtctgagctctgggctcaggagcagcagtgagaatgtttgggatttctctctttgcctgatcagcacattctgaaatggtgttaacattttctaaataaatctcatttcctattgatttccattatgatttttgaggaaaatgcctccttccccccaggaagttatctgaccatcattagtgtgtagtgatgtgtttgttggaagtgttacagctcattaggtggcagtacaggtcacttgtgttcctaggcactgcccgggcattctgattttactgaactggataatctccaggagcagaacttagcctgacctgagcttcagggctggcccagatgtcctttcaacccagtcttccatctgtccctggggccttgttccactctcctatccccttagatcagggaggagcaagggcaaacctccttgattggagtcttgagatagtaaggtctactcctgtttggtgattcgagtaggctgctgtgcttaggcctggtcctcagagccgggttccccacagccctggtctccatggttcggcttgtctgcttgcatagccctggcgtgagtgactccatagatcttgcttgccctaagccacctgtgttgcatcctctcccacttgcagctcctttatcattttcctaagcactctgctggagctcggtcctctagccttgctgagaggaagcctgcctgtttcctcagggacggtgcttgctgctctcctcacttccagtgtggttttctgagactgggtgtcagggtttcctctcttgttcttggtttagcctctcatcctgttaccatgacgcagcaggtccccagatcctctagttggcaggtgtgttgggcacagcacccatttaggacctgactgttcctgcggcagagaagcagcttttcggttgcagaggccctctgttgaccgtcggttgctcatgtttctgttctttttttatcctccgaactgatgagatgatcagaatctttccctttaatcaaagctcattccagccaggcccagcaaaagctggtggtgttcagcctgccctcagctaagcatagggattgaaagatttctttgtcagatatctaaatgtgggccattgtgtctgctctttgcgcaaataaatctttgttgcctggtcccgtgtcaatactgctaacctgtagcgggagtgccagggtgctgtgtgtttgcatcatttacctgaacttgcagtccagaagactaggtgctttctgcaggatttccgcttatgggcccaccattgaaagcactgaggagagcgctctgcaggctgtggctgctgtgccctctgatgactttacagcagtgtaccttgccctgccacacaggacattttggcttgaaagatgatagtaattatgtctgcccactcactcattatgtttgaaccctgattgctagtgaaatggaaattctggttttggaattattgctgaccagattcctttatcagtgagagagtgtgagctcacagtcacttataaaacaggagaaaggagtcattccagcacacacattcgcacttccgatgtatataaattggaagtcatgctagagtttagcagtctatcttacactatgttcagaataggaggtagccctgccagagactcattatgcacattagaagctggctggggagctggtggctggtccactttctcatttattacctgtttcctgagtagcatgcagtcagtgaaaaatggccacttccctataatcaaggatactgtccaggtagcttacaggctgggcattctgtctgccagaatcagtggttccacctggcagtgcttagcccacacagtagaaaactggccacagatacccacagaggtcctcatgattccacgtgtggtctcaccacctaatgagtgtggcctttgccctttagcaaactcctaggagttcaaggtcccacggtgagcagaagagaaggtcaggtgctcagaagcttggtggcatagatagcggagaggctccagccttgtcctgcttggctcttagaggtaaggagcacagccccagggtagagggctccttgtatatcttctctagggagtaaagcactgcaaaccttcccctgcaagggtttatgtaggcacataagcaataactagtgctgtcactgttgtggttattctgcaggactggtgctctacaaagggaaatgaccacatctgggcccatcatgaacccctggtagaacctgcctttccagtcagccatacccgagggctgtagcttctagttcctgtgcttgtttttacagggcagaaagggttggttttccctctctgccaggttactctgatgatagatagtccagaaatgtgtttaatttttcagagtagtctctggccagtttgtcttagaaaggtgctgcctgcctgcagggtgcatgttagaactgtttgttttccaggtcctaagatccctaccttccctgtggtgggtgggtggttgctactactggcagaatgtggccagtgtaggaggctgtggctcctggatgtaagtccctgcggtggctcattttctcctctttaccctctccgaatcttcagtggagatctcgagcattagctgttcctttgacacagagtctccaaggagaccacctctctgtctccaaggaaactattcccttggagaagttgagtctaaccatgaagacctggcagtcacttagtatgactatctgaggagtggatgatggagtggccgctgattcctacactgatgtccccaggacagctgaaggtagaagtgagactggctgtagcctgatagtagtagatcactgctgggagtggcccgtggaaccagggcacctgccaaggccacctgctctggtatcagctatacaactctgcaggctgtcctcattgcctgccatttccagatgccatggtttcctccccagtgctgccactacccttgggctacaggtccccaagcagccacctgcatattcatgagagctcattcctcatgctccagtgtagaaagaaccttgttgagtaaattcagtcattttctaaactgctgctttgcaagtgttcatcagatttgaatttcacatcaactgcagcgccctgcttcagtgagctgggccatagccgaggctgctgctgtcccagcagggtgtgcccttgggagctgcaaaggttgctgggatgaagagccactctagcccttgggtctttctgtcagtttagttgtgtaactagagctaatttcaggctggaagtgatttttgtcttctttaaaaaaaaaaaaaaattacccctgtagaattaggaagttgattaatcctgtttgcacaggtctgtaccagacttcttagtaaacagaatctagtatatgcagtgagtgagaccagctggaggagttgccatgtgggcagcctctctgcccagcagcacgatagtgctaggcctctttccgctgggcctggaaccctggttcttaagtcttttcctgcagaagcagcctatggcaaatacacagagacccctgtgtccttctgcactcctgtgggtctcagagccatcactccacccagtgttctttccctgggggtctcagggatatcacccctcttcctagaacccttccctcaaactcatagggccctttgcttctgtgaagactggagggaatatggctgaatatcagctctattctgtagctatgcactgtcttgttgtaactgattttgaattgctttctatttcccatcattaataagggcctaatctctaagctttcttcttgagactcagcccgtttgctgatactatagtaaaatacctgaaactacttacttataaggaaaagaggctaatttagctctcagctccagagattcatgcctagggcactgatgtcagtttatctctgatgaggacatgtgtcttcacagtggtggtaaagttatgagagggacagctcatgctacagaacagaagccaaagaggaggccagaaagtggccaggcttttcttttgtgacagctctcttgctgaggaccaaccaggactctgtgagctgcattctagtccctcctgagggcaagccttccccagcataaagacctcctccaaaacctgtttcttaaaggtttcaccacctcttccattgcatactaaggacccaacctccagtacatggaccctgaggggacaaagcacccctgaactgtggctcagtctcatgagcaccgtgccccagctcttctggtcagcagtgggcagagagtgcagggactgcctgtctgctgaggccttgtttttctgggaccagcctgtcattacctcctgtgggcctgactgcctctctgccacagcagcccagttaagtgtgtacagtcttagatagcagtgggtcatctgtaagcttcagacaggcatagcatagggattctcccttcaatggttggaaaagccttagttttgagacatccagtagttagctggtaggattctgtggtgactaattttatatcaacttgatacaagatagaattatgtgaaaaggagggaacctcagttgagaaagacacctccataagatcgagctgtagggcattttcttaattagtgattgatgggggagggcctagcccattgtgggagaggctgtccctgggctggtggtcctgggttctttaagaaagcataagtcatgatgaacaagccagaaaacagcatccctccatggctctgcatcagctcctgcctccaggttcctgccctgctcttgatgctgttgataatgaactgttctatggaactgtgagtgaattcagttcctccctcccctagctgcttttggtggtggtgtttcatctccgcaatagtaaccctagctaagtcagggtttatactttggggacaatgtttgttcgagcgtggctctcttgtttttagtacttagtcctgcatttagaggctgcctggtctggacaggaacaggtctgctgggtctgtgtacaggagggatgtgcctgggttaggataggatctctggaagcttgatggctcacttccttctctctcctttagcccctttactagagtcacatgtgtttgtgaactgccatctgggtgctggacattgagcccaggtcctctgcaagagcaataactactcctaaccactgagccatctctccagccccttaattgttctccccttgaagagtggactgtggagttcttccttaatggaattagttctttgacctcaggctcccctgacagcctgtgcttgtgttgtgcagagcgagtccaccggcatctggacgggcatgaggtgcggtacctgcagtttgccttccgctggatgaacaacctgctgatgagggagctgcccctgcgctgcaccatccgcctgtgggacacttaccaggtgagcaccaacccatggcccagccccaccccgccttctcctaccctgaagaatgcactcttcattgcaacaaagtctttataaaaagctagctctggtgttcctgtcatctggctctatgtagaacaagggaaaggactttctaagattctccttgtcacctgattgcactccagctggttggtgaccgtcccctcccatgctcactggcaatttacattttaagcagagttaaactgtaagtaatcatgtccctttgctgtacatccgagcagcttccagaaactttacactcgggactcacgtgttgtctatgttttgagttacttacaatgaagatttaaagaactcctcagacagatgcagcacaatatgaaattttccactcttcaccaattttgatgaaattcatgtcttgaggagattgagttttctggaagcatccgccttggctcccctgagtgtccattgcttattctagtctcttttcattttgtgtgtgaggcctgcggaagctgccctgtgtgtgcgcggggtgtgggcgctgacttgcagcctggggagaggcgtgcatctccacagagagctagggaggaagcaccaagtgagtttgtttgtttgtttgtttctttctttctttctttcctttctaaaaacaaattttacaatattaccagtatgcttttctctttttctaaagatttatttatttattttatgtaatgaatacactatagctatattgatggttgtgagccatcatgtggttgctgggaatttgaattcaggacctgtgctccctctagtcggccctgctcactccggcttgaagatttatttattattatatgtaagtacactgtagctgtattcagatacaccagaagagggcatcagatctcattatggatggttgtgagccactatatggttgctgggatttgaactcaggacctctggaagaacagtcagtgttcttaatcgctgagccatctctccaggccctgtgagtttcttttttacagtaaaagatgaactcctagctgggcttcgtggcacacgcctttaatcccagcacttgggaggcagaggcaggcagatttctgagtttgaggccagcctggtctacagagtgagtgccaggacagccagaactacacaaagaaaccctgtctcgaaataaacaaacaaacaaaaaataaaaaaaaatcaattcctccctgttgtgagagctctggatgggctctgtgccagggctttgcaaagggggcactgcattggtgttgggagtaggtctagaagatggggctctaggtgtctatgtgtgagcataaggtggcatgtgcccaggctttacatagtactcagtgttagagctttgcaagtgggcatgcagaggttggtgcaggcaggacccttgcacagactaaacctttaggggatctttggtttagaaattgcaggacatcgttggggtgctgcattttccccacaggccaggatgctgttgggcccttgtgcctgagtttggaactcccaggaatatagcatcacccttcattctaagcgctggtggtgcatctgtgtgcccgccctgggaatgttggggctgtggatatattttgtttggctttggtttttttttttctcctaatacctattatgatagttaatgctgtcaacttgatagaatctagagttacctaagggttaacctctgggcctacctgtgagagaatatttacgttaggccagcctctggacaagtctatgagggcttgtgtaggttaggttgaggtgggaaggctcctcccaactgacagactgagtgagaaggagaagggggtctgaactctagcctccattgctcgctgcttcctgactgcagataccacttctgagactttcccaacatgatggcctgtaccctcgatctgcaagccaagcatacccatcctccctcaagctgcttcgccggtgttttgttgaagccgtgggacaagtagctaaaactgccttctgtctgctctgcctcctgagttctctggtgccatcatggaagcctgtgtggtgatgctctgtgagctgtgtggttggatgtgttttcacggcagagcatgttcttgatttgtaggctttctatctaggacttggcagctacagaattcccaatcagtagtgctagctgggagttaaagccttacctggaactgttgggccaaaggagctgtcggtcgagtgcatcgattagctttctgttggatgacagcaaacacaacctaatatcctgtaaattgcaaatgttctcattcctgtgattgcttaggctgttcatgacccaggcctgctcattaagctcagagttccttgtaattctgtcccattatgaataaagcaggtatcaagtcagtcgcacttggagcagacggaagacagctcagctcagccatgtcctgcactgtttccctgaagtgctcagttggcattcagacactgaaactactaaactcataacctcttcgttgagttaattttcctgcaatttaattttgtcatgaatcaactcctttgtatcagagctcttttgtgaactgataggaccctggtcataagccttttcccatcttaaaataaaatcatcgtgttcccattttccagggctgagctgccctttctggcaccggaagcacatagccatcctcagatgacagttgagcagtcactctgcatcgctgggtgtttattggtggggccatccctccagtgtggcttaaggtcctcttgggacacaggccatggaaaggttgttgataagccccttgccccaggcccctggatgagactatggccaggaaatggatgaaatagattgtctttgagtgggacaagccatgggtcatgccaatatgtatcccctcagggttttctgctgtcatatcacaacagctggcaccagatgtgacagtcatggattgcccagtggtccccatacctaaaagattttcagcctgtgagagctgcctttgaggtgctctatagggtatggatctaggcttgccagaagcaccccctctagataagtccttacatgacagcaactaatttgggtgatgggctgcagctgaggggctcagttaatccagtcataggccactgtcctcgacagcccagccagccatcttgttttattctgcccatgtgtcagggggcacatagctttctgcccacacaaaggtgtgtgcttggatggtcatttgatgacgaatggcctgttgcattgctctcgacctctcacctgacctgttcacatcttaggtggaacacctcatgttatttaccatcctcactgccattttcgctgctctagggagaggtaggttggaagggagctggagtcagggcctccttgcacttggcacatgccctggtactgctcaggaaagagtcttagggatcccgagccactcagttcacacatattactgaatattttcctcagcccctggccttgggagtattgcagagaggatcatgatctcaaaggacctcgagagagccaggccacagaccagatgctattgttagtttctttgtcacaggtgttaggggaatgctgtggaagacctctagagctgggcagttcttgggagatgggtggcaagagacaagtggctttgagttgtggtcaatgtgcttaggtttctacaggatatctgcgaagaagaacattttatgttggaggagcctagtgaggttggagcagatgaagtgttctagggagggggtaagatcagtgcctacacagaattgctagaaaggctttagggctggagtcactcacatttggacattagttttgtggctgtagtgtgaaacaatgggctatgcagcgtggatgctgccagggccagatccctgttgattcaaatgttcttctgtgctccagcctctttgtgcaaaggccatgctcagggattggagatgagtctgtgtgtgcgggaagcttctggagtggcccctcctttggtgtggactaggactaggcttgaggatttcttccagcagatagagaacacatgtctcagttgagacttcctgtttgcactcatactggcttatgatagctactccttagagtccccacagggtgaagaactatgtttcccgccacctggaacctaggccaccattagccatgcaggtgggctataaagcagagccttccccagtctatccttgagagaccccagcccttgaggacacttctattatagatatggaaagccccagaaactgcatggcagagttctgtctctgggaactgtggcatcactgttgtatacactgcagagcttgtgcgattcacagagcagtgagtcactagttacatgctagaattctgttgttgcaggtctttcaagtagcatttggcattaaaactagacaggataaactggagcctgggatgaagaattatcagctcttctgcatgtgagcagcctgctagcctttaatggtgtgccccaggacacctgggtctagctgaagccattctccagcacattcaagagttgtaaggagggtcagtctgtgaaggcatggagggatgaaggttctgccccagagaccagtttgtaggaagcatggagtaggcgcctctaatgcttttaaaggaaagtgattttggcaaaggttgggtggcttacaggaggtggatcttgtccagaaatcactttagtaggtccagcctgtcagcatcagaccatgaagttggattaagttgtggtttctaaggtttttctgagctcccaggaggtgtgtctgctattgacatccatccatcctccagtccttccactgtcacctataatatgacacctgctccatggagagcctgtatgaggacacaaggcagcatcatggtgtctgaggaagcacccaaggagctcacagctggccagggaaggggacacacgacagagtcaaagccatgcttatgttgacagtgaagctaggcactggcagcttgggcaggaacctccctgtctagggagttaaggagggcagagtgggttctaaagcagggacctcatgtttagtctgccacacagactaggtgcagtgaggtgattgtggtaggctgtagtgggccagttgtgcattgcatggagtccagaggcaagtagtctgagctgactttgcctgaggcatggctggctatggctgtgtcgttgcacctggagtccagggctgaggacaggctcctagtacctgctacaacatcctttgctgctcccagctgacagcagtcaaggcttctggacctcctgggtgccacagcacagattcagtggctcaggaactgatggattgggttaatctaataagcccgaggaagcaggtctccgtacaacacactttttcataagcccattacgatttgagagtgtaagctcttcatgcctacccgcctataggaagcaagcatacatcactgtcagcctggtaaggatttagaaagagaacactcggcaagacttggttcactgcagttacgtttgcagggaggagccggaagatgaaagggtgagcctgccccctgagagagcagcagtagcagcaccgtgttctgggaatggagaggccagcttacagtgcctggagtgccattctgggctttgccactctccttcctgttttgatcggcagctttgtcacgtttggacctgggagaatgtgaaggagtcataacttcctctgcagttctggcctactcagtgtgagggctcagtagtgtgaaccaggcacatcccagaggagtgatgtccaggtcccatcacctcttcacacttctgacactgggcatctctcaagcccaccttggaggggatatttcgagttcttttccagtcagaaaagtgtgaggcatgtttagatcagtgtcccactgctgtcacaggtgcctgaggtaatgaacttaggtgtgttctactggaaatttctgtccatggtctttggacctgtggtgaggcggcatagccccttgggtgaaaacgcctcaccccaaggctgggatatgagagaggaagaagggcctggagtactctcactttcaagagcatatgccccagcttggagtcctcctaccaaacttagcatcttgaaggtcctcccacctcccagtggttatcaggttgtggacagagcctcaggcgtatgggcctttggaggacatccatctatatatagactttagtggaactgaaaagcttgttgatgggtgagtgttaatttcagcttctagcaacaggctgggcaggcggcagctcgtcgcctttgccatttagagcctatgggaatgtacagttaaagggccacaaactgctctttgtgttcctgagtgatctacagagtcttgttaagaagaacagtcagttgggccaggggcaggccttcgtctttcccttaccggcgtcttgtctccctgtggcattagtagcaggcactacatggcaacccattgtgaccactctaaatatttgtatttgcttcaagctagacaagaatagtagctaattttggaggcgaattgattggttatgccatattgtaattgtaaatgaaaagtatctactcaacaagttagttctatggtacctgtacatctcttccgagggcctcctggacactaggctcaggaccaagacagtataaccagaaatcagatggtagagtagttgggtcactaggtttgacctatgtggtctcctcttatcacagcctcttgtgggtgggtcagagcttgttgctcatctgggaaatagaagatacggagaaccaggcagaatcctaggctcgtctggcatcctgaccatgtcccagcatcctcataccttacttccaaccctgcccacatctgattctcagaagtagaagacagaagtcagtaagaaacagctctgggcttagaattctcaagactgtgcagcaagggattttgaagaaaatggcagaaggaagcttgttgctgtgggggtggcaaggaggctgcagcaggggaccctcgggaagacagagtgacattccctgagtggacgacatgaattgctgtccatgtggtattgtttaatgtatgcacagactcatccacaggagagagagtttgaatacaaatctttttaggatggtagtagggtccaggattggggacagcaggctgctctctgttgagaccctactctctggagctgagtagaaggtccttggactccctctgcctcatgcaaggtagtttaggaaagcctgcatttgcaagtctgagaagagcttgggacttggtactctcaatgtggaagtcatgaggtgatgtccccatggagctctcaaacagcccagaatgtgatatgttagaggcaagcagtgtgcagctttaccctcacagggagcatctgcaggtgggggtgggggtcactgctccatggagaaaccctggccatatgggtctctggtaggccactggacctctaggaaaggcctctcagaccttgattatccctttgaggtggtgtgggaactgtacaaggagacaggtgccagagtcactgagtagagaggtggagtagagacctatagaacggctgctcctccctatatgcagtaggcagtagaggacatgtagccaagggagggaagcccagagcatatatgacatctgatgactgtgtttccctgagggtatgagtctctttgtctgtgtggctggaatctgtggtctgaaacagaaatctctcaatgctagggctgctgatgtcatagggcatggacctctcaaagcatgtgcattcaccacgtggttcagtcaaggggattagtgctaactgacaaatgaattgatgaccttctaggacctgagtcctggattccccacccagggataggagtggctggctgttctgtgaccttgttggacaggagtggaagatctggaggtggtaacctctcctagtatcacaaagactttgttcttgtcctgcttctactaatctctgagatgatgtattcatgaatattttatttgaagaggaaccttcagcaatttgtctaagttctatgggcctctgggttcaagaaagccagggctgttagggggaccctagaggagcctgagttcctggcatgtgtgaagttgcttctcctgagcaggggtcaccagcaggtcacttctccagagagctagccattccccaataccaagatcccatttatctgctaaaaatacacagcctgggagggtcccagtatgattacaagggtggacatacaatgaatgataactcaggctgtgtgtcctaaataagaaccatatgctttagggaaattgttaaattctgtgtggtcagagaatccagtcatcctcctagggtgtcatgtggggacgctgagggggagggcacagatatgcctgcttttcacaaacgactgctctgtacttacaggacagaaatggataacaagacagtccacatgagagcaggaagggacagaacaaggatctgctaaggcctgagagccagagaagagctggcagatttcaagggacttgtagaactcttctttgagggctctctcctagctctggggtgatgtgcgtcctcatcctatggggctgtgttgtcttccagggcctaccaacctcctgctcctgggtggatattcagcgtcttccctgggacttgctcagagctttgttcagctgcctccatgaggtcttctctaggcacaggcttgacttcagcctggggcatggggtggactaggcttcacattcctatccttgctgcttcccgacaccattaggcttggcttcttcttgggaagctgattagaagcaatggcttacctgctttctgtatgtgcaagggtcgcttgctcccagcctataggacaatgtaaccacaagagaaagctgaaaaagggtccacttgaggtgtgggtgcctcctggctgtcccaagagccctagatctgctgttgtcactaaaacatagctcctctgggatccagattcccatggacagtagaaagggggtcaaggctggctctgtatggtaatcatgcgtctatatggacctgtctcattgtaaggtggcgttaaaggctacgtaggcacagtagatgctcaaatagttcattatcgttaatcttggcccagcttcaccctggcattaactctctgctagccttagttactgcatagatgtagactgtttctctgtacagcgtgggttatgctgctattagaagttgggaacacttaacctgagtagttagcctagtacatctggtgaccctgtatcctgtagaaatagtgtccagtacttagacaaaggacaaggaccaaaggcaaagggcagggtcatctttacatcaagactttttaactaggatctaaatagtcgctggggatcagggccacccacgtctcctccctgttcctgtatcagcccatatatctcccctgcttctctctcctggtactgacttgagatcccatgtcccttcctgtcactcatgtcaccttagggccaggggagaggaaagctgctttattctgccccaggccagggtttgaggacaactgctgtttgtagggagtgatacttgttcccaagctctgcatggaggcaggaaagcctccctggtcccagcagacaccatgctcttgggtgctttctgtccacatggccttgatttagagactcttcttgtaaacactcatctagctttgaaatttacttccatctttgtgtgctgtgaaagaacttaaaaaataagttaacccaaggcttgcttctgggagcttagcctggcatatccccagtgtgggtagtctcatggtttccagtccacttttctgtaatgttttgtttatggtcctcctgaccataaacagctccgcctgtttccctgatgcattgctcacagctttgcctcgtgagcaagtgtagggttatgtgtcccatgtctgctccacaacagggctcagccgctcggggtggcaggacttgggaagttgactgtgtttatgccacacagtcacctggtgggtttcaggctgtagggcagccccgggacactgattcaagagtggggaagcagtatctgaggctcgggatagccagagctgactcaggggtccccgggcctatgacaaggctggggccatatggttggttctcaggctcatggacacccaggtgctgctgggagccgtggaaggggtttcaagccttagctcaaccgggaacaagactacctttcatggtccctcaggcaaatagttgactcttttttctaggccagttgggactaggctttaagacattaggacagcttcctgggccagctgctgctttcttatcacagagcattgaaattaacctccaggatgtagtgcatggggaggtagtcctgataggagcaggtcagtgtgtgcatctcgttcagtgtctggaactcccgacaggtgcccttctccacttgtaaaccgtgctgtcacgaaccgtagaatggagtgtactagagcccagcacaggtgagcgcttcttagaaaagaggaagagttagcaggatgtacagctgatgctgaagccttgccccacatgttggagatggcattaccactgtagcacactcaccaggctgactgccaccacaggcaacccccatgtctttggatgtggatatcatgactgtagaggatacagtttgttcatggtctgtgctatacccagcctcactctactttgggctgtgtttccctggctgtatcctttcagctcctgagctccctctcagcatctgcttttggccttcctctgcgcttctcctctggcacagccaagagctttccaacagcagctcattcccattcccacagtgtggctccccttcctgcacaggcctgctagagcctgggtattcatttcccctcttggatgtgataacaggagacaggcactttgctgctgattgaagtcaagtagcagggccagcagcagggtctaggagattgctgatgagaactgtggttgggacaaatagcgctgacacacagaagcagtaccaatagagagcagtggcctcttctccttcatcagcctgtactggagcactggtgttgggcataggcttaggggtgcatgtgccctttgcagggctttgggggtagggccacttctctctggagctagtgtcttcttaatcttaaagcacggccgtggctcacaggagtctgagaaggcacataggagccaaggtcagcgtgccgtaggatggcatggctaacggtggaggagctgatccagcatagtgctcgccctgcttgagctctgctcacccagctcccttcagccctgggacttggtctgtgtgtgaaggcagaggggctctggggccttccaggccaccaggctagagtggctgatagcagagacttccctagcaaacaggtcagaggatggttggtggggaaaggagccctgatagtaactggggtaatgaatatgtacagcctcctttcttacagagacagaatttagaacctgggggctgggtgtagctcagtggtaaaatgtttgcctagcatgtacaaagccctgggttccatcctcagcactgtgcagtggagagtactctgaagatacacaccaatgggatatttatcttctcagcatttgcattggcaaagctgggagctgagaccactgctgcctgaagtgggggaagtctaggacacagaaagaccccacacatactacagaagtggggagactaggacacagaaagatcccacacatactacagaagtggggagtctaggacacagaaagatcccacacacactacagaagtgcggagtctaggacacagaaagataccacacacactacagaagtggggagtctagggcacagaaagatttcacacatactacagaagtggggagtctaggacacagaaaggtttcacacatactacagaagtggggagtctaggacacagaaagaccccacacatactacagaagtggggagtctaggacacagaaagatcccacacacactacagaagtggggagtctaggacacagaaagatcccacacatactacagaagtggggagtctaggacacagaaagatcccacacacactacagaagtgcggagtctaggacacagaaagatcccacacatactacagaagtggggagtctaggacacagaaagaccccacacatactacagaagtggggagtctaggacacagaaagatttcacacatactacagaagtggggagtctaggacacagaaagaccccacacatactacagaagtggggagtctaggacacagaaagatttcacacatactacagaagtggggagtctaggacacagaaagatcccacacagaagtggggagtctaggacacagaaagatcccacacacactacagaagtggggagtctaggacacagaaagatcccacacacactacagaagtggggagtctaggacacagaaagatcccacacacactacagaagtggggagtctaggacacagaaagatttcacacacactacagaagtggggagtctaggacacagaaagatttcacacacactacagaagtggggagtctaggacacagaaagatttcacacacactacagaagtggggagtctaggacacagaaagatcccacacacactacagaagtggggagtctaggacacagaaagaccccacacacactacagaagtggggagtctaggacacagaaagatttcacacacactacagaagtggggagtctagaacacagaaagatctcacacacactacagaagtggggagtctaggacacagaaagaccccacacacactacagaagtggggagtctaggacacagaaagaccccacacacactacagaagtggggagtctaggacacagaaagatttcacacacactacagaagtggggagtctagaacacagaaagatcccacacacactacagaagtggggagtctaggacacagaaagatcccacacacactacagaagtggggagtctaggacacagaaagatctcacacatactacagaagggcctccagaaagggaggtggtagaacagcctcaggaggttgggaagattggtcctagacagtggacccgtgtgaggccactcagaagtcttgtcatggctcaagtggtcttggggtagtcctgtggcagccctcagtgtaggtgtaggtgtcagccagcctacactgaatgcacactcactccaagttcagtcggggctcttaggcagtaaggggtgtcctctccacgctttgttgctgagctgcatgggagagttaacagaccttccaatggagatgagcaagagtgctctggcttgagtgaacatggatccaggactagatcaagcagacctcctttgttggccatctgagaatctggagaggccccgctgggacaagactgaggtaacttgagccatggctcttggtgttctgtttctgtatatcctcatcagctctgcttatcattaaagccacactgttcaaagcctgtctttccaggtctctgccaagtggagcaggccctcctgaacttacttcagtggcagctgctaagggcttctttctctttaggagaaagttactgataattcaccagccaagtaattgccaaatggcatagcagggaagcactgtcagaaagggcaagtgggtgagttggagctggttcagcaccggagccctcagaagctctcttctctgcaggtgcagctcatgctggcctctcctgtcactgtctgttctctcaggtcctcgtgtcagcagatgtgaggactgtcatttacacttaaccatcagaggctttgtctacccacttcaaatccatctgcagctcccgaaggacattcaagtcacttaaaataagtgctgggatcgtgtgcgtgtgagatggaagaggggccacccccatgccaggtcctccatgaagaagctcggaagctgtttctgtgggaacagagaaatggaggctccctcccagatatgttcctcagctcttcttccactccttcagtcttctaccttacttatggtgctgtccttgtttctgtgttcttggggtccctagggtgcctgtccttcttacgtgccaccccagaccctcagcagtgtgccgtctctcagacattagggcgggccttcaacaaaggtcagtgcgcactggtggctttggcttttacctcctctagaacttgattcagcatggacttgtggtctatcccctttttggtctggatttctctcgtgctcttgagtttgctagtccttttgtgtccacagtcactgctcagaggcctttcatgatgtgtcttttcagcattgcaggcctcctcaccttaggtgatcccacttggcagggtcactcgccccctggtggccgtcagggggaagcagtggtgcttcttcctggtccacctgggaatgaatgcacttgctcatcctcacatctttgtggccctgtggtctgatttaacaagtaccagagacatggagccttcttctcaagcctgaggactgctgaccttggcgtgtcccttgtacaactcaggttcctgctctcagtgaagacctttccttcccatcccaccactctcgatgggctgcttttcatgataacggccatcagacgccagcacctgccctcactctaccgtagactcgctgtccttctcacgtgtgggtgtaccctgaatcccaagtgctctcttaggccaggcccactagcttatgacccctgctacctgtcacccagcacccagcccacttctcccatttccatacctaagcctatggcttctgcattggaatgaccacccactgccctatcatttcccccgaggtgggcatcaccgcttggcgctaaggtgcgacctcctcccgctccgctgcttcctaagcttacattgctgcttttggccagcagaccctctttcaggattaggtgtttcaagccataattttcaaaaattcagtcagcccataacctgtaattcccaagtctagactgtttaacaaagacctgaaaatgcaattctaggaaaaaataatttaaaacattctttctaaagacattttttttaggaaggtgatttatttgagaaacataaaaacatgacagaactcttcataggcaagtttacacaacagaatgggctacagcatatttgcaagcatcagtactcaggaacagtatagcagtagtgtagatacagagccatagccagtgaaccacattcacagaggatggccagaaagtcaagtacataagcacactgctggttaataattgtgtatacccagcttttgttactgaggatatctgagctaccatggtggcttaccttaaacttatatgtgaaatgggtcagaccatcacatgtgccatcaccagagagccaagacctcaagaagttctctcttcatccactggggatgctgccgaattgtctgccttgtgcacaatgcgtggagtcagcgttgtgacagcacactgtcgctttcattcactgtcacaacctgcttaaaacaaccaccgtcaaaggaggaaggactggggctggagaagtggctcagtgtgtaagagcactggcagctgctcttacccaggacctatgttcagttcccagaatgcacatggtgacttacaactgtctgtaactctagttccaggggtgttgaattcttcatctggccactgtgggctcctgcactcaaatgcatatatgtgcataagaataataaataatattttaagaggaaaagtttattttggcatagctttgggagttgcatggttggggtgccagcatgggtccattgctgtcctgggaggctgggtttgcaggcaggatcttggttggctgtgagtagttaaagaacacttacttacctggacaacagctttagagacctggttctgcttattagaggggaaaagggcattttttgtcttggggaggagtctcccgggcaaggtttgtgtggccattggctagggcccgggtgtcggaagatactccatctgtgtactcaggggccgtaggcgccagggcagtgggtgaggaccttataaaacaagaagtggagcctgataactgtcagggcaggaaattcctacaagggttaatggtgggagagccagctttctggtgccaggcttggggtgagggtgggggaggggagatagccaactcctgtctttgaggtttctggggttgaagctgtctttacccttccttcatgaccctgggccattaagtctcacagtccattgcatttgggcctgtggcagggcagcacatcacaggaagagtgcagggaaaagggtgctcacctgtggcagccaggaaggcatggcgttaatttcagctttgaaatgatacagacacaaaccaactagcacagtgaactgcaggagtaactccaacagcttactggggagcaaacagttgtggagcacgggaaagagcataggctatggccagttgcatggaagcagcctgtaagcctgactggcattcagtcttgtatctccatgaatagctgcttttaaagccgggtgtggtggctcacgcctttaatctcagcactcgggagacagaggcagatggatttctgagttcgaggccagcctggtatacaaagtgagttccaggacagccagagctacatggagaaaatgaatagctgctttttctctttcagaaacacatctcctatgaaagtgcacttagattcatttttgtatgagatgctgttttgagcttcatgtgggactcaatctacattcgtgtggacacaactgattgagtttctcaccttctatgtgtcatgtctctgctttcttacgcccatagatgtctgcttagcgtgcatgcatgtagcacaagtgtggcagggtcagtagtggtggccaatggcacaacagcactgtcttctcatccagttgggaaggtgagtacggttcagccatccagcaacttcctagtcttgttgaggcagaagcaagctcttggattcatttccattcctggggtttcagcgtcctgatggctaggataacagtgtagacccgtgacacatttccaggctgaagtgcatgttgtgtctacattcatgaccattcccttctccggagtccagatgcctccctcctctcttacctgtatacagcatcccacaggccctccccaggggattgcaactttcaggatttcaccactgggctgtgattttcaggcatttagaccttggggattttagctgtgaagacttggatctttggcaattttaacattctgcattaggtcattatggaggaagggggagggagaagggagaaagtgtgtgtgtgtgtgtgtgtgtgtgtgtgtgtgtctgtctgtctgtctgtctgtctttaaagtctggttagcactgagaccacattggtacatggtatttggaggctgttgcaggttcgcagagccaggcctcacctctgctcagaaaggcctcgcagccccgcctggctcacagagaaccagggtcaggctgtcctgatgtcccacccgaaggaagctctgttctgtgaaacagatcatcccacacttctgctaagtggcttcagaccacagctgttattcggtcacatttgttccatttgttctggctcagcagggacagcatggcagggtgaccagcatgatggtgagagtcctccctgaatgtggcttacccggctagtagactctgtgtgctgaactgactcagcatgggccctggagggccaaggctggagcttgtttctctctactgggttgttcaagtgtcctcacggcatggtagctgaattctgagaaagtccacccaactgcctgtcttaatggcctcatctcgatttctagtgcaccttgaggaagtctgtgtccaaggggatacaaactccagctcctgatggggctgggtcaggttctgcaaaagcatggtgagggggaggtttcctatggcagcttccgtaggcacaatgaggtgacagccattctctccactctctgctgggaggcctctgtccacagctgtatcaactcagtgcagggggcatgtggcctgctgtccgtggctcctcagggaacacaagcagcagacctctggaggatggatggcctctgcactgtgcttgcccctacccattgccattggtgcgtgacaggccccatgctgttgcttcacacaagttttccagcagagggtggtagctgtcaccctttggcaggagtgagatgtcagattctcagtagacagctggctcttgatattctaagagagcagactgtagagttactggggactccagcctgagctacgcaacttttcttaatctcctcttgccttagtgttccgttagtatgaagagacaccatgaccatggcaactcttataaaagatagcatgtaattggggctggcctacagtttcagagtttcagtccattaccaccaggttggtagcagagagttagctctccatctggattcacaggcagcaggaagagagagaccctggacctggcttgggcttttgaaaccttgaagcccacccccagtgacacacttcttccactaaggaaggttctattccctctcaagtagtgctgttccctgaatgacttagcattcaaatatatgagcaataaaatgggggccatttttattcaaactgtcatacccctttagcccctgtaagatctgaaatgtggaacaccagctaagtcatctaagatccagatgttgctctcaagccatttgcccccctgcttttctggagataggccttataagaggcctttgcagaggtctgaggaccgcttggttgagtgtgcctagcgagtgctgccttccagtggtccagtggtggagtggtcctagcgaggtctgttccttctgcagaacctcccggggacttcaaggatgtccctgggactttctaggctggtagccagtgttcatctgtggtgtctggagctgaatcctgtaggtacatggtctccattcactctggggttctgatcacctgcttcaggtgctctggtccctggcactctgtgtggaaacatggctggtacatgtgggtagaagagctgccccaccctgacttcagtcttctgactgagggtgcaggatctgaccacctgggctatcccttcacatcactggggaagttggagctgatgaggtagcatgggtcttccttgagctgtcagtctgagctaagccaacctgagttcctcccttaagtctgtgtctggtgtaaggtcataaaccaatttgagcatcccaatattttgccaggcaaaagcagcctgtggggacccccagtgaacaggattgtatcattcccctcacatcaggctgcgagcataccatattctggactactccgtcctccaggagcacagcccatcagtcgggccaacagcccagcccccagcaggcctggagaggtctgcacaataagccagcactcacctgccacggccctgtctgctctatcaccaccaacaaagccagcagctgcacacaaaggcagatctaaatatgaattaagttcaagttattaaaaagtattgcaagtttttttatgccttgaatattgaaaatgggaatacatatgcaaatgcaatttaatcagctccactctaacctttgagcattcagctgagaaggactttgtgatcagggaggcctccctcttgggagaagggtgccagccagctcagagtcaaagcccctacccctcatcctgccagtgacctccagccagctttgtccttggctcagtgactccagccactcttcagtgtttctgccttgcttccactgactctaactctgttgggtgcttcttagagacaggtgatagacaggctgagaccctaactcgttcagtgtgttgacacaatagcctggccccatgcagagtcccctttatattatgtggccatggcaccacctcagcagagtcagctcccttttaaagtggcatggagagggccattggagccacacatgtcttgagtctgtggtattggtcgtcagctgccttcttgcatcccatttttaccaggctgcttgacacagtacctcctggcatgtagtcctcacacagagatctgcattttctctctggcataccaagtgcctaggcttggcaaagcatgttcatacaacacacccatgctcttgtaaatcttggggtactataagagaggtcactgtatcccagagcatgggcatggaagggaaatgccatctcagaaggcaggaggggtgaagtggctgtttgtggtctagggcatgggccatatctatataccacatttcttaggagccggggctatctgtaatcacagtcttagtgaaatgtggtaccctcctagccacaccccagggaggggacaatattagggctggggatttggatgccagtgaatcgggctcctggggttgcatagccattataatagactgggctaatgaatacagacactggttccctcaaagctgcaaagccagaggcttgcaaggtgtggcagggccattcctgctccaggctcactgagttctggaaacaatgtagtaggtaagagcacttgctgggcaagcctgaggacccacgttcagatctcagccccaactcaaaagctacgtatagctgcaccaatgtctctaacctccgtgctgtcaggagacaggaggattgctgaggcttgctggcctagccaaaaaaaaaaaaaaaaaaaaaaaaaaagccagttccatgttcatagaaagatcctgcctcaaagaaataatgagcggaacacctgatgctctcctgaagcctgtgcacaggcatgtggttcacacatgggcagcatacataaatacacatacactctcatacattctctgcactccctcaacacacgataaataaagataaataagggcttagcaggaagatcctccccaggctcctcattgactggtggatctctcccacctctgcccaagtgtcacacgacctcttctgtgtctatgtccatattgcttcttcttatgaaaacagccatcagaatggatccccaccacacaccacacccccagtgtgtgaggcatgcccctctcttgttttctaacatttacattcacagtatccctttatgtcactttctggagacacaggtagagacacacaaacacttctggtccaggcccagctgtggacactgccacgtggggccctctgctgcagttgatgccactgtctgagcaggtgcacctccctccccacgtgttagtaacagagtttggaaatccaaagtgtccatggagggcagtccagacaagctctgcccgtaagcgtggttaatgtcaggaaggagccagcagcaccatttcaccatttggaccatttcacctgatggtgcttcagttaagtatagggtagtggtttggcctcaggaaaacagtgttcctccccttgtagctatgaattcactgttgctaataaacctgtgtcacctgaggggcctggcctgcctcctggttgtagagcagggctgtgtataacccctgcttcagtgcctagcagggctctgtcatcactgtcaccacaaaacatgacccagttatctaaaccagataggggcaccccatgttcttaaacttagggagaccctgcagctatcctttgtctttcctccttgggaccactggcctgtgtcatcaagaatgagtttcttttaattaaatttcacatcctgtaggtgttagctcttgaacgctgtaacttcttcccctgaagttgacagtatctctttgagaaatgtactgcacactcgtttgccctcagaatacagggccagtggttgaaggatttatctaccctgcaaatggtgctggtgatttaaggctgggcttgagtctgtctgggttccatactcaggatggtcagtgacgggtcaggtcctctcagaagctacggctttgtacgtggacctgctcagcggcatggcaccatcctttccagagcaggtgccagctcctcccagggcctgctgtgtggatggaacaccactgggctgactaccttcccctgcactcccctgccctctcctggagtgggagtctcagatgagcaccgtggagaagccactgctgtaggcaggaagagggtctaaggcttgggaatgagaaccgcacggctgctgggtcctgagagaagctgggaggcggaaggattgcccgttctctcctctcccccgactttatctccacacattgagggagggcagaaagggcatcccagaccttcgcttctggagcctgggcctccttgacagctttctaaattctgttcattcctcaagcagtcatgcctgcctctgcaggctgcaggtactaaggcccatctgggagacaagatgaggccatacatgggcagactgagtttgaggacttagggtacatcctagggacatgtcccgtgagtgtggggcttgtggctccaaggaaaaaaccctgatccatgagctactctgaaatgtgccctggtttgcaatgagcaggctcaccaaaagaaatgcccccattgagggcagtcagagaaggtgacagaccattagaatacttccggctgtgatgttccaatgtaagaacgaagcctctgacattcagtaaatcaaagcacacacaaaaggacacatgagctgggtggtttgctacataggacccctatactcacaaaatggcaaaaccagctgacatttgtttagagaggtatagtactgcctgttcccagtctggatagcagcagacaaggacgtgatccctggcgttatgtggggcacggctagcatgctggggcacaggccctagcaggaaacccggatgagacagtcagcaggtagagagggcagatatctggctgcccaggactctctagatggcgcagccctgagtgttttgcccagatgtggctggtaatagtgtccagcaggtgtcctgctcagggccttgctgtggaatcacaacacagcactgattgcctgtnnnnnnnnnnnnnnnnnnnnccctggtttgcaatgagcaggctcaccaaaagaaatgcccccattgagggcagtcagagaaggtgacagaccattagaatacttccggctgtgatgttccaatgtaagaacgaagcctctgacattcagtaaatcaaagcacacacaaaaggacacatgagctgggtggtttgctacataggacccctatactcacaaaatggcaaaaccagctgacatttgtttagagaggtatagtactgcctgttcccagtctggatagcagcagacaaggacgtgatccctggcgttatgtggggcacggctagcatgctggggcacaggccctagcaggaaacccggatgagacagtcagcaggtagagagggcagatatctggctgcccaggactctctagatggcgcagccctgagtgttttgcccagatgtggctggtaatagtgtccagcaggtgtcctgctcagggccttgctgtggaatcacaacacagcactgattgcctgtctctcagacacctgtacatgagcacttagaggcaggatccctggagcggccggcttctttgtaccctcacatcgcagagcagacacacttcttggtcctttttttcagctgtgctctttctctgagggaccagagtcttggctctcacctcctgccttccatcaccagtgtctttcctcaagccccagcttcagtgccatttgcacagccaactgcagagcccccccgagcctgcagggccaactgcagagcctcccaagcctgcaggcccaactgcagagccttccgagcctgcagggccaagtgcagagccccctgagcctgcagggccaagtgcagagccccccgagcctgcagggccaactgcagagcctcccgagcctgctgtgctgctaaagggaaggtgcgattctccaggtgctgctgccatggctgccagtgtcctggcctgcttcccccatcctagacttctttataaagcctttctaactgcgttgacctctttctctcaagatagaaactaccacagtatgaactagctctccaggcactggattaataaactgtgtagtgtagcctcctctcttcattctttcaggagagacaccagaagctgggcagaggatgtggtagctggcagaagggtgatcttactctttctaccctcagcagcacttcccatgtgtgcctatttgagcaccacatgacatcagcacacagcctgtgaaggcacctgttgcaaagtcacagtgtgcagagaactgctaaaggtggccatcacacaccatctcaccgtgttagcagctcagtgtggtggggagagttacttgtgagttatcagtgtcacataggaatgtatgaggccannnnnnnnnnnnnnnnnnnnacatgtcccatgagtgtgggacttgtggctcaaaggaaaaaacccttgatccatgagctactctgaaatgtgccctggtttgcaatgagcaggctcaccaaaagaaatgcccccattgagggcagtcagagaaggtgacagaccattagaatacttccgggctgtgatgttccaatgtaagaacgaagcctctgacattcagtaaatcaaagcacacacaaaaggacacatgagctgggtggtttgctacataggacccccatactcacaaaatggcaaaaccagctgacatttgtttagagaggtatagtactgcctgttcccagtctgggtagcagcagacaaggacgtgatccctggcgttatgtgtggcacagctagcatgctggggcacaggccctagcaggaaacctggatgagacagtcagcaggtggagagggcagatatcctgctgcccaggactctctagatggcacagccctgagtgttttgcccagatgtggctgggaatagtgtccagcaggtgtcctgctcagggccttgctgtggaatcacagcacagcactgattgcctgtctctcagacacctgtacatgagcactcagaaccttggaggcaggatccctggagcggccggcttctttgtaccctcacatcgcagagcaggcacacttcttggtcccttttttcagctgtgctctttctctgagggaccagagtttttgctctcacctcctgctgtccatcaccagtgtctttcctcaagccccagcttcagtgccatttgcacagccaactgcagagccccccgagcctgcaggcccaactgcagagccccccgagcctgcagggccaactgcagagcctcccgagcctgcagggccaactgcagagcctcccgagcctgcaggcccaactgcagagccccccgagcctgcagggccaactgcagagcctcccgagcctgcaggcccaactgcagagccccccgagcctgcagggccaactgcagagcctcccgagcctgcaggcccaactgcagagccccccgagcctgcagggccaactgcagagcctcccgagcctgcagggccaactgcagagccccccgagcctgcagggccaactgcagagccccccgagcctgcagggccaactgcagagcctcccgagcctgcagggccaactgcagagccccccgagcctgcagggccaactgcagagcctcccgagcctgcaggcccaactgcagagcctcccgagcctgctgtgctgctaaagggaaggtgcgattctccaggtgctgctgccatggctgccagtgtcctggcctgcttcccccatcctagacttctttataaagcctttctaactgcgttgacctctttctctcaagatagaaactaccacagtatgaactagctctccaggcactggattaataaactgtgtagtgtagcctcctctcttcattctttcaggagagacaccagaagctgggcaaaggatgtggtagctggcagaagggtgatcttactctttctaccctcagcagcacttcccatgtgtgcctatttgagcaccacatgacatcagcacaccgcctgtgaaggcacctgttgcaaagtcacagtgtgcagagaactgctaacgatggccatcacaccccatctcaccgtgttagcagctcagtgtggtggggagagttcttgtgagttatcagtgtcacataggaatgtatgaggccagattcatgctaaagcccaagaagggacatagtcttttatgtagtaactcaaaagaaacggataaaatatcgtgagcatgtggacacacatgtacacatgggccatgcagcatttgaccagttattgctctatcaaggtctatcatggtgtccctaggaccacggacaggcattgctgtgtctggctcacactcatctgcctgtccactgtccacgtgcttttttttttttttttggctcttcccagtgctctttgtggaacatgggaggaccaccggggctatgaggatggttctcagccttggaggagaggagtcttctagggaatgggggctggcaagcatcttctccctgaccaagttctgtgcaagcgtgaggcaaagtgcttgtgagcaagactgtgctctgcaggctgtgcacagttgaagagcagtcgcctgttcagtggcatctgggcaggcagcccctctgcatgtcttctaaggagggagaggcaccggcttcccactgctcttcctcttgtctgggcacagaacaagcacccactctgttactagccatgcagagagcaggtttcaccagaggaagttaggttttctcttccttcgttcttcattctttctcctctctccctcctccctcctcccttcttcccacctccctctatttttttttaatcccaaacctcagcttcctgaatgtatggataataggcatgtgccaccactcccagcaagctgtgtcttttcctgcaattactctagcagtggctgcatagttttcagaagactgagctgatgtgtttccatgcccacctctcctgagctaatcctcagtcaccccgtcaagtggtctgttcgtttcttgccgaattcacatgcctgtggtgtgtctactactcgggggccaggagctctggtgggtgctctattcatggattcatgttgcagtaaggggcgataattgatgagtatctgtggggatggatatgattgtgtcctctttaatgagctaacaatttcaggctgaaatctcagcagtgctattgtttggaataagaggagacatgcaaatgagcccgggtgcagactgtgggagaacaatgctgcagcctctttattgggcccattaattaattccccatcagccagtttccctgggaatgaactggaaaaataattaaaatgatacatgaggtaaggagtttagaaattcaaaaggtgaaggcaagaattagtttaatacataattagacatattatttgtgactatacatttttttaaatgtggttcactgaggcagttggccctatttttagtcttggatacttaataaatactatttggggctgtttttcaactcataaaggctcataaattctcttaataacattaagtggctaattatattgtgcattgttaaaataacttctattgcaaaatctaataatacaacaaaagttacaaaaacaagtttttggaagagttaatttgactaacttaccaagcttcagcaagaactcacaaactgcacatgaatttttgtcccaagtctgatctagatgctgaaccttccttgtgaccagagtggttgggtggaaaggtgccacaggtcaagacagtgccccctgcatggtgctctctgggaagcagtgtgatcctcagggtacccaggtatacactcagtctctcagtgctgtacttgaccatcttggggcccataccaagatgacctaggcgctactgctgggagactggatgtgtatacatttgcttgggggagcatcaccattaaagtgacaagcctttttgtaaatatttgagcatttaatacttaagcatttaatatattttacacagatttcttttgtttgtgttttgatttttgttttttagttaagtactggccttgaactttcagtcttcctgccttagccttctgagtgtggctgatagatgtgcaccaccacacacggccggcccactttcaaacttttagtgacaattaaaaagtcattggaggacagagtgaaaacaattttgtacttattataagccccaaattctgtcactgccataagcactttgtgcctaagaaccccacaaggaatgcaacctggagcccctttcccattggtgctgctgagccttaggaaggaagtgtcacggcgagagatagagaagggccagaaacatttgggaggccatgtggctgcatccttctgtgcccttctccagatcctgtgacctgcaaacactgtagcctttgctcttatactgctctgtccgccatgggtggcctgtacccacttttaggctgttcacttttgccttagctcagttggaaggaaagaaccgggctatgctatgtgctccctttttctctcaaatgaaacactgcctactaatcatcccacgatttgatctgtcaatccagaaacacttgctaatgctttatggccgtggtttgtcgaggttctgggaaagagcaacaggaacgagccagtcctaataaataaaagttattccctcatttgaattttggagtccagagagtcaatatgaggcggacatcaatcttctctttttgaagcagaacgaagatttctcgttgtgcgtcatcctggtcgtgatgataaagtgcacactggatctggccaggctcaggcatggcgtctctggaggcattctgcctgtttgtattgcaaattacatgctccgcttaatgctggaagcagacctatattcccttggtctctgagagtattatagaaaatgtcatgttttaaggagggccagtattccatagatagtgttcttgtggagggccagccagggcaggcgcaatggccaggagcatgctcagattctcttggaattaggaaggaaaagagaaataggcagaccctgaagaactttgtggaatccagaaagctgttttggttggggtgaggctgcccagatgcctggaggttgattcaagccatactggccatgcctcctcccagggctactctgcctgactctctgtgtttcactcttgatattcagcagcctggttggtcctatgtggctgagagtggtggaccaggtcggattagctgggggcctggcctgcagtgcacacacaatggatgcagcctggcctggtgtgcccctcagtcagcttttgcccctcccacaacccagggcatcctataaggcaggtgttgcgcctggctggaacttacccagcatgggacctggtgtgctggcatctctgagggttgggcagagcatgataggagcccagctctccctggcgtctgatggagtttgcttgtgaatagctggcaggtgtttggatggatgaaatgaggccctgtcctctggccatccctttcatggttggggccttgagttctaccttgcctgaagggaggcctgcccagtcttctctgggttgcagacaattgggtaattggccccatgcccctgtgtgaagggcagactgtgctaggcaggattttggctctgaggtccaacctgaatgtaaaactgaaaagttgtgaatttattaagggctttctttggagctggaatatgcagtagattttctatccctctcaattctctcctaaaatttaacgctgacataaaaatgatggataacaaattatttcagggaaaatgatactcaaagactctgctaacggtcgagacagaagcgtagactgggcgaagaaatacatatgacccagaaaactcagaggaaacaggagagcatgcactcatagaaactacatctgcatgatgttagaggctgaggcaaacaagtattgttattcgtactctcgaagtatggaatttgttctgagctgctggcatttttatgaactcaataacatcatgtcttttgggtattcatcacccagccttctctgctgggaacactgcagcatcccagccaaggagcaggaaagacccaaacctacaaatgatacaggcaaagtgccatcactcacacagaagcacccagacccctcacaggtctctccaggtctctccagcctgtctgtggtggatgaagtcacaagggccctgtcacccagattcggttaatggaggcagggaggggtctaaccagcagatgttaaagcaggacacagggagggaagcggtgttgaagttagacatagttgcttgtcttgtgaagacagtgttggggccaataaccttatatgcacctcattaccttcccatgctagctcgctcttgatatcctgcctggtactcctagtccatagccatgtggtgatggtgtgacagtgcttgtgtcccatcccacagtcctcctctgacaactggccacaccaggccctgtcttataaggaaacagattgcaggcagcaagctgggatgggtcagaagagccttgtggactctccctagcatgtgtcaccacatccagtaggacagcttaggagaaactactggctggagtcagtatcatggttaccaaggtcactgtggcaactccagtgacgcttaaagctggcactgtattagtgccgagtcttaactctctctgggcaactcctgcttcttttctctgcagagaaacaggcctgttggtgaaatctgtctgccatggctcctaagctacagccgctcaagtgaataatttgctcttctgtgtgggttttaagaaaacagacccacagctgttacagtgcccgcctgtgcagactgacctctggctcccgtggagttgatggtgtcctcggtctgttgtccgttggttgctgagggccagggctccatgccatctggaggctaccccccccccccccacccctctgatgctcgctgtgctcaccagatgaagctgagatgcttagctttgagggcttcttacaccccagaatttagtgaataaatcaaagccattttgaagcctccgtggctcacccagacacatatcctgcaacccttacttggtgcaatggttctaaaccattcccttctggatacagctatgggtggggctcctatctgtgcctgactgcctgagggctgctcctctatnnnnnnnnnnnnnnnnnnnntcccagtgcttttctgtggaacatgggaggaccaccggtggctatgaggatggttctcagccttggaggagaggagtctcctagggagtgggggctggcaagcatcttctcccctgaccaagttgtgtgcaagcgtgaggcaaagtgcttgagagcaagactgtgctctgcaggctgtgcacagttgaagagcagtcgtctgttcagtggcatcagggcaggcagcccctctgcatgtcttctaaggagggagaggcaccagcttcccactgttcttcctcttgtctgggcacagaacaagcacccactctgttactagccatgcagagagcaggtttcgccaaaggaagttaggttttctcttccttcgttcttcgttctttcttctctttccctcctccctcctccttccctcctccctctattttgtttttaatcccaaacctcagcttcctgaatgtatggataataggcatgtgccaccactcccagcaagctgtgtcttttcctgcaattactctagcagtggctgcatagttttcagaagactgagctgatgtgtttccatgcccacctctcctgagctaatcctcagtcaccccgtcaagtggtctgttcgtttcttgccgaattcacatgcctgtggtgtgtctactactcgggggccaggagctctggtgggtgctctattcatggattcatgttgtagtaaggggcgataattgatgagtatctgtggggatggatatgattgtgtcctctttaatgagctaacaatttcaggctgaaatctcagcagtgctattgtttggaataagaggagacatgcaaatgagcccgggtgcagactgtgggagaacaatgctgcagcctctttattgggcccattaattaattccccatcagccagtttccctgggaatgaactggaaaaataattaaaatgatacatgaggtaaggagtttagaaattcaaaaggtgaaggcaagaattagtttaatacataattagacatattatttgtgactatacattttttaaatgtggttcactgaggcannnnnnnnnnnnnnnnnnnnaagctacagccgctcaagtgaataatttgctcttctgtgtgggttttaagaaaacagacccacagctgttacagtgcccgcctgtgcagactgacctctggctcccgtggagttgatggtgtcctcggtctgttgtccgttggttgctgagggccagggctccatgccatctggaggctaccccacccccccacccctctgatgctcgctgtgctcaccagatgaagctgagatgcttagctttgagggcttcttacaccccagaatttagtgaataaatcaaagccattttgaagcctccgtggctcacccagacacatatcctgcaacccttacttggtgcaatggttctaaaccattcccttctggatacagctatgggtggggctcctatctgtgcctgactgcctgagggctgctcctctatcctctcagccatgcctggggtagggataggaatgtgggacattttccaccctttgcagatgagcatgggacttggtcattgagttgaaggaagtctacccagtagcagggtttctgctgtgtccttatggctgagcatccaacttctactgtgttacctgtggtgacaggaaggattgtcctcaccgtggtgccactttaattctgactcacataatctgggaaatgtctccttgtgtttacaccaaatccccttcatatgtcagagctccgccttggagctcagtttccccatctggagatactagcagtggttgatcaagatcatcaggactgccccgggctagcaagagtgagtgtgaaagtgtttggtcactgtgcacttgaccgtggagagtccctgcctcccccttacatgcacatgggagcagagctaagcttgctgtggggctgttcttgcagaatgaggtgagggatgggcagccatcactgtagagaaagattgaagttccatcctagaatgttgtgacatgggcagcttttcattgaagacaaatataagccctaaagtaattcataggcacagttttacaatagtgcaaggggaaagaaacgggtaagtaaagggggcccactaaggcacagcttcatcatgaccaacggtgagttcaggtgggccacggccatgtaggtcaaaaccccatagccactgctaactaatcaaaaatggttataaatagcagcagatgagatgggaaaacaccagaattttaaaatatatacatgcatgtttctctgtgtgtgtgtggacgggggtatgtacatgtgagtgcctgtgtggccagaagtgttagagcccctggagctagagttacaggtggttgtgagatgtccagtatgcacacaaggaactaaactgaatgtgggtcctttgtaagagcagaatgcactcttaaacaataagcgatctctctagctccaagatactttgtttgtttgtttgtttagaatccaaaatggacaggaaataaaggcagcaaaaggaatagagaagagacagtacatactaccataatgctaaatgtaagtggagtagccacttggaaaggtacaagatctagtcatgggcggcaccttcatgtcaccatgtgggaggagagagaagtcctgcaatgcttgtcaaaggaatgctgtctttgttgctctcaggtgaaggagactccaggctgcccaagtgaaatgcccaagtaaaataaggacagtttctaatgttgacaggttctgctaaccaggaaaccataaccctgaagacatgtttacaaaacacctgaaagagcagaaaaacaaaccaaaactttagattgactgaatgatgggacagttgggccaaaattcagtaaaaatgtccagtactcaagtgatatgctcaaggggcttgcaggtctcactagcagctcacaaggggacactggatccccacagcctctgtccaagggttcactgctggccactcaagctaatctatttcttgggtcatcaaagtctgtatgtagtttaaagggattgaaatcacacaaagtgtatctggctatgagagaattaaattaaaaagcagacagatttatctggattttccctaaattttgatgaacagcagcagcagcatacttctggcctagttcatgagtccaataagtgagagggagatgaggacacacctcagctgagaggatgactgccttagagtgcagttatgtgcagttatactgacagctcacacgtgcctttgggtgcatgcacccaaaagtaaaaattgatcattttaaccttacctttagcagttagggagagtagaggaaattaggctcagaggaactggaaggaaggaaggaaacaatagagagggcagatctctgtgaaacagagccaggcagtcaataaggacaaacccaaatcaaaagatagttagcatctaaataaaaaatctccagctcagctaatcagggacggagagggtagggttaacagctccaggaatggaagagggagcatggctagaaattccacgaaatgagaaaggtagtgaggggctggtactaatgcctgctcaggcttcctgaaggccattaaatagatttgtcattaagagcccttctaagagactgtggcatactcaggtgacttcactggggacttccgagagtctttgagaaagtagaggaaggcgaagcatcttctgcttcctatcagtcagcataactcagacaccaaaaagagacaaggacattacaagaaaattagaaaccaacatctctcattaacactgatgccaaaatccccaagaaagcattagcaaattggttctcctaatgtctaaaagtggcactacatcatgactgtgtgggacttaccccagacatgccaggttcactcaacactcaaaaattcatcaatgtaattgaccacattaacagaataaaggaagaaaccttatgattatgtcaatagatccagaaaaagcatttggcaagattctgtgcccactcatgtaaaaactctgacttagcgagaccaagaagaagctccatgtgtataaagacaataagggatttgcagggttggtcctggtgagggcaaatgcttttcccacgctgagaacaggtcaagaacatttgttcttgttatttaccttcagtgttggcttggaggccaggctgccagacaatcagagagctaggcagccaggcagccacatagccctgatatctagagagctagagagctagagagctagagagccagataaccagacagccagagggccagacagccagacagccagacagccagacagccagacagccagacagccagacagccagatagccagatagccagagggctagacagccagagagccagacagccagatagccagatagccatgtaaccagagacagccagacaggcacaaaagcaaactgaaaagagtgtattggcagagcctgagtttgatttttgtttacagcatatttagaaaattataaagaatttgccaaaagagacatggaatacaaggtcagtatgttaggtgtggtaggatttctgtatattagaagtaaacaattagaaaacaacattttggagccaaataccataggttatgtggctagctataaaaatatacagggagaaattcaaatgaaactactctagagcctgcctcacactgcagccattgaaactgacctgagtccatggtaccatactgatgagtgcagacttggcgtgttagtcctcgcaaactgctctgtagaactgctggcatctcaaattagtaccaaggttttgggtagaaactggcaggagtcttgtaaaatttctacagagttgcagaggatctgagagaatgtcattcctgaaggaagagctaaggaggggatttatcctcctggtttcaaggctgggccagagctacagtggtgatggtgtgcaggcatgaggaagtgatgaagtagagagagagaaaacccagtccagagtagtcaggagggagaccatgaggaagtatttgcaatacgatgtgacagaaggtctctcacacccgatgtttacaaggtaagtacccaacttaacaacaatcaaagtgttcagataattcttaaaagatggacggccagccagtgaacacttgaaaaaccactgagcttcattagtcacctgggaaatcacactgcagcctcagtgacatgtggtgtacacactcagtacagcagctgagggacagccagccagtaatcagcaaggacagtagcacaaatgtccagcgtgcctgccatgataggaaatggactttctcagaaaaccactccctatccccactatgactcagcagctctaactcccagggtttttgtttttttggttttgtttgtattttttataagaaacacatgtttatattcataaaacagggctcatattcacagatctcacacctgctaagtctcaggtgcacatcaactagacagggtcacagtgctccgaagctgcagagcagagtcccagggtctggcctagggagccaaggacagaacacactggcctgagtgggaccttctggagctgacagaatggccaggtgataggaatcaaagtgtgttccctgggtgcggctcctggtgacaggacacattctctaccatgacagggatgcagacctcacaggtgaattctttctgcaaaactcatcaagcagcatgcataggtttctgtgttatataaattatacattaaaaaatagccatctgggcgtggtggcgcacacctttaatcccagcactcgggaggcaggcggatttctgagttcgaggccagcctgatctacatagtgagttccaggacagccagggctatacagaaaaaccctgtctcgaaaaaccaaaaaaaaaaaaaaaaaaatagaaattaaaaaaaaaaaaaaaaagccaagaaaccctttttaaagtactggccaggaatacttaaaaaaaataaaaagtctaacccactgagtgaaaccttggagttatgcttttcacacttggaacttgaggttgtgttttcttgcttgcaagtgaggattcaggactgctttggagtgaaggtaagacagcaaagtataggaacattaagtgagaactgtcatccatatggaggactgtaaactatcgaaatcagcttcagaaagcaggcaggccttgcctgggtcctagttctagctcctcagaacctccccgtcccagtggcagcagctagccacacatggctgtttctatgagtctcgattaggattaagaagacttcagctgctcactccgactagctatgctgcagccactaaagccacaccctcagcgcgtggctgctctgcttcagcagaggcagaaggcatgtccatttggcggtgagcgtcagaacagttatcaaagtgtgccctgtggccagcgacacacacagaactgggggctgaagaagtactgggtgtggggcacagagactcagagcctctgctccagagagacccttaattagagaacctaaacacccatcagtagatgacgaaatgggtaaatgagctggagagctagctgtgcagagctcacaaatgtgtttcaagaccatcgtgtggaatgcaaagaaagccgtccttaatgcatagcgtacactgcttttatctaaaagtagaaccttagcaaacaacagtggatactgagggatactgaggaagtgacacctactttttgtgtttaggagacagttgaccctcagtgtcaagtatagggttctcagacagtgggaggaagctattgctcaaggttctcggactgactcttggcatgattacataaatatatatgtatgtgttatatgtgcacacacagaaaactatgtgttatgtatctttctgtctgtctgtattcacttctcatgtgcttctgtgtgtagtgcgcatgcgtgtgctcatgcacgtggagcctgaggctgacagcaggcagtgtcctctgttgctcctacaccttattcactgaggcagggtctctcagtcaaacccagactcatccgtttggtcagtcctgctagccagctttccctgggtcccctttgtgtctgccttataaggttgaattacagatggactaccatgtttacacagcatttctcgtgagttctgggacaccaattccaattctcacactgtcatggccaaagatttaacctatgagccctctcccctacccccaaaactaacctattacctaattttatatattacccaatgtnnnnnnnnnnnnnnnnnnnnnnnnnnnnnnnnnnnnnnnnnnnnnnnnnnnnnnnnnnnnnnnnnnnnnnnnnnnnnnnnnnnnnnnnnnnnnnnnnnnnnnnnnnttcttcctttaaaggatggagaaggcttggcaacacaatgctggggaaagctctccaaatcggactggagcaggatcaaaagtgggtgctaacactcagttgtcagtgcctgcttcaggaagccagtgttaagttagagaaaaccctttagccttttcttttccttcttttcttctttttcttttttatggtagctaaaccctgttgaatgcatgtgttgtaagcctacagataagccgtgcagcggggatctgagctgtcagcactgcagagggagagctcaggcgctttcccttcagtgtgtgcactatcaggtcacacaggggcctgggcagtacagtgcttatggccgagctaatgtcattcaccagcaatctagagagagagagagagaacaactagctggactctgtttagaaggaatcacactgatgcccacatgcaagaatatggatgtgtgggttatctacatgtgcctcctgctcactgttgattctgcaatgcaaactcaactcagccatatatgatcatgtgcccagattaagattgtcatatccattagtgcccactggaatgaacagcttaatagaatgtgtcacatacctaactgtcatgtctggctgagtccaccaacggtgacatctatcatctttagtaagtcactcaagcagcccatgacccaggcagaagataggccactgtttcctttactgtgaatttagaatgtagtcactctgtgcaaagtccatgggatcactgtgttcatcatacagcatggggctatgattatctcaggtaggcttgattttaaacaatggcctgtctcctctgaaatacagtgtgtgtgagacaatgcttgtccaatgaacagcagaggagaacacccagtcttcagtgagctttgtaagtcactaggagtgtgggtaggccagacacatgatcagtctccggtaagagaaaacacaggccactctagaaagtgacacacatttttgttctcttgttagccagagtcaactcctaagataggctggtgagaacatgaaacatgatgtctctaggcctgttcatttaaagttggtccagtaggagagaggagaaacgacccagagaccagtatagacctggactccaatccccccccaccccaaaatgtggaatgtcctgtgtgggtggcaggaccgaggtgccgtttgtttactaggggaagcaaagtgggtgtaagccagcccattgcttacctggtaactgcttggcagagtgtgagcatgcccacacactgtggtgtccttgtattttacacagaatggaattccaatggaggaataagccaggagccaagaggccctctgaagaaagtgggccacgtggaaggggcaggagggaggcccagcctctcagagcacctgtgctctttctcctctcactttagaagcatggattgctttatttaaatattaaaccaaagcacaccaagttatgaaacctgtccttgaaaaccagagtaaaactgattttttttttaaaaaaagcctaaactccatcaagtctgtgctttaatcgcccaaagaaaactccatcagatagactttctagcagttgtagtgtgcagtccttgtagaagatagcttagccaaaaaacaaattctagtaataaaaaataaaaaataaaattaagagcactattcaataaacattcacagcagtaatattagtgttgttttgaaactgtttacacggactgaaatgcatacttacatatgtatattagggaaaaacaaataagtaattatgataatgctataggaattaagatttttaataccagagagaagagactcaagcatgaattcaaagaattaaaatatatataatatcttaaatatgacttaagacttggcttgaaattatggtgcatttttttctttttaaaaaatgaaattttaatgcctagttcttcatgcgaaatcactgtatccaaaaggaatgtggggagggtcccagtcctgcctcagccctccaccatgtcctgtgagaagagaccagggcttcttaggatgccctggtgagcctgcaacaggaatcacaaaaagtggcacctctggcaaagccccaggcagggtcctgtcagcaccctgataaaaggggcattaggaggccttcctcagggccatttactggggcagtctttgtctatggattcattgtaatttctaaagcaaaccctagttttcctttagaggcagctaagtcaccagctggtagacaagaggaaagattcgggcatgcatgtgttctcctggtgactaggcagctttggaaggggcacgctttcttcagggagaagtgcaggtgtaggtgcagagggggcgggagacctgcagtgtggatctagggaaacagtggaaggctgtgctaaccagcccctcggaagccagccaggggaacttggcagaggatggtcctgcctggctgcacctggacccagagcttgcagggagctgtttgatggatggttatgtatggcaccacctgggcctgtcgctccatcatattgtaagaaggagaccatggatagtctgtgtctcctgatggcgtaaactatgccaaacacctcagagtataacctagcctttcagtttgagtccagtttccaggaagtaccagggaagaagtacaggtaggaccccccactgtaggaatggccctgtcaagactagggtcgactgcctttttagcaaaagactggttctcaaagcaaacaagacaaaggcatagggcagggaggttctgagacaggctgagaggcgggagaccgactgcccgagagcttgcatttggggaccatcagggcagagccaccctgagtggacatgggctttggaggtttgcagtgaggaaatgggacagttttaggtgggaaggtctctgcctttaggaagacttcttgtctctagaagaagccatttgtggtgaagcatggcgcccagggtggctttagaatgctccagtggtgtgtgggcggagtggggttggcaaggaggctccttggtggagctgcgatcctcgtacatcccagtagtgaacaggtgctctcctcacatggtgctttctccttggggaacttttgaagaggcttgttagaaaatgcttttacaaactccaccccatccaggagtgagatctgtagccatcatttgcttcctaaagcagcttccctgatgagcttcgagtgctctcatctatggggatacccacaagtatttagaaggtagcttgagactgtgtccctttagcaaaacagccataattgggcctatgacctcctcaactgcctctaggcttggttcacagtaaggtgtaagtttcgttctgtgcatctgggcctaagtctagaacagaaagctgttggggttatatgttaaaaggtgatgacgatgatataaaatcatgggggaaatggggtggtccaggaaaagttagatggggaagtagatatgatccagatgtgttgtattcattaaccacatcacgcatatgcaaagccacacatgcgagcacatacacacatacatatgcacacactcgaatgggcacacactaatacctcccttcccctccccaccccaccacgcacactcttgcaattgctgataggtttggcctgagcgaatgagtgcatgaagcctgcaggtggttagaagccacagcaggcacaggctggcacctgggggtgaggtcagcttgcctgtctggaagccccactcatctggttctcactctctctctcattgggctgcaggtcccctgtctcctctcatcaggaactcttctcttggtctacttcctgctaaatctgcacttccctgggggaaggtctgttaggtgatcccttttgttcaaattggtttcaaagcaataaaagacacattcacagcccaatttgcagggggacaggtgccagtgtttgttcaaggctggtggtcccaggccctttaagtgctcagccatcagccgtggtcaggggtcaggggtcaagagtggctctgtgggaagctcccaattagtaaatgatgtggaagtttgcgcacctttccttcgctctctcattaccttttacatttgggaatccccactgagagcagacgcacagggtgcagaggggacccacacaaggggaaggagaggcctctcttccagacgcttggatcccagcaagtggctcttcatctctgctccgggtgggagtcatctcctctctggaacttgctacaaatgaaggttcctaggccaccaccaggagctccatttcggtctactctaggacagactgtctgccggcccaccagtccaccttccactctgggagctggatgtgtcacatggggtccagtcactgtcctcaggaattcccagctcgaggtcatgtcagggataccagttgttcctgtctcagcatcaggtacagctcctctcgtttatttccacattgccacctccttctacaggttccaattccaagcatctgtggggaatccctgccagcagcacagaaacctaatttgccagcctgcaccagtgtcttcattgcctcctaggaaatggttgcctctcttccctctctaggtggatgtggctctaaaaggctcaccaggtgcccatggtggatggccaggcagtgtagccttagcttcaggtggtccttgctattgacgtgcccagagggagactctcctgggggtgggaggtggactgctgtggttcttttctaatggtctggagccttggaaagcaagctttgtgacctggctctcatgtttagcctcagggtttatctggttgtttccgcctcttttcaattaagaaaacgcacgctcaactttcacattgctgctcatcctgaggtgcaggcaggctactgttggtttcaccattcacagccaactattgggcatgagaagttggttttgcatttggttttttgaaacagtcttgctgtatatcccagactgacctagaactcactatgtagcctatgctggcctcaaactcattgtagtccttctgtgtcaaccttcaaattctgggattccagctttagacatggtgccggctgagagtggccctttgtgctgtatgtttagccagctttatgtttaagtctcaccaatatttgcactggagaaacagagatgctatgtggttgtgtaggtgagggtggggctgaggcaggacagcgacttgcctcttgtcctgaagatgggagctgtcactgtggcctgtctggctgcagtggtccttgggtggtggtggggattaagctcccagagcattggataggagtatcaatggaaggagaccaaaggccttaaaggatactttctaaggtaggagaaggggtttcccaactctgagaacaggggccagtccttggagaaagccgatgggaaccccgggcagggctggagtgatgacaggcatggcaagcccccagtgacagtggtggccaggggtgcaggctgctcactctctgctggcgatgctcacttacacttactcccaggagagcagcccaagcccgggcagggcctgaccgcagaactgcagcttccttgctcattttctgcctgcctgccctttgggctaagttggctttgcacagaggctttgagttactaactggcgtgatgtcatttctttcttcaaagtaaaattaatcagggcccacagcgggatctttccctttagtttcctttgagtttgccaggaacgtccttgacacaaatttaaaagtggtggaatgtttcaggttgcggagggtgtcatgggttcctgcatggcagcgctgataggccagacagtggcatgacatcttctaaaaatgctgagttgagacagacttgggatggtaaggcctgggacgtgggaggggagcatggtaggttgatcctcctttccttagccccctacagtccttcagtgcttgtataattcatggagttttgacccagcagcattaaaagggtgcctttgatttcctccatcaaggagagagcattgcaggcagcatactccctgtgaggtgaggtgtggtggtaacagacagccctgtggtcccgcatggtcctacatggtctaccctgagagtctgtgctgggagactgtggatccctgttgagacccttgctcaaatatgtaaatcaaggtccccctttgtgtgcatttcttagctggcttttgctggggtacatttgtgtgctggaggttgttcttaccccacagggccggaagaagaagggcttaagggtgctctctgtttcccatgatctctagattcttccaaacaatctgctagaataactggttggccccttctgagacaccagccacacaggaagtggagctcctcatggaatattgatttcttgttagttaatggaatattaaagggacctagagacatagcaccagagaacaccttcagattcacaggtagaccttgacctgcattactgactgtgatgatgaatttatacttcagcttgctgatccgtcatgcttagatagttagacaagcagtgttctagaagtttctgtgagtacttctagagtgagattaacacttaagctaggagactctgtataaagcaagtggccctgcatcacatagaggggccttatccaatcagtgaaggccattagactgatcttataagcaagaaggaagtctgctggcatatggcctttggccttgaactgctttctctggcttcatgcatcactgccttcagatcagctcctagcataaacatgtatgcctggatggggacacacagagatgcttccccacccccactcctcattctctctggctttgtttctctggatatcccttatcaatacattaaccaaaaattcctgacagtattatttcctatgttatgatacctgctgggttttgaagactagcttctgtcagggagtcctgatatattgagggcaccaaccagaatcccaggagctggcacagaccatgagggtcatcttttcccatgggcttcctttccaggattgcagagatgagactctgcctcgtaatacacagatgtggtagcctgtgacctttgtcatttaagcagttggaatgctctcagacatggacagacacctgccaataagtatctggccaaagctaatgcaggttggcgtggagttgatagatcggtcactttgaagccggctcatttgtgctccacgatttggccgcataatgaagtgtgatttacagttctcattactggcctatgcaccaaacacagagatgttggtatgaattttaaaagggccgtgctctgcattaccggcaggtaattgtgtcatgcagtggcctgctgatgaatatttcaaaggaaatcatggcccagcatttgcctgcacagctgaagttggtatatttgaatctgagcagagactggaaaatagtttccttcatttgaatggcctcagaaatacatctatgtaaatacgtgtacatcagggaatttcctggtgccaaaaggccagttagttttttccagtgccaaaacttataagtataatttaatgatgtaattaaaggtgaaaaattgttccttttaccatatatatatatatatatacacacacacacatatatatatatatatatttaaaaaaacaaaacaaaatctgaaggtgatttataggtggggttttttgtttttgtttttttttctaccttatttactacattttaaaaactgcatgtcatttgtaatttgcatttagttaatctatagtaccctttgaccttcattttattttgaaagccacatggaaactactggaaagctggtatgcagtgttgggaaacctgatgtcatagtatcaggctttactttctcccttcctctggtaactgatggagggagtagctgatggacaagaacagctgacagataggagaagctgatggtcagaggtagctgatgaacctcttctccatgatgaactgacttctccatgcgcttttccatccccttggaggcctctgtaatccgggatgctgggtgctgagcccagggcagtctctaagagaacaagtgggcagaagtcctgcatctcagggccaggggacaaggtgtggccagcagaggaggagcagcttctagcattgccagaaaaaaggcactgggcagggctgcccaaggtcatgacgaccagactgcaaggagatgaggccatggagtctgcctggcagggcaggaggctgagcagtctgctcctgtcttcttgtcctgtggtccccagcctgggatacccagatgggaggaccctataaatagggaagaccgttgatgactatggcagaccatgcaaaattggtctctggtgtttttcttaattatgaaagatgtgtaatattcagaaaagtctcggtgataattcaacaaatacccatgtacttactacccaggatattaaatctaaaagaggttgggttttttttttttaatttcctgccttgggtcttttgtttatttatttagaaattaagttttatatgtacctcaaagactttccctttcctttcgatagctaagtgccttgaaattggcttttatcatcccctttgtaaaatgttagtctattaatcaaatgtatatatccataaacaatttagtactacactgggtacacagtctgttaatagcatcacgcttaaactacattcgcagcatgattaatgcagctttgtgttgctagtgttggtccatcgtgatggatttggctcggttgctactgtacttcagttcctcgatggctggaaaagctgggctctatttgttccccagtcacatggctcaacagttcctgagtatgttacaactacagataactcccagcctgacctctgaccttgtatccatctccacatgcccttgccctagagaacttgaagaataacatttccttttttacaaggttggtgggattttaaattggcatagttattatagtaaccagttttcaggctcctgaaaattagagatagaattgccatatgatcaatgatcccgctgtggggatcagtctgatggaggtgaagtcagtcctgaaggacatcctcactcaaggtcattgcaacgttactcctgataaccaaggtccttgatgtccattctcaacaagacatgtatgcaattgcatgtggttctagccatatgtggcgtgcagccatatgcatattctgtgtatcagtatagaacatatatacattaaatgtgtgagtattatccagggaggaagtcttgccttttatggtcccttggaggacattgcactaagctaggcacagaaagacaagtactgcatgatctcgctagcatgtagaatctaaactggttgagcttacagatgtaaggatggtggttgccggacctggggtggggaatagggagatctgaaagggtgtagagttttagttatccaggactggagagctctgacatggagaacacaggctattgactatcttgacaattttgtatagagacttgatgtttgctgataaggtgggtctgatgagtttttgtcacagacagaggtaattgcagggtgacagatatgctgatgggcttgattgtggggactcagctcacatagagccatgtccactttgcaggttctgtattctcagtttcttcttgacagttatacattagtaaaacttagagacacagtagctcatactatcatactaagaaggcacttgggagactccagagtctgatgtagctgtgtggtctgaggctttcttttttttttttttttttcctccagtttattgtttttatgggattcatgagcatgcaaatgagcaagtttctgattctttttttttctttttgatttttttattaggtattttcctcatttacatttccaatgctatcccaaaagacccccataccctccccccacccccctaccaacccactcccactttttggccctggcgttcccctgtactggggcatacaaagtttgcaagtccaatgggcctctctttccagtgatggccgactaggccatcttttgatacatatgcagctagagtcaagagctccggggtactggttagttcataatgttgttccacctatagggttgcagagccctttagctccttgggtactttctctagctcttccattgggggccctgtgatccatccaatagctgactgtgagcatccatttatgtttgctaggccctggagtagtctcactagagacagctatatcagggtcctatcagcacaatcttgctagtgtatgcaatggtgtcagcgtttggagactgattatgggatggatccctggatatggcagtctctagatggtccatccttttgtctcagctccaaactttgtctctgtaactccttccatgggtattttgttcccaattctaagaaggggcaaagtgtccacactttggtctttgttcttcttgagtttcatgtgttttgcaaattgtaacttatatattgggtattctaaatttctgggctaatatccacttatcaatgagtacatatcatttgagttcttttgtgattgggttacctcactcaggataatgccctccaggtccaaccatttgcctaggaatttcataaattcattctttttaatagctgagtagtactccattgtgtaaatgtaccacattttctgtatccatttctctgttgaggggcatctgggttctgttctgaggctttcttagaggtcttttctcagtgtaccaggctctgccaggacttgtctgtctcttaagcagtgtatggggggacttaggactgctaagtgtagctctgagtgactaaagaggaccatgtcaaaggaagagtgctgccatgccaggttaagcaagttaggagagccctctctcagcagatctgtcttcagtgggacagtgggacagctaggtgcattcagaggcagccatgactcactatcactatcttttcaccttgatgccactgtccctgggccaaggcatcaccttacttcatctctgtcttatgcaacagaggtgccctcctcctccatcccacatctctatgatggatcaggtggcagtcattgttgtctgtaaccatcactggcagctctcccctatgagtgatgtgtagactccagggacagctgcacatggggctttttgtccctggcagctggctgtactttgtaggcatgctccaggcagctgtgggacacctgtagctgtggggaacagcagttgctgctcttgactttctgaggccacatgccgtacaaaagtcacgatggaggtggactgcacatgagttcctttctcacaaagtttcccactttgggagaatgttctagagaaaatgacctagtctgcccattctatgctttcattgctaaggtcactgcagaggtggaggtctggccctcataacgccagagtctcctgattatcatcatggatcataaagggtggagagtgttagaaaaaagagaaagaagggcctagatgctgctgtcacttctagaatcatgtaggaaggggaggggggtccggggggggtgtacagaaggctgatggctggtagagccagggtgagttgtgttttggggaaggagctgggaagagctgtaggtattaagccccacccttggtatattaaaataaattttaaaaagggtgacgtaggtattgtcacatcccagtagacatcaggtctctgttcatactaggacttttgtacacttgaaccacagcgaggatgcaaccacacaggcctagggtgggatcgtggctgagccacccaagctaagggcctgcctagcttgagtgttgggtttgtattctcataaggacagtgagcctcagacctggattagggaggcctgagctgggggacggggacataaactatagggtgatggacaggcaggcaatgacagccactagtgggagccattgcagggaagtgattggggctaaatagtagagagaataaagcccagctaggtggcctctcaatcctctgcttggcccatctctgctgtcacaggttcatcctggctcatctctgctgtcacaggctcgtcctggctcgtcctcattgcatcgctagcccctgtcagggaagaggagatcttttctacaaatggtgggcaggagtatgatacccagtctctgggtagatggaaagagctttaactaaattagctctgggcttctgtggggtagcatttgagtctggcaggatccgtttcaaacatcacattccttcataaagctcaggagcccctcccgacttgcgcagcgctcacagtaggtggtgagacagaatctagccctgtcggacttactgccaagtcctcagttactgtttccttacctagtgcttaagacagtgtagtgccaaaatgatatgaaacaaaatctgctcttctgttgttatcacatatggtgattccaatgaaatgtccccacctcttggatgtttgagatcttggtcacagttggtggctccttgggggaaggtttaggaggtgcaaccttagctgggggaagtaggtcactgggtgaatgtgaatagctttgttcttctgggtcggtctctctctctctctctctttatctctctctctctctttatctctctctctctctctctctctctctctctcttcatgtttacagttaagggtgtgaggtctcagccgcctgctcagatcacaatggctgtccctttgctgccatgcttccccccatgaactcatcattccagagccagatcagttcttccctccatagtcactctgggtcttggcgtttgatcatagcagtagggagttactaacacactacatgataagagccatgagccatgagccatgatctcctgcaatgttcctgtgatgtgttcactctgtagacaggaggtgtgaggacaggggtgctgtgccacccctacagggaggagccctgggacagactgtagatgccctgctaagactggtagccactggccaccagcacatctcggtgtggccttggttgtacccctcttgctatgcctctgatctgtgcccggcctgcgggaacctcctgcatgaggtccagatgctccagagaggacagtacgggcgtgccgcggtgctccactctggacacaccttggttgtacgccactaggtcccagggtttgactcctctccagccctctcagactgtagttagaggagcagagcaggtccagcactgggaagctttgacaaggaatctctgtaacacagaggcctggatgggtagctggggccctttatctaaccaggtgcaggagttccataataaccgctagctgataagatagcaaaaaagcacctcatgctctccccagctccactccccatcgagaaacgttcacacatctgacggtgctttctgacttctggatttctgctggaaaagcagggcattcctagcatccctacggttttgttggtgcttgggctgagggagggagctttccacgctcttgtcccacccatgaaattctcagacaacacaggaccacagttgtccaggacctctttctccaggacaactcttcctgtcccctttcctgcctccctcctcctcctttttgcatggagcctagagcctgggaatcagaggcaggcctgggccatggctataggcagggaggtcagggacacagggaaccagggctggaaggaaggactggaccagggttcagaccctctcagaaacctgtggtccagctatccagcatggctacacttgaaacagcctacagtgtccttctctgtggtctgaaatgtccctgataaggggattctaagagccgtggtcttttccgctggcaaagggctccctacaagtcttagaagtggcctgttggcttgaccattgtccagaatggtgaagctatgtgggtgaagcagactgagcaggtctggccgggggtctgtctttagctgctgtcctcctcctgccctactgtgcatgtacccttcctgcgatgctggtatgaatcatctgggttaagcttcattacagcagaggcccattttccatttatgatgagaattttttatttatcaaattgttactctaatataatttaccaagtcactgaagacaaataatccacttagaccaagccataaaactccatttgtccacaaggcctgttctgtggagttgggctcacgccttgttccactctcagctggagacagtacaggctgcagcattcacagcccagcgcttgagttcctatggggttggcctggagggtgtctggcaacccacctgagccttctctgttaataaaaggctggtgagtgaattaagaatgtgtccaaggttctgcagagaatctgtcaatctggaccgtcctcagcactcctgagcccctggtcctctcagtgcttacaatgctgagctctggccttagttccttagggaacttccctccagcccttaaggatccactcacccttagtatttattacaaaggaaaaccaatgcctggttctttaggtgctgctcagtgtcttgtccactagtgctgcctgcaccaggctctcaggggagccacgagattgggagaatgggctttcattctgtctctaattctgctcttgggtttggggacagggattgcaaagaaaaggggccccagagaccccagagcaggtggaacagaggactcgaagacagagtgtgtgaccatcaatgaccacagtgtgggaagcggcagtagacttggtgaggtcccctagaggagaggtggggctcagctgactaaagagaaaataggtttctctggcagaacaagggtatgtggcatgtgccaacagctctgcacaagccaggcaggctgcaggtctggaacactgcaggaagctggagaaggtcaaaggtcaggggtatcagacaagaggctattggcaactgtggtcttccatggttagtgacatgataggatagtccaggacagtacctcttagatagaggaggtgtcctggtcacaccatggcagaatgctaaggtcattgggtgaaggccttacgatatcttactacactcactcagttgctgcttgtttctgcatagagatttttatgtgttgttggtgctatgacagccaccacactagtcatgtgacaaggctagcaggatcgaatgcatgttttccaaaaagttaagactgtttaaaggaagtaagatggcagaggcaaaatccataaggtcctcctcaccagaacacacccccaggctagtgtggtttttacaaacatgaacaccacttcagagaccaagcatctgggggaactctaagttgagaaacttgaaagaatggcctcaaagctgcattacccagactcctgccttgtgatttctgggatctgctgattagttttaatgaggcaactactacaacctggacactgttcagagctaccaggtgctagactttcctttcttagttttggccatgaaggtaatgaaaaaaggaaggatccacccacatacactttccaaccattgtcctacattcaggtgggcttgggactccgggtcacatcatggttgcctggaaaagttgcccattgaaaatctacttcaagtagccaggctcaatgtccccgtaaggcactttttgaaagcagcttcagggaatcccaacaggcttatgttccagtgaagggagtcacagacattagagtcagcagaaaagacagcttcagagaggggtgtgtgaggaggtgcctgagatacagcctggaatattcttggactgttggagatggaacaagaaagatattaaatgtagggagaagaaaagggaactacaacagtgtgcaagactgaaaaccctcagagtcaagtgtgataaatgaattaaagagaaagcacgagcggggcatgtgtaggatccctcagcaggtaagggtgcctaccaccaagactcaagagctgttgagtctgatcaccagaacttacatggtggaaggagaggaacggctactccaggcggtcctctgacctccacatgcatgctatgccatgcatgtgcatatgcatatggcgtgtgagtgtgtgcgttcacacagaggcaaatacatgcagtaaaaaaatgtttaaaggaaattgtgacacagagggggagaagattactcagctagaataaagatttaaagaaaatcctttgcccacagggatataatatataaaagaaattgggacagaatgacaagagcccaaatcaacctcactagaattccgagaaaatgcagagaccatcagaggaacaggtgaattcttggtgtgaggttaacagatctgataatggtttcctctcatcagaactgttcctagattccaaaagataagtcatctctgacaaaataaccatcataaggaaactgcacaagaccaaggaccaagaatgttctagagaacagccagagagaacagttcctggggccgaataacagctagactgagagcattaaatagcagaagctagaatacggtgcggtgaactgtttaacattggacaactcaggactgcctgagcatggcaggaaagctgggttcctggatttcatgaaaagtggtgaccccaaaagacaggacaggtctctgagcaaatccacaagagtgttgatagagaaagcaacacaaagatcatcccaggttctaaggaagatgaccagggtgacacaaaccactcgtgtgaagctggggaaagggaaagcagtgcgtgtcttggctgtgaccacagtgacggcattcccaacttcctgtcttaattgagattaaaataaggataaggattaatttttcttttattgtacattttgtgtgtgtgtgtgtgtgtgtgtgtgcgtgcgtgtacacaggccccattttaaccacggagctaagcttgtctgctaaagtaagctactgctaagcgaagagcagaacctcgctagtttctgggtcaattagaggtagaccgtgggacaatgagtaaagacaagccagttcactgcaaggaggaaaaggagtgagggcacggagtcaccagcaggctgagagctttaggatgcacaatgacagaaagtatcagtcatggttggtggggaccaagctgctgaattagggaccttgacttcatttagaaagatctgtcactgtagagacaaagggaaattaaggattaaaaaaaaaaaaaaaagaacccagaaattagctaactactagcataaggaagcagaattggaagatttcatgacaatattttcagtatcatcagaacaatgacattttttaaggacattctggcaaacactgcaatttatctgaatcctgaaaactgtaaaatgctgctgaagataaagagacctaagtgagtgaagggaccgaaaactcagggtttctaggatgggcatgtgtgcaattacagatacacacagacatagccatgcacacaggcatgcagagatacagacacacatacacacacatagacaggcatacacacacatagacacacacacacacacacacacacacacacaggttgatctggagattcacaagctcttttgcagtatttgacaaactgaccgtgcaatggatacagagtggagattcgaggcaggtgctctggagaagggtaaacatgaaagtcagggcgacctcaaccttaactcaggggtgggcatcagcttcttaacaaattgttggagcagtgttcatgtgcacaagcgccccctcaggttctttacacgtgtgaaaaagtggctggcactggaccagagacctaaacagaaaatgtaaagctcgtagaagcaaaccttgtgtgcccttgagttgggggaaggtttcttagatgtaacaaattaaaatggaacctgcagcagaatttaagacatatttccacaaagtcactcttcagagtgtggaaggacaaggtctagtctcgtcacatttttccaacagaggcttgcaagagacttactgtgatgaatataagaagacagtttataaaactcaagaatagcaaacagccaggaaaagctccaaataccaaaagatgccgggtgagctgagggatgcttggtcagtggtcatttgggatgcttggctaggtgcctggaagccacagtgaagcactactgcaggctgttagatgctcagttacaacagagttgtttggctctgcacagtgctggctaggatgggtcagagcatgaacttccttcactgctcctgggaacataagatggtagagccactttggaaagtagtttggtaacatgtttccatggggggactaaggcacaaatgtgcacacagctctgcatcatagccgcgagctggaagcagctcagtgtctttagacagatgaatggatggattgtgaaaagcccatccaggaagacatacctcagtgtttgcagggaatagatacagggaaacacctaagtatttgtggggagtaaatggtggcatgcccattcaggggaaccttagcatttacagggaatggaaaaccactgtggtgctgttcaggggaagggcctgtgggatctgcggagagtgaactctaggtgcgtggaacatgagagacaaatgtcaaaagagtagctctgagtgaaggacattggaaaatcggttcatacagtagagtggcgtctctctgcaagcatgagttgtaaactggtgtgtgttgaagaacagctcagtagttacctggcagtgtgggagaacgtctaaatggccacaaggacacagactggatgataggggcgtgcactatcctaagtgtgatagggcacacacatagcagatgtaattccttttaaaatagactgagcaaagctgatggatgatcatcttgtcccgctagcccaccgctgctctaaaccagagatttgcgcagtggattgcttgagataaggaggtgatgctcagtgacagtgatactgaaggcactttgaatttgtaggcacccaataacatacttccagcacagaaaacaaatttggcagaaccatgatgagaaagtcaatctactgttgtcattgggattttttgatccatccttatttcctggaagattgaagattatttaacactgtgagttaatttcttcaatagacgtgtatgaattgctgcctccagaaattccagccatgcatttaagaacagcaagcattttatggggtgactttttctatggaaacatctacttaccccagaaaccagcaaaacaaaggaaagaccctgtccaggtccaggttggtgaaccaggggggtctgttaccactacttatatagagtatagggtggtccacatgggtcactcattggtggcctagtcatgtcactatgtcagaggcaggaaggttgcctcactgttcactctctggcctccgaggatgctgcctcaggaaacatttgtggaagctgtgttctgttccaacctaaacccaaattaccttcaaagaactggagtccttaactcccatcctataagaagttgattagctagcagtcagtaccttaagctaaagggatgaaaatgagccatgcatttccagattgcagagtgtactgataaatcaggtatgatccaaaaaagacatcgaaaagccagtggcatgttctcagacattgggatgataacgcttcattaagactggagtgctgctgaagtgtggcttctgagggtgactgacaggctggtattgcttgcttgtatcagaaatgaaaaaagccagacactaatgagcttgcagccagcttccttaagttagagaaggaactggaaaaagaaagtactctgcttctgtctgtatttgataatgcccacaatagactatgggaagggaataatcaaggtgacagagaggttgacaaatacccattgtctgagtcaggggttttattgctgtgaggaaacaccataaccacaaggcaagttggggagaaaagggtttacttgtcttacatttccctatcacttgctgttcattatttaaggaagtcagcacaggaactcaaacagggcagatggcaggattctggaggcagaagacacagaggccatggagtggtgctgcttactggctggcttcccctgcctgctttcttatagaacccagaaccaccagactagggatagcactagggggccctcccccattgatcactaattgtgaaaatgccttacagctggatcttatgaggcatttcctcgactgaggctccttccgtttagatgactctaacttgtgtcaggttgacacaaaactagccagaacacccatcattgaaatcttaagttttttgtttgtttttgtcttgtttttagaaaacagttgagcttaaacctagttaactgctaaggtggaggaacgggcagctaaagtggaatgagagattctcatagatccaaacagcaggagggtgatgaggaggatcgtaacctcaggaccagcctgggcttcttagagagatcctgtccagaaaagtggtgtgtggggagcaggcatttccaaatagaatattactgttaaatgcacagaaatctggaggaaaaaaaatataatgagcaagttcgaaaactttgatgagacattgctggaataaaagtaagaatatacaaaactgtgaggaaatcgggattgttttctaaccatatacaaattaattcaggggtgctgactgaaaagtcaccagatcctgaccaccacatggtggctgtctctcaggaatcagaaggaaacatcccagaccaaggggaaaagaggcaaacagctgaatgcttagagcctacaaagttagagaaaagacatctagagtctcatcttgcagagggagtgtagtcaggacctagatatcattaaaagctggggtgcactgtgactggatgcagcctatgctgggaatacgaggttggttcagctgagggaactctgggcatcgtctccaacaccaggtgaacgagcaccgtttgccatcttggtggatatagacatcatctgtgactgtgatgggaactctcttcagcctggagcacaacagactttcctagcccactgtgatgccaggccttagcagacaccgttctctgcaatgaaatgatggcagctaatcccttgcagctaggaaggagaggcagagtggcttggctgttcaagttgccaacacagccctgggcagggagtgcagggagatgaagaaacagtgccatccctacagctgagggtggtcagccggccctgcctagtggcctccatgacactacgactaatgaccacattcccactcctcctgcatggggcctctgggctccctgcagctccctgactactgtcagtgtgcctgctcaaggtgacttctttattcctttcccatcccatgctaaggcttagagtcacagctgtctcgtctaatgtgttctgctgcagtcgtaaagcctctcatcttgcacatccacctgagttatggtccttcctccatcttccccttagaccctgaagtctcacatgtagcagtattctgtgggctcaccctttaatatggacctagaatgtgcatgctagttacaagttcttgcccccttttggtgcacatcactaacacctttcaggttttgtcttgtttctttggttggttggttggttggttggttttatttttctgagacagggtttctctgtgtagtcgtggctgtcctaaaactcattctgtagagcaggctggccttgaactcagagatgttgggcctgtccctgactcctgagtgctgggattaaaggcgtgcaccaccaccaccaaccagtttacacctgtcattttgtgccgtctctgcctcaatcttgtcctgagctcttcctttccgccttgccctggtctcagtaggaaagccagtggggcctttgacttgcctgctaagagctttcccggctcatgggaacacctggagacatggccctgcagatctgtgccccacaagcttttctgcactgccagccttgctggaagtacatagacactccttgttatccttccccatcgcttgctgtattttttccccaaagcgtgtcaccttctgacacattgcatttttacattgcttaacatgccagtcacagtagcttcacaggtatgcgtggacatagcaagagccatgaaggtaacagactgagccctaagcttggggaccgctagtccgagtagttggtggtatggtcttgaacttaggtggaagttgcagcaggtgaaggaaggagagccttctagaagggagctgggcaggcccagtagggtggtctgggcaggcccaacaggtctccaggggtgaaggaagtatgaggtgataaaaacagaggaggagtgcatccgactgcactggagagagacataattctggtagaagccactagacttcctgtcctgccagctgcatcccttattggtgctcacacagcaggtagctcctctccactgcttgtctagcgtcccactcgggctgcttcctcctctgggaagtagaagctgctctccaaagctcaggtttgacacctggcataggatgggcactcgccagatctactggcactatggcaggctgtcatctgtgaccaaagaaagttactgtccttgacattgttgaaagcctaggctgggaccctgtttaccaaactgcgggtatttaaaatggtgtttattgtaatgagttgggcatggtgcagtgtagtctctgatgaaagtgaactttccccggggaaaatgggctttacccattggctaatggctccatacattaagcgattctccttgttttttttttttttttctctttcagtctgaacccgagggcttttctcatttccacttatatgtttgtgctgctttcctcgtgagatggaggagagaaattctagaagaaagagattttcaagtaagtaagcactgttcacaagagcccgagttagggtttctgttgggagaaaggtttattaaattctagttcacgcctgatttgtggaggagctgaagagccctgcttgtggctcaccgccgacctcctgctgggaagctcctgctgggacttagagctgatgccaccaggccaccatggtgtgaactgggctggcatcatgagctattatatatcaagccacaggcttcctgagccctatgtcctcaccaagatgaccctggagggcctggcataacctccagttcccagggtcctcatcacagggtctgtgctatgtgtgctggggcctgagttggaaaagaaccacacagcctgaactcccatctaagcagccacttggtagttgtgtgacttgggaggcaccgtctagcctctctgtgcaagttcccttaccaacttaactgtagagctgtaaggaacccacaaatatcctgccagctgtgtgttccaccaagaaaaccccattgtccaggtccccagatcctagactgcctgagtccccccaagaggtggtccaggtattgtgaggactgttgacccttcccaggtgctttctgctatcactgaggtgtgaaagagtccttgagtacgcccaggaggcctagtggccaaggcccttgccgggtagggtggggaagtctagggtgcagcagagaagataccagcattatagggacaggactctgcactgactatctgtggtcactcccttgcctccagctctcaataggctaggtggcctgtggtccttggggttcccagtgtggtaacttgtggtggctcagtgatcttgttcctcagctctgtgcttctcagatggctctgagctccctgcttcccatctgatgactgttggaggagtcagtaaagtcctgcccagtctcaccgaggcctgctgagacctcaggggtcacagttgggtttgtgtccacttgctgtgaattagagtgacccatgtagggaacctcacctgaacagcttcccctattgtctcccctgatatctgaagacccactcctagcgagggtagcagcccagaaaagggcacggtagaaggaaggcccatggacaggtaagggcattggccaggggaaggaactgccaatactacccttggcgtggcagacagagaaccagtctgcccaccagtccacagtgttttaagtacatggggtatgaggttgtccttttcctcggttgctgcccctgtcattacacaactcagttgtcctgtggaccgcggttgtaggctggccaggactccaggtcccctcctctagcctcatgaatatggtttataagtggttgagatgtactggctgcctgccccattgggtatatgtgacgctactggagctgaagccatctggtctacctggcccttcttgctgcatcctgagaacatggaggccatagggagcatgactttccctgtcaccaagtgatttatagtagacgtcctaaatgctcagctccgtctcccacagtatgcttgtttgtcaccaggacacactgggaagcagggctgactctacaggtacctgcctgacctgttaccctaactgcctgcttacagaagagagaagggccctgctctcctgatgtgcagtggctactcagggcactggccagtatgttaggtcactggacactcctggcctgactggctctcaggagcctccacgggaatttgtgccagactcacattgctgccccacttcctgagggtcagaggtctcagctgaggtaggctctcagataactgccatcttgaatctggcctccctagctgggcacggtgtctaaagaggctctaggcagagtttgctgccttccaggctaggccagcctagggttggatatgggtagcagagaactcatggtgggcacagccatgtgcttaggggaggaatcctccattcctacaacaatagctctgcagctccctgcaaagaccctaggccacatgtgctcaacagccacctttagcaaggggctgtctgtacctctccctacacactggctcagaccagaccaggaacactgatcatggcctcttaagtacagcaaatcttgtgaggatatgcagtgatgtgtcacagcagggactaaacccctgagaggtggtcaaaaggtatgtacagttactagacactggagtaactggggacactgtggccatgtgtgtgatagacaggacccatggcatcctgacaggctgcactgatggctcccctgctcttgctcaggctacattgatttcagcacatacttgttttaagtccttgctgttgggctgcagttatgctgttgtgattataggttcacactgggaggctgactccagtgtgttgctggcctcctgcatgtcatcacccaccgtccttctcctcacacagcttggggtgaggaggaccgggcaggacagtacagggtgtagtgctgcctggacgccatccttgaagcctcgaaactggggtgtgaatggggaggacagggagccacagggtagatttatgctgtgctacaatgaggtagtgctttagtggcctggaggctagagagagtgtgtgccatgaactcagtgcgtgttgttgtggagaactgaattaaattaaatgaagaaccctggggtcctggtgagtgccagtggttgtgcttgccactgacattttaggaaaggactctgcctcatggaagtggagtaggccgagcctctggcagtggggtgttctggagaacggctgtcacagcccctcctctgttggccgggattggccatgtaggcagtcctgtactggtgcctaccatgcccataggtgccggattatgcttgaggaggaggcacacccagggcaaggcaggcactggcaagcggcagctggggtgctgcctgtgggctggctctgcatggttctgtagatgtggcaggtcagctggggcatgggacaggcagggattctggttgtgcacttggatccttggcacccccctttgcccagggactattcctggctcggtgtgtaagggtctgtgtactgcatggcagtgtcctcctacagcacccagaacattacccatggagcccataggctctgcacagtgtgtgccactggggtctccaccacaagctgcattatccctgccagccagtgaggtcctatactcgtgtttgtccatcagccatatttttaaggggccctttgaagtgaaaggaaatccagggtgtagaatgacttgtatctctgtgggtgggggcacttgtcactcttcaccttccttgtttgctaggggtttgttagtttgttttttgtaagcagttttgggagtaagggaaaggaagcttttgccttccctcagtacctgctgttccctccaggacatatgaccccacagtgctggctgcagtgtgacacacacttgacaagagtatgacactcttgagtgactgcatagctgagacatgcaggaccccacaccagactgctggtacctccccaggaagcactgtgttcatagtctgacccacagcttggctttcctggcttttggactgcatggtccaagtgcagtgttgtaaaatgtgcactgtgtctgtcttattcatgatttctgagcctcctggccagggttcactgaggttttgactccagtctaatcctccctgcctccagagctggtcacctggcacacttgtgcttagcccagacagggctgcctgggtcctgccgatctccagaaacagctggcccagaggagtagtaagccaacacgttggtgagcttccacctgtggatggactggggcgcttattctaagtcttaaagatagaagctctgtagaaacaggaggtggcagccacctacagcattgtttcagatgatgtcttctggatgagtgtgggtctttctgtggaccccagtggctgaggagcctgcagctttggttgtctatgaccatttttatagatgagcacagcctccagcctcatcatctgttcgcatggcatgtggtgagcactgcctggagatctgtgaagcagcaaggactggatgagaggccgtgcctgcactggaagccacactccggatcaagtccatgccggcagggtttgcacaggccctgttcctagtgccattagaaggatgtgcaggccctattccacctgtagggaatgacctggtaccccctcttgctctcctttgggatgagtggagacctgaagcatctgtggctactgagaatctagagaggacaggaaagggtagttctgagtgtgagctccaggctgtgtggtcccttgtcctctcggcctccatccacgtttgctgcatttgctcagtagtcatccccagagcgctgcttggctcaggtcctgttcccaccctcaagggcagctcaagcgggaagtggcttgaggtgggggcaacatgagactctctgttatgggcacctgcagaggggacagggaagagaaataagatcaggcaatgaggagtaacaggagagaaatcagaagtgtgttgccattgtagataagcctagtgactacaatcctgcaaaaggagaaggggaagacaggcagggacagcttccttttttgttcccactggagacccactgacagacatcaggcagagctcagggaatcctgcaggagagagggaggaaggattgtaggatccagaggggtcaaggacaccaggagaacatggcttataacattaactaaccagagcccataggggcgcacagagactgaaggatgacagtcagggagcttgtgtggatctgaccaaggtcctctgcatacatgttagggttcatagcttgtgttccagtgggactcctaacagtgggagcagggactgtctctaactcttttgtctacttttggaaccctttcctcccacggggtcacctcatcctgccctgaatgacggtataactataatttgctatatagtaagcaaattaacaggaaacaggcggggatggatctgggagagaggggagatggggggaaggatagagggaggagagaggagaaaagagtaaataaataaaattaattttgaaaaataaaacagacaccaacaagctgggaaacagatgaccaagctttggaattaacacgggtcagggtgaaaatgatcgtgaggttacagaaagggttttagtcatgggaaatggccagtaccaggcttgtaagtagatgtcaaactcatgattctatttaaaactttccaaaataaacaaagttcacctttagcttaaaaagaggagaaatgaggtctgtttataatggtaaagaaatcagtaagtaaaaacgtgtgggttaaaagccagagtcgagggcgaggaacatgacttggtgggtaaagcacttgcctgagcccatgaagagcacgcccgtcctcctgcaccccctccccagctgtgagataggggacagggcaggagaatcccttgagagatggctagtctggcctacatagagaccctgtctctgcaagatggaaggcaagttgtcctttggcctccacctgcacctttgacacacatgtaccttcacacatatgaaaacacacacacacaattaaaaagaaagaaattggagctgataagtaagttgctaggtgtattttagaggatttagaactgccagtgacaggcaggccactaagcaggtgtgtgaagaaagaggagtttagatatttggggagaacatgaagtcctaagattgccttggtgattttttttcaagccccgcagtctggtagatccatactttgtggatgagtaagacaaggctggagcatgcctgttgctgcaggcatgtgtccttctgggagcttgtctccacagttcccacagagagaacttcatgttccatttcactgagctcaggaacatcagtctgtgtccatcttggacactggactgctgtgcagtgtgcctctgtctgcccatcagtctccctccatgcctgtatccatccctggcctccatagatctctgagatgagataatttatagataataggcacacatttttcatggttctggaggcagggatgcctaagagctcacgggcaagtttggggtctgcttctaagctggtgccttggtgctgtgtcttcacatggctaaggctgagaatggaagggactaaggctcaatgccttggtaagggtgttgctctgcttgtgagggggactaaattcctggaaatactaacttctcttagtactagcacgttgaagactgagtgccactgtatgaatgctggaggcatcgaaactgaagtgtggagtaaaatgtgggttacatgaggttcacaggtcaggcaaggttcacagatttactcaccagacaccaggtaggaacacaagcatgaccgaatagaggtaacgagtatgaaagcaagcccgtgtgcaggtcagataacagtctaattcctctctgtctaaagacagatactcttgagtttatcaatgtactgatctagtattttataatctatgtgtacctaggtgtgttgagctagttcgttgtttgcaagcctgtttgtattggagtcccccagtcacatacatctgggctccaatgagaagagctaatgaccaagccttgatcatactcatgctgagtgggaatgtcactgagacctggccagatcagtaataggaaggaaaggcacacagggcaggctccccacatattcctgacaagagatacaatggaacatgctctcccaagagtaaatgagggaccacacccgttagggatccaggaacttaggcttttattgtgggctggccatggggcatcgtctaccctctaaaatcaggtaagaaactcatgttttgccacatgcgtgtgagtagttcaggtaaactagtctttgcctttagcacctataaaataggtcagaagctatgttcccagatgccatgcaaggggtaaccactttcccacccccctctatacaacatcctgacagtgaactaaaggcagaatcatctggtctcctacaatgtacagtagcattccccaaatgtaagagaaggaagaacagctctgtttttaaatcgacatagcgatattgtcttagagtgctgagatgtctgaaactggcagcctccactccagtccaagggatggcacacacttctttgtgccgtgggcccatcccctatataaatagctggcacaggaccaggggaagccgacttagcaaaggtgagtcagacccttcccctgatgtaagagtccagaaccctgaatcagctctaggacacaggctggattggcctccttgcttgtctgtggcttagatgaatggaacaagtcagagctgcttctagaagcacctgctgcagcccactcagcacacatttggggtagcgtttacatcactttcatgtcacttgatactaaaatgttggtttttaactgacaagagcctcgggggaaggtattgccctagattattctgagcatgtactgacaacgtaaatgtttgtttgaagtgtcacaaattaaagggcaggtaagaatcagaaatagcttgttttggtgggggatgggtctcagctggaactaaaacacaccctgtgtccttaatatacagggaattcacacagagaatgaataaaaaggaaatgtccccatggaaaatgaatgaagacacccagagtggtcagacatgtcactgaaaaattacgcaaccatttagaaaaaaaatctagtcattaatatagaactgaaaatgaacacaggcgatgctgtccgcaggcagcactttgtagagtgtacttcaagatcagcaggtgtagagcagagcagactgcactgtccctcctggaggcccacatatagagcctttctggagacctcaagtcctcagcggacctctgatcccacaccagcctgtggtccatggagaataggttacttacagtctgtctccaagccatgtgaattgctgtttgaaatactttgtaactacccaaactggtcttaaataacctcgatggctttggagatgctgggcacatttctgtggagaaacctggtccagaattacgttcctactcacaggaacagcaatgaaaagataatcccagattggctcgtgttcaaagctcagagaagtctgaacaaaaggagacccagtatagtatgatcattgctcagattgggctagtagtatctagataattttattctcttggttggccctttcccttcagttcatctgcttctggacattatgcacagttgtgattctccaactagggcagtgcctactttcagagcagcccctgctctgtgggttcatggcttaagattggtactgagggatggtaggctctgagagtggggtggggtcatgagaccacacagcaaggcaagtggatgcagcagttctcccacagatcccaagctgtatgaagtactggggtggctgacgctttttctctctggtagccactgaggaaacctctagaactgttgcctatccagggatgactgtccctgcatagtccctgtgtcactaccccctgggacaggcttcttcctggtgtcattggtgtcccgtctgcagggaagagagttttaagaaatcacgtctgagaaatgggtgtggaatctttatccaaatggatcaaacctcagcccatcaccttccagtccccttccatcagggatgagtcccagagcctagcttttctctgggatccacccaaagatctacacagctccattcctgaatcagagcttccttaagtacccannnnnnnnnnnnnnnnnnnnccatcccaccccctatccctgacaacctgactttaccaaagagaaggattctggcagaaacccaacagctgcagcatgtagatgggccctgcctgctgggctaagacactatctatccctgaggaatgcacagcctcttgggacgcagaccctgagctcccctttgttgcctcctgagcagcctcagagcagtaggctccatggctaaggccttggcctgttagcatgtatggtgtctcagtaattgaagttgtcttcagcctggtgacagctttgaaattctgcttgaaggtgttgggagatcacttactccatactctgacctacttattagaaggaccattcataggtcctgtggatacttgtctgctgggagtgggctgaggcggagcattccctgctacctgtcctgtaggcgtaaatccagacaacttctaggtgtctgtctcgagctcagcttaggcgtcagagatgcaggcagtcggtatgttttaacgcagattattgttcacacataaaaggagaaacaactcacagccagtgaacctgacagctgatgatccagctggaggtgatgccactgggatccagagcggggctcgctccctgacagcagacagtggggagagatggcacagttttcaagttccacttcccagcacacagcaagcctgtgtgtccgtccactggtgggaaaagggacagcatgcaccctgtagcaggtgttcctttgagtggcagaggctagggcttttgtgtttgtgaggccaggtcagccaggatgccagacactcaagggtcaccagggtcagagctaggccagagacaagagatcctggtggaactgaggtagctagaaaggtctcttactgctggagtacctgtcttgagggcactgaggtgtattggagaccagtgtgtgctggggctgactgcagcctgggttttactgccctggggaggcttatcttgtctgggcactcttgtgccctgcttctggttgccgttcccagagtgctgctggccatactcaggtgcttgcttctgatgtcagctcactatgatgtcagagcaccgacatgggtgcttccaccttgttttcttactttctgttctaagtgttcactaccgtgtgttttgcctccctctcttgaggagtctgtgcacttgtacttgaaccgctgtccttgtgcctgcctgcccttttctctcaagcccttgaaccacagcttcccatctagggctaggagcaaacatggaaagaccacttgaagatggcagggtggatggcactggtcctgacatacctgcatctgtatggctttgctggcagggccttatagcatctctctgcatggactactgctgaccttgtaattattcaaagccctgccctgcctcctgggccatctagcggacttgaggcagcatgcactttcctgtccagtgcctaactgaatgtatgaatagccactgtaagctaatggcttttacgggttgatgtctctctttctctcacacagtgtacccttaaagcagcaaatgtcacaaaatgccaaactaaagatcatcttcctcatcgtttccagacatttttaaagacaaaattggtcaatagaaaagagatctttgaaatgaattgttatttcttctttgcttctggcaggttgttgcaaagtgaggtgtaggggtaggtagagctgcctgtggtgctgagtagggagggccctgtgctgtagtgtgagggtgttgctgtgcctggctagtgcactgtggtgtggtgtggtgtggtgtggtgtggtgtggtgtggtgtggtgtggtgagtgatgctgtgtgggcagcactgtgctctagtttgtgtttgctgttgtgtggggctggtgctctgtagtgcagtggatatgttgtgtgaggctctcatgctgtagtggggtgtgttgtgtggggtttgtgtgctgtggtgtgggtgagttactgtgtagggcttgtgtgctgtagtgtgggtgtgttgtgtggggcttgtgtgctatagtgtgggtgtgttgtgtggggtttgtgtgctatagtgtgggtgtgttgtgtggggtttgtgtgctatagtgtgggtgtgttgtgtggggtttgtgtgctgtagtgtgggtgagttactgtgtagggcttgtnnnnnnnnnnnnnnnnnnnnaacttgaaaacacacacacatacacacacacacacacacacacacacacacacacacacacactctctcacggagacatgtattcacaagcatgcatgcatgccctcagtatttcttaagaaacacgatatgaagactgtggctgttcttttccttctttgtgtggaaaaccaagcctttctctttacaaatgggaaattcatgctgaaatagtcataaggaaaaatgatttctgttagcacaatgaaccctgtgctttagccatttagttattatgtcttttagggacacctgactttcacattaggccagctcactcttgtgtgcataaagaaagatgtatgcttgtgtgtgggaagggggaacctctgtttcatggtcctgcagccaaatgtcatgagaggctgggactgtgtgttctctagagccttgggaggcactcggagtgtacttgcagagtgtgggctacccatggcagggatggccaagtcatttgccttcttcgtagtacttggacccttcctttggggacatccagacttcatctttgtcctgagttgccttcctaacacaacactgtcctcagtttcttaatgtttgcaagagggtagtggctggtggaaagaggagttgcctgtctcttcccagtccctgagtttctgctcctaccccacccccactcacaacccttgcggccgagggtccacctgcccttttagtagtcaccaccttggagaggtatgagggttgtgttagttcagacctactgcaatcacttctttaagaaatgaacccccagacagttctgagagaaagaaatggaagtctagcggctatagaaaatcagtttgagtcccgtgattgtgctcagacacacctacatattttactaagccatctcgctctgtgttgtagtttaccttctttgcgggatgagcagctacaacttcatgcatatgcctgaccgtggctgggataatggtcaacacagacacctgaacatgtgacgtggttgttgaaggtggtcagatgttggcacacctccaaagtacatgggagagcccagtgcttctagagttaggtgtagtaggtgaagaagtgtgaccatagccagatatccctaaagatcatccgtggatggtatatacccatgtctgaagaggctgggctctcatctcccatacctgcttaccaggtctatcctgcccttttttaaatatgttgctaagtcctgtcactgggtgtttcagtgtgcagtgttagagcttcctgcaaatagcaggaaaagtttgaagactatcaaccatttaacctcattgggcataatgaagatcccaggaccttcaggatgtgcctgttccccaggaggtagccagagtggaacgctgcagggcagcatttccttaggtttttaagcagggctcagccgaggagtctgggtactgggggatgcaggtggggtaatggcccaggttcccaagtctggagttagtctccctctcatcaaactcatcctcagtgttctccctggccggctgctcccacatgccacccttgtgtgatgtcacctccctacattctacaggagctggctcctctgttctgctctgcctcctgcctgccagagtgcagtgggaagtttcctggagtatctactgacctcaccactcctctgtgtcagacttccgtgtcacatacatgaaaaactgggctaagaaacatgggtggctaacgagagcagtgctgttacagttagtaaaacaagaggccatgaatttgaagagtatcgaagggtatatggggcagtttggagggaaggaaggggaagggagaaatgtaaattataacctcaataaaaacataagggatttaattcatttgaaaaaaaaaaaaccaaaaaaacaagtactgttttaccagtacagtgggaaagctgtcttccgggcatcatgagagccctgtgggtctaacctgtccacctgaagcccactctgttctgcatagcctttccaggacaggggccctgcagcatgctgcctgatgatgcaggtcaggagctgcctgcccctcccctgtgtcttctgcttttcctcagctcttagagtagtttgcatataaagaatcccccaagttctgttttaaaggcttgatcccagctggagctagtcagtgagaagtgattattaggttctagggctctgacctaatcaatgggcttatccattgatgggtttgtaacagggcggaattgctaggaggtggtggagaccaggaggtagagcctagttggaggatgtgggtcgttaggaagggtgtgttagtccctggctcttttctctcaatgacttcctgcccccctcccccgtgatttagacagttctgcccatcgtgctctcccatggtgacttttctgccttgcctcagtcctgagagccatggagtcagctcacccagtcaaatacactttgtatcttaagtgatttttctcaggtgtcctggaaataaaaagctggctgcatggacagttgttacaagtggtcattgctgtgattacccgaccatgtaactggttggaaaagtctggagaggaaggttctcagccagcagttctcaaccctttcacaggggtctccacgattattggaaaacacagatatttacattacaattcagcactagaaaaattacagttatgatgtagcaatgaaagaaaattctgtggttgggagtccccctaacatgaggtttaaaggtacagcagtaggaaggttgagaaccactgttctaagcagagcttagtgggttgttctcaagggagtttagaacccataatgtggctaggaacatggagagtaaagactgctcataggcttccaatgggagggaggactctgttgggaagggaaccagaatccatttgtgttatactgcggaggggaacttgtctgcattttatccatgcctggagacattacatgaagctgaacttggaaaaaaattcaagaccacaaagcttccaggctttggagttgacatcgctggctgcttctaggtttgcattgaagatggttaaaacaaagaagggtgagtaaaaccttgtaacttgtccggaagagaagtgcatgccaagtcaagactgagaaagctgctgcctaaagatattagtaacatcagaaagaaaccaaggactttgcaccaggacaggagtaaagctgcctccagggcacctcaggaatggcaggatccttcctatggcactaaagagtataaaagtattaatacattaaaaagactttcctttgagaaagtcatcccacccaggcacgctgtgcacaagggccacctatgaagattcatttcatcattctgggaagcccagatgtccaggctattacagctgtggtcttaggagccctggcagctgcttggaatcactgccccatgtgctgatgactttttaggtatggtgaatgcaggtggaggcctccatccaggttttaggtgaaatactgggagtacaggtaagatgtagcagaagcatcccccacaccaaagggcagcacatgaagctgtgatactgaagctgttagatgcagtgaagacccaaggaaactggagatgccaggggtatggagtgtctgtcatggaaagcttcagacagtgaagagagccatccagggagaaaagccatgtgttctatggcttccagagcttgtgtgaagcttccaggctcattggagcttctaccataccactgtgaccctgaatgtgcacttgaagccacagggtttgtctacactgctaggtttcagtcttcttctttttcttccttctttgccctgtcccttgcttttggaatgagagtgtttcctctgggccattgtgtgttggagttacagattgccatgttgaaatagcttagctcagaattcacagagaaaattttacctgggttcttgagttgaatttgaaccattgaggattcctggctatggactcaatgcaccatttagtttgaaatgtatgtgacccttttagaggccagggtggaatgtaaacagcttagacatgaagtacccccactttccccatggacagcacgtgggatgtgtgtatccccactccatcattacattgctatttaaaggggtgggaagtgctcagaatgtagagatgcttagcttcaacatagcacatcaccagcagatccagcttctcagtgcgtttcactttgagccaagacccttgatgtcttcatggtagatgtcagtccaggtagggatttcaacccaacctgcatgtaagtgtatgacaaggtatctggtacagctttaggacattgagacttgaaaatagcaaataccagaaatagctttagcatgcttaggtgatatttataaaaaagcaataccctgtgtgttctagtgtacattcataaagtggatggtgcttgaacataaaatgtaggttagaaccggtcacttcaactctaggtgtgcacaaaatcttagcatcatagccaatttcaaactactcactgctaaattagaaaaacattactgctaagaaccatcttcagcttggagagggggttgtgagggaggagtgtttggaagcagtgaaagaaatgacttgaagtcaaatgatggggtgtaaaatgacagctctgtagtctgctcaagatggcttcctggacagctttctgtagatagctcttagctttgtggtctgtttgagttagtgttctactggagatagcattctactcaagacagctctcttgctagaaaaaattctaaaaatccagaaaagctgctagaaaaattctgaaagaattgtgttcactctctaaactgttctctctgggtagctctctctaccagagttcccttttggttatctcatgaattagcattttatgaccttagccctttgattcttagaagaagataacaagtatattgttttttaaaacctggcaaatgatttcagagatctgcctgcctttataagcatacacaataagctagctgggtgggatcttatcctgaaattgccattcccaccatgcctggacctaaatttgctctgtcctaggctgaccatgaactcaggaatctgactgcctttgtaagcacaaataataaacttagctaggagggatcttgccctttgaacaccactcctcaattttcttttatctccttccttagtatctttctgacaagctggctcatagtgcagctgcctcttgtctttgaggtctattaagcctctcatataattcatattgtgtccatatattttgcatagttgagaaattatacattcttgaactcatgttttcagagttctttcccacagtcataaggactatcctgaaggtcacaacatttacaattttaccaaggacattagacatacccttgcctcccaggctcatgcttctaattatcatgaagtcattaatcttggcagagagaacatctcctgaaggagcaacataaagtaaattatacaaacaagccttacatttaacaaccctagcaactgtcaatactggttgaggccttatgccctgctagttctgctccaggggcaggaactgtgtcttgtcatcccttctgcatggccatgcagaactaggcacattaccttgttcttaaaagagaaaacatcttcaccatggagttttggctgtgttttggttctgtagggtaggactctggtacagggatgtggtgctttgaatgagaatggaccccataggctcatatatttgcattcctagtcaccagggagtacaactcttttataggagtaggaggtggggctttttttttttttttttttttttgcaagaatctcatgcccaacccaggttctctctctctctgtctgtgaatcaggatgtaaagctactcagctatacctgtctgagtgctgccatgctcccctccatgatgatgatgggccaacctctgaaactgttagcaaacccccattaaatgtttcattttataagagttgccttagttatggtatctcttcagagcaacagacaaatgactaagactatagctggtaccaaggaatggggtttttgctttggcaagccagattatgctgtttgttggatgagtatagaaaactttgggagtttggactagaaaagtggttggatactctaagtgggacttaatgggccatcctagtatgaaatggaagacagcactgagggctgaactgtggcagttcagtaaagaagttttagagggaagaatagtaggtggctacagactattcttttgctattttagtgaagaaagtgagtagtttttgtccttgtcctaaaaaaatatatacctgaagtatttttggattaatggcgttggcagaggagacttcaagacaacctagtattgactttgtcatatggttattagtagccactgttatacagatctacaatgtaaaggtgcaagtgggccagggagaaatacaaaatatgcagagtgaggaaaaaaagtagtgccagggaaggtgatgctggagccaggtcccgtgctcaagaaggaaaaaaacaaaaaacaaacaaacaaacaaacaaaaaccaaataatcaaaaacaaactcaaagaaaatcctggtgccaaaagaaataaaagcagtggtggcctcagggcaagacccagcccagctaagctttggacttgtgaaagagattaaaggaaaacttaagcagggaagggaaccatcagcaattgaaagctggtacacatttaactgaaggagggggctaagtaccattcccagcaagcatcagaatttggcagcttctgccttgtcttggcttcattagagtcaaagatacaagaaaagggttgtagaatcttcctgcacagctaaagaaagcctctgaggccaggtgtatgtcaggggtgcccctgtgtggacgcccacacgctgaagctgtgaaagtgaagcctgggttgtgttaggagatcctaagctgtgagttacctgccaaggagaattgctaacagaatgtggtaccagcccaagagagaatgtgttgcagtcaacagaactaaaagagttggtgatctgaagagcactttagcatcaggcatggagaagcagaatgcttgtcttgctagttttcagtcttgctttggtccagtatttcctctttgtgctttatgtcctcccttttggaatggcaatatatattctatgccattgtatgttggaagtatgcagtccacattctgattatgattttacaggggttacagttgagagaatgctttgagtcttggcagagactttagactttgaagcagtcttgagactgaaagtctatggggacttttgaagttagactgaatgcatttttgcataatgatgtggcgacaagtctgtagggaccatggagcagaatatggtgtttgaataagaatggcccccaagggacaaaagccataccagctgttacctggccatgcagaggtcccagaacctgtgcttgatgtgatgccaaggactctgccacttgagtgacaggttggactgtggatcctggttttaacttctatttcaggtactttgaaatgccaggcaccagaatgaattgcttagtgataatgcatatttaataccatgaacaggtgattccatcagtgtgtgatcctcacaccatgtggttgcacaagctgagatggttatggcatcactggatggtataatctcatggggccattgtcctgtgtgttgttcatcactgacatatttagggtctggttgaaatttcagctccacaatagaactgaaaaacgtaggaagtgactgtggttgtggacagtcttccttgggaagtgactgtgactgtggagtagcttaagggacagccctccttgggaagggactgtggttatgtgttgcttgagtcctcagtcctgccctgcgtccccttgggggcagtgggtgagaaggggcgaatcaactgctcagactccaggagccggtgagaatgcggcagaaagctcttttgattaattctcagggagcaccctttataccctccaccctagtcccgttggtcccaagcaagtgtgtcctcttaagtggcagttcccaattggctgtcattgtctgcgtcaccaatctctgggctctcagacaggattcagtttagccctcatgtggaggaagctggctccgcagctgcacagccacactcactatttaccagagtttctgtggaagcagtcaccgccttggcagcagggcctttctgctcctcctacagttatgtagactggggcagtttgtagatgggaatcagtcctcaggggtgactattcctatggagaatagctgagggacagccttccttggaaagggactgtgaccatatggagtaatgtaggggacagctttcctaaagtatgtcaggcccctatgtgcattgcctcactgtggtccgtgcatctccatttgaagctcagggctggggctggcaggagggcagcagagcttcagctatgcctcctggagcatagcctctgcctgggcatgtgtcagtgaatcctgtctcatacagcagcagccttggccagctgcagttattccggtcccatgtatctctgcaggtctacatggccttacctgggcggtttcctcagataggtacactttcctccccacttccctttataagagaactctcgtgtggggtgaagttggcacctggaccccaggagccttttccctaggcagaagggcaacccaagtctgcatcagaagaaatgtgcccaccagtgagctggagggcagctgaatgttcaaaactttgccagcatctctcgctcatttgcctatgaattaatcctgccattaaggaaaaaattagactcaccactcaaatcattaattgagaggccttattatctcattaatggtgtttgatattgaaggcagatgaactaaaggaagcttgcctgcttggacctcgaagaaatgtaattacaatttgggcattattaagatgtcccctctgtgctgtcacatgtcccattttgcttccttttgtggacactgagaaaagtcttccttggaaataaaaatgacacagtcttagagaagcactgctggaggctggtgggcctgcagcctgcagtttccttggacccaaggctccctgctgtccttgtgggccacctgctgaagcaggtctcatgggcagagctcatcactgccagcatttggaggattcagccaaccttggtagacactgacctgcaaatgctgagaaggagagggcctgacactcttagaggtgacccaaatgaaaagcagcaggcagaaactggctggactggtgtgtaccacgacgccaagccctgcagcaatcacttccttgattagcaaacccctgggcttcttggtggagagctgccggtacagtgtgggcgatatggttttgtttatttagcatccagagaaggggctcaggctgggagacagcctcctggggctgctggggaggggcagctcgcaccagaggggctggcaatgcagtgcagccccctgctagcatctaagactgactgctagggaggcttagttgagtggtaagagaagcctagggtgccaggctgaagactaatctccactctccaagccttagacaccttactgtgggaccctgaacagccatttgactgctgtcccccttagacccaggtagtgctaaggatgagcagcctcctgtgagggcactgctgatgcccaggctgcagacgccttcagtggcaagtgctactgatgcccagattagtggtggtgggttgttgtggttagtgtttaatatcaattgggggtggatgttatgccccaccattgattatttatttcccacataaaagacaccaaacttttatatttataataagccttaaatagcactagagcctggcagataccaaacatctatattattttgtctactttcctattaataaccccgagatatgacttgccatgttccgccagggcctctctttccttgtagagctagggtttccacctgtcagtgaggtatacgtagaggtgtgaggaatgtcttggagcataactgtccatggcccgtcaccaccttggttacttgtctatcacccagtgggccttctagtctccctctggcccagaagctaagggagaccatcaagcagaggaagtccagcagccatctcatcccatgtcagggaaaaagtccctggagttacagcttatcaagcaaatatacctagactctagctctgtttcctgtgcgccagctgaggatgcatgatctgaggcactctgtccgggatgagcaggggtgttgtgagaagtgcaggaccacgtcttcagcccctagtctaccgtgctgcttttcttccctgagacgtcagagcagggatggccaaagcttatcctttgactgcctcctccatctggcgcccatatgcttccagtgccatccatgtgagttagccatgggctttgtaacagcacaccctggctcaggagcctgtaaacaacgaacatctgtttctcaacatctggaggctagacatccaagatcagggctctggggtctaacggcagaatttcttcctgtggcctcagttggaagaaggggcgaggcgtttgttttttgagtctttcattagggctgccgacccatgaagacgtattctgtgatctcaggtctccccttgtcgacatattcagatcatagtgagacaagagaaaagacctggccctatcaagggcctgtgcagtcaggagcccccttctccatgacctagctgacagtcatcaccaccctccacccccagtagccatgtcatgcctcaggttaggtagagtatgagatgagtcaggactgtgctgactgcaaggctgtacacaggccccagccaccagcactgcactgactggggcaacaactgccactgctgccatcaccacctcatcagcttctgtggtgaccacaggtgccacttctgctgccacggacctaatggtggaggtgacagtcaaggtttgccaaagaatgtgaacacctctgtcttagattgatgtggaggtgttgcaaacctggtaccaagggcaggggactgtcactggagcatagcagctctcagcttgtgtcagccagaccacctcaggctctgtatccttcactcctcagtcctgagggagcctgtctgggagctccatccctttctgctacagtataagcctcaggatagtactgtatagcctcttcgtgacttctaacacagctaagagctggtgacacagcagagagtagcatcagcctttttgtaagttctgagtgaattgtgaaacttccactctggggtgacagcagcacctttgttcataaactcagtcatccctcccagctttttgaactgtggctaccctctatggctggcccacctgggttggaaccctctggcttgtttgctgggtggctgtctttactcgtccatccctggtttgcttgggtacagtgatccaaagcctctggagagcagttcctctaaacacatgtttaagacagtttaccaaggccagtacctcggcaaaggcctccggcacgagcccaggtaccatggtagtcacggctcccattgcctcatgagtcagaaacttaccttggtgtctggaggacatcctggctgggatggccctagatcctcattgctcaggataaccagttgcccagggaagctgatcaggactgtccttgtagggtcctgcagtcctgctgggctctacccagctccttcacacaggatgtcttcccagctcttgcatgtagaggacaggatacaagggcctcccactgtttggataaggggaagcacctcacctgcagtgtgccagagatctccactgacctctgacgagagggtaagctgcactccctcacccagcctccttactaacagcctgtggtggtacagattatgtctccagataatcctttgtaataaacctaattcctgccgtccatgagaagcagcctgtgagcctgtcactgagtcaaatgacttgacattccctctttcatttttacgcagaaccggaatcttgctctaagtacctatctgtgattctgcctgtactccccactacattaacatcttttataatcattatctgacgcctttgttactgtggagactggtctctaggaacagcactgacaccccaaatgaagcttggcattttttttaaagcagtttctcctcactgggcagagtggacatcacttggagcagaaattgaactgtgtgtatttagaaatcagttgaggagatcacacccctcggctctggatgcgagcgccaannnnnnnnnnnnnnnnnnnnnnnnnnnnnnnnnnnnnnnnnnnnnnnnnnnnnnnnnnnnnnnnnnnnnnnnnnnnnnnnnnnnnnnnnnnnnnnnnnnnnnnnnnnnnnnnnnnnnnnnnnnnnnnnnnnnnnnnnnnnnnnnnnnnnnnnnnnnnnnnnnnnnnnnnnnnnnnnnnnnnnnnnnnnnnnnnnnnnnnnnnnnnnnnnnnnnnnnnnnnnnnnactgtgaggctgtggcccagggataggtagttctgagtctgtcagttcctgtggcctccaataccctgtgatgggtgacacatgatggagtggctggtctgtgcagtctcacacacacacacacacacacacacacacacacacacacatacacacacacacacacacacacacacacgcacacactccctacctgcacaaacagcctagaacaggtaggcagtccaggaggacccaaaccttaggttgaagagctggagtgctcagctctgctccttggcacgcttcagtcgggtggctttgctgttctccatcctcaaggcagctgtcatgagtatgtgtaagatccgagcaccttcttagatggtgtgcgctctctctctctctctctctctctctctctctctctctctctctctctctgtgtgtgtgtgtgtgtgtgtgtgtgtgtgtgtgtgtatgtgtgcgcgtgttaatccttttagggaggtaggctggcctccatttgaagggtcaaagctttggccagggtcacacagctggtacctggctttgtgatctgagcctaggttccctgggaaatcccagccagcatgtattgtacagtcaagtaccttgattctgtaacagaccaattctgaccagttgtctgtttcagagagcttggttttcgtaggaagagagagcaaggcaggaggaaggaaggaaagggccaatattttgatttaaaaaccaaagttttatctattgaattctactatttctaaagcacagcttagcccagtgatatttttaagccttcacctgaaattctcactcttccgaactgtgctctgtcatggaatgtgttggctctttgtgtattgttttgccatcgatggtgctgacagagcatgagtgacgtcagcctcctgcgtgcacagcctgctgccagaccagtaatgtgtgcctgcacctgccacagctggacctgttgcctgcatgctgaggttggcttctgccaactggccagcctttacattcccagtaggaaagccagggctgtagggcttgtattgtttcccttctctctctcacccacatatccagctatctacacctccccccattcgctcactcttcaccccaccacatatccgcctactcacctcctcacagagcaccagcctgttcacatggccatcctttcacttagctacacacccaccctgtgctccacattcatttggacagcaccctgttaggggccttagtgagatggcagctttagaggcaactctctctgttaatggaccttcaagtgacatttactttattttcagctaaaacgtttttatgaaagctgagaattcctggaggcactcttgtccaccattttaacttttacatgagctaagcatgtctccaaatgtgtccactctctttccttcttagttatggcacactgagcatgctcagaagtgagctgcttaacagcactgctcaggagtgggcagccctatatggatatgtgtaggctcactaaacgaggtgtctgtgcctcctttgttgaaggaggccttgcttgaggaacaggccgcctcatctgctacagctcataaatcttcattcttaacctcgtgttcatgcatggtggctttaactccccaaggcgggaacccattttgtttggctactacgtttctcctctcagccttgtgctgggacatcctaaaagatgtgacgcatctttgcatcagagcgtgtagagacgctgtggggaatactgagaatcacagagcttcccagagggaggcactgggaggagtgtgctcctgcccagccttgactttgaggggatctgcatatgctcaggcaggagaaccacccaggtgtgtcaggaccccagagccagcaggactccacccctctaagctcaaggcctgcctctgagcaacagacatgcaggcctacaaattgatggagccctaaaagcagtacttggcctcatgagtctataaatctcaggctggagtacttggcagtgaccctttaacattcttgaaaacaaaaggaaagtgtcctaacagcagaggatttacagcctgggctttactggaaccaggcagtgagaagcctgcagtccaggctagttaattagtcttgaacagcttccaggaataggtttgcattttaagtatcaccatcagtgccactgcacaccttcagtggggtgacagcctggggtggcatacagagctgggccctgggaagtacagagtccttctctcagcaagtaggcctgcctagaatcctgtgggaaacctgtgtatatatatgcactgtggacaggaggtgcctgcccaatattggtctctagaaccttgcctgggatattttataaagtctggcaggcacaagggacaagaggcttggttcagcccttctcctgaagagacattgaatggtggaaaacttacctcttgcttgaacctctcctatgtaggaggctagccactccatcttcccccagtggtgcctgggcacactgcatgttagctcttaggttggtaaccttcctctcctgcctgaactaccacttctcgacagctagtttcatgcactgtaggagatttaaaggccagacagccccatgcatgtggcagagagcttctccaggatctaatacctgtgacttctttagacatagtcttctgcacttccctgactccattggctttgcctcagtgtgtctcctcttcaccagacactcaggagcctcctgtgactgtgagccctgtttctctgtctcctcctttcctgtccagcttacatgtagcccagaccatcagcagggccactttcccacctgccctgttctccgttccctcaactctgctccaatgcagcccaggtctggtccaaagtgttttctgaatgaggaagcggaggtatgatatccctaagtgggctccattgcagaaggcagatccctcagtgcatggctgaggccagagccccatctgcagctgactacacacagtgtcagaacagtgtctacaggaagataccagtcttggcccgagtccctgcttctctgagaagacaccctgcttcccagcatgcaaagccctcctctggccaaatctagaattggccactgagtcacagaccatgtatcagaagaaacatctggctgcctgctccactgcccagccaaaatcaattcctgtctgagaggtaatccgatttgattatctctgagctattacagcaaggcagaggcactggacaccctggctggagattaagaggccctgctggtagggacgacaaggaagataacagctatgtctgcctggcccaagaggctgtgggccagcccttcccatctgcagaatgaagctcacagagttttcctacaatctcttcattagttctacctagcaactgtgatcacaggctctggcctcacagaggtggatatgggaaggttcactgacctcgcttgcttctctgcctctgtctaagggcaggctgcctgctcacacacaggccacacgggaagcgaggcacatatggtccacaggctctcgttcttcctggaaagctcctccgctcacacatctccttggggaattgcgctcatgtgattattaagtggatgtaggggtgtgggcatggcgctgaaagctccagaatttggaagacatctcagtaagaaagtgccaaccatagacacacagccggcgcccatgtcaggtcagcgtaggaacagaattcagagccagattacagacttagaaaatcagcagtactacaccaaaaccaggaagccggaaacttcatgtctacacttctcttcctaggaaatgacttcatgtctgtactgaccacctactgggacttttgttggtgtttttcattagtgagtgtttagctggatgaagtgtatgtgtgtgtgtttccgttttgacatttgcataaatgcatataaagtactttgattgtctttgtctctccattactttacatatcccccccccatccactgcaatagcccccttttactgtcatgtcctttcctctcctagatccacagaggatagaaaacacttacactgtttgacactgggtgctaccctaagaggacccagagttctgtaggagacaatcctccaggagaagctgagacgagtgtctatattaggttagttaacctgggcaatcctgtgagggattttcctgattaggttaattgaggcggggagccccattttctaggctggaatcctggattgtataaacagaggaagtgagctgagagcccacgttcatcaccctctgcgtctcaacctggatacagtgtgaccagctgtctcaagttctagctgtcatgactgcattatagacaagacaactcttccttccttacatttcttttgctaggttatttatactacagcaatagaaagaataatccatttgcctgtctgagtctggtttacctcacttaacatgatgatctccagctccttcctgcagacccaggtaaaactccactgtgtgcatacaacacattttccatatccattcatccatctacaggaccctaggctggttcttctatgtggttattgtatgttgctgtgggaagtggacagagcttactcccagtgtgcccaggggtagtgtagctgagtcacactgtaggtcccttttcaatggggcagttacatgcagcccaaatgtggcttctggctccaaattgctcagcagggagtagagcctttggggccaggaaggagaagaggaccagagctgcacctagggcctggccctcattaatgagcactttgctcaaagcctgacaccaggatagactgatgagcccgtcccaggggtagggaaaccagtccatgaggggtagtatgagtctgaaatctcctctgatgtgttagagagctggggaagctcccgactagggtgatgctgtagccagcatgcatgaccatgccagaggaaggttgctgaagaactgccatcctaagggagccctgggacactcacatgaaaggtgatcagtgtctactcctcctgtcacccttagacttgggtcatgtgacactagagggtctctttcctgagggatgcatataggaccagtgatggcaggcttgccaagtgacctatccatgatctgctaaggacatagttgttctctatgaccctctctgtcctgtcaggcagaaagtggggtttccttgagggctccccaaggtgagatcccaccacagggggatctactgaagactttgacaggaggaggctgctatcagtccacccatctctttgcaaacacttgaaaaaaggtttgaaacaaattcaggcagaaagggacagcatatggcacaagagaaaaagagcagttggacttaacagaaatcttttttaaaaaatgtctctaagcagtttgtagatcctgcatgagaccctagacaaggagtgagacccaccttccccttcccttggttagtgccacagcctggctctgatggactgagtactagccagaggaagtaggagagggcagcgaacagagttctcccagtgcctttcccatggtgcctcttccctttcaactggtacccaggcccacctttcaaggctggctctctctgccaggctcatcctgtcagtttactctcccgggctcagtgcagaatgttgcaggtcaaacttgtcccttctaatgcatgatcagtgtctacttctcctgtcacccctagacttgggtcatgtgacactagagggtccctctcctgagggatgcatgtaggaccagtgatggcaggcttgccaagtgacctatccatgatctgctaaggacatagttgttctctgtggtggcacagtgtcagagcttgccgtggtgtgctagtaccccaggcctcattagcacagaacctctgtggctcacacagctgctggatagcatgtggcttccatttatctccctcacatgattcccccaatgttctaaaaataggactttaattagatatttagtaaaacatcgcccagtatttatccctggagttggctgcattgttcattttgcagaagtgaatgcccccgcacatgcatacatagtgggtggctctcagagcacacagtggggcagcaccctcatgacatgactgccatgctcatgtgaaagctctgaggtggcctgtgctctgcagatgggctgggagaggaaatggctgaatgaggctggcataagtggcaggtgtccattgtggaggctcacgaaggaaagttctggagaaaaggagtaatgctggagctagggcacctaagaagatctgtgggctctgcagcatttggtcttttgagggtttaatgacttcctgaaagtgtcccaatagtatgtcttgcctgtgaccacttgtggtgcagtcgccaagttaaaaagagtatatgacacacccctctgctgcagtcttcagactcaggtgagcccagcaggtgcctcaaggatgtatacagcagaaaccccagggtcctccatcaagacatggagaactgtgtctgtaccatgaagggtggtcagagccttgggcgtggtagctcagcctctctgggtagttttctccacctgtactttctgtaagccaattcaccttttcttagagtaagaaaaggctaagaaaaggcccttacaacgtatgggctatgagtgcccctgagaccaacaacaccggggctccaggcactgtcaatgccccattgagcagatgccatgcaagcaggtggtcagactccgctgtcagcactgggaaatcttaaatacttgtctagtgacactaagcggctggagcactcggagctgtcagaagtcagtcttctcccacttacaagttcctcctttcaaatccttagagggtaaaaggcttccaggcatgactttgcctgcatgccagcctgtgctaggattgtcccctccatccaagatacttaactgccccagcacttttgctggagtggtccagtccagcaagtgtgctgacgccttgcactttcgtcccttgctcagccctcctgtgcctgcttctcaggcctttcctgccagcctgtgtgtgctctgtagctggctctcctgcaggaccatccatttgctcgacagactcataggccaggccagactgacctctcggacacagtgagtgggcagcactgctgttctccaggtctctatgtggccccttatctgctgcctgcccttcttttggacccttacatgcaaaccttgcctcctctgcacccacaaagttccctgtgtaaccctttcatggggcctggtgggaggagatcagccctattcctcccatgtctgtctccttcagtggccagttcacaaatgtgaccaacagtgatggtcatgtgctcaaatgggtacaagatggctgtagccctttctcccactggatgcagagggatcaaggctcagggaagatgcaccgattcagaattacaacatgccgttatgtagaagtgttgcagagtagcctggcctggtctgccctgggctcgtgcccacaccagggcctgttcccttaaccaggcctgtgagctgcagattctatttcatccgagaagaggagcctgtaccactgtctagtcttccacatgtacacagcaagccaggctgtcggggctggcctgccgttctcaatacaccattgatcactttgagggggtttctgatgcccagtgccctctcatgctctggtcagtacgagcttttgtgtccactccccacattctcatctaagacaggccatggctccctggatgcactagcgtggaaactgacctttccagacctcccccaccctccgtgtgtctttctacctgacttccccaacagcagaaaatcaatgtgagaactcagagttggacaactccagaaattgaagaacttttacaaagtatattacaagaaaaatgccatcttcctagtgaacctgtgaactcagctctctgacagtcagtaatctgtaccttgaaatgcatccttcggagctggtccattgctgcgaggggactttgaagtccagctttcatgacccactctgaagggcaggagctccatcccttggctggaatcttgggtgactgaggagcactgggctatgttggctgctgagttttgatgggcactgagttgtgttagcttttggggttgtggtgaatgctaggcctggccttgccttgtgattggggacattgtgagatatcatttccctgaaggtctttcagactttagtgggtcacagatccctcaccaagaaggccccatcttgccctggggataaggaggacccgtggtgagcaaggactggaaggctgaaccctgggtacttacaaggggagcgagagaccctgtcctgagtgtaggtgtcctagcacatgtcacacagagccaggggtcatggcccagcaactctgtcctgttcatttgcagactgttgggactaggatctctgtgggatacagcttcctcacaacaggacagggctgttctggctgcagctctggccttcctgcttgctgggtagcagttgcacactgggcagttatggggaggacttgtcgactgcccgtgagtatgtttgacaagctgagtctataccttgctctcattttagtaggaggcttagtactttacgtgacctctacctggcactgcacgcaccaagagatcaaagggcctctcatggccagactgagttttctctgtcctttccaaagcagagctgcaagggcaggctgggcctgatggaaatgtggaaggcagcacttgaggtctgctgctggaggatgagtagacaatagagataaatgggtacaagtgtgaccatgtggctggtcaagcctaggcctgcttaagcccaggactgtgttctcaccgtgcctcccactctttgctgctgaagcccatgtactgcccaaggctccccatgtgcagcgcagcagagtcaggactggctacttggagcttttaggagactgggggacctcccctctgtgcctcccaatcagcttgcctgtagctgggtgctgccactacacgtgggcctggaatcagattgtggagttgacagctgctctaagctacaatgccgtggtccctcctgtccatcttgcatctgcctcctagtgacagctctgagattaggagctggcaggcctcacagaggctctctccacaggccctctctctagggatgcccatgtgagggcggtgagtctgctgccttgtagataagagtggaggtatgggctccttcctgggatcacaccctgccttaagccccaccaccttcccagtgatgcctcaggaccacatggccccacatcctggccttaggtaccacaaagcaagaagtctgcttggggatgaaacagactctaatcgcagtgcttggatgtgagctttctctgaatgttgatcagaggactcccagccatgctgggagatgaaaggggagccagctcagctggaacccctgtgtcagcccctgttttcagcaccaaatgctgtttttttgttttttgttttttgtttttttctctttgggaaaaaaaaaaaagaaaagaaattaatgacaaggacagtccatgtccccattgctggtgtaggctcttcagaggatggccctgttgaggtgtctcctttccactatgagtgggatgtcagcctgagagatggtcagccagtagctcagtcccagctggctgtcactttcctatttttagtcctgatatggaccgaacttgacaagattctcaaactaataagtgtattgtcaaagaagtcaactgtcaaggctagagaccgagctcacaaggtgggttaggagtgaagcaagaaaggacttcagggccagagcccattgtcagagggtactgtggggcaaatagggggatgatggggctctacagcttcttttgcaggcgtagggccagcaaggacccaggacacccgagggggcctcacagtgcaagtctgcaaagcacagtttgctgtggtctgtccttaggcactgaggtcaccctaacactgactatgttgggagtcagagatccttagtaggacggatttagaccaaccgagatggtgtgtgggcctagcacagtctgccctgctgtggtcctttgcctgccactgcctcttaaatgacgttctgtatgcttttgatttactgggtgatagccactgagacagagcctctgcagcccttcctgtttcctgcagtgaataagaggtggggcttattcggtatgacctccctccctctggtcacagatagtcttcggcccttccatcctgacttggtgagacagtcatggttcctgtcccccagtcaaggcctgttctgcatactcctgagctgagggcatgcaagaggtcccagacagctttgactgaggctcctggcttccgagttcaccagatggctagtaagcacccaggaagccctccttgtggtcaagctcagagccagggggatggcctagcagtcatggctgtagcgtacaccttagaagccagggcctaccatccatgtgaaattgcagctttgccctattagtaggtatggacaactatggggctacagccttcagctgatgtcagctgcaatactgagctgcagttccctggaaggaactcctgccctaggcaggtgcctggaccctggaaagaaatccctcaggtcagaaatgtagtcctttgcatataccagactcttcagagtcatctgaaccccacacttgacaccattgagcctctagaagtaggcttcagaaggctggcaaatcctgtggggtggaggaggggttcctaggcagaacagtctctggctacccacttcctcccctcagcattctctgtgccatggggcccagcatagccctgaaagcaggctggtcagcctcatgctctgggtaaggaaggacatggagtcttggctccatactcctctctggatcgattatcagttcaagaaacctcgtggctggcagaatgttgagaagccctccttcagggcatggggcgtggtgtgagtccctccactatgcagtagagagttcacccggtcctgctggtaaggaaacactgccaggccagctccagaggaggagggaaatacttggcttgcctttgaaattggaaacattggtttgaacactctccactgcaaaaatacaacccttagaaaagagcatttttaaaagaaagctacagggtagctcttcccacccgaagcccagctcctcaagagagggacctgctgctctgcctctgtcggcataaaaagggccacgagtgcctgtgtggcccccatatcacctcacttgtcgtcacgcaccagggtatcttcatgcctcttgagaacatatttttaaactgctaaataaacaccctattgtatggctgtgccaaggctttttgtacaccagcaggggtggtctttttctctgacattttattgctaaagaaatttaaatatggggaaacgaaggcatggttgagagaatagcaccttgatttggcaagcagacagatttattcagctcttgattgctcgtcaggggttgagcctggggtgagtgagctggaagcgcatcattaagaccaccaccttcaccagggcaatgggcaaccctcactgccaacacaactgggcttgaatcacctaggagattggcagggtgtacctctgcatggcactgtgagggtgctttcaaaaatagttaactgagcgggggacctgctctggctgtgggccacagcatcccacagactgataggaaaaggagaaattcagtgaacacagttcccccccccccccacacacacacactctgcttcccagctatcaaagcgagggctgccctgctctgctgtgccaaaccctctgaaggcacgggtaaaataaatccttcctttattgagtagtttgtctcagttgttcacagcagtaagagaaacaccggaggtgatctgtatgcatgtgtgagcacaggcctgggacctaggtcacactagcagagttctatcagttccctgcttgctctctctctctctctctctctctctctctctctctctctctctctctctctctcgggtgtgtgctcttcttatgtataatatacacatcagcccatcagccttgggtacctcataggcacggagtttgccaagggaagctggctggccacaagctccaggaatcttgcctccccggggctgggatttcaagcacacaccaccatgtcctgtgttcttgttggtgctttgaacgtgggtgccagggatccaactcaggttctagtgtttgggcgatagatacctcacctactgagccatctccctagctcaggatgctggtttcgacaactgtttcctgccagcagagtgggctcacacnnnnnnnnnnnnnnnnnnnncatcattaagaccaccaccttcaccagggacaatgggcaaccctcactgccaacacaactgggcttgaatcacctaggagattggcagggtgtacctctgcatggcactgtgagggtgctttcaaaaatagttaactgagcgggggacctgctctggctgtgggccacagcatcccacagactgataggaaaaggagaaattcagtgaacacagttccccccacacacacacacacactctgcttcccagctatcaaagcgagggctgccctgctctgctgtgccaaaccctctgaaggcacgggtaaaataaatccttcctttattgagttgtttgtctcagttgttcacagcagtaagagaaacaccggaggtgatctgtatgcatgtgtgagcacaggcctgggacctaggtcacactagcagagttctatcagttccctgctcgcgctctctctctctctctctctctctctctctctctctctctctctctctctctctctttctctctctctttctctctctctctctctctctctctctctctctctctcttcctctctctctcttcctctctctctctctctctctctctctctctctctcgtgtgtgctcttcttatgtataatatacacatcagcccatcagccttgggtacctcataggcacggagtttgccaagggaggctggctggccacaagctccaggaatcttgcctccccggggctgggatttcaagcacacaccaccatgtcctgtgttcttgttggtgctttgaacgtgggtgccagggatccaactcaggttctagtgtttgggcgatagatacctcacctactgagccgtctccctagctcaggatctggtttcgacaactgttcctgccagcagagtgggctcacaccttgtgggcttatgccaggtttgctggtggccacaatgtctccaggctgtcatctccagtccattttggagcacatctcttcactggcctcctatttctgtaaaccttctaaacctcttcctgtcttttgccagtttgttttagagtgtcactaccccccccccccccccacacacacctccattttatacatgtgcctaacacacgatgtttcatgttgactgtggcacaaccttagccatacagtgcagaggagtgcacatatcctgcccccctgccttctgcttgaggtctgggcttaatgggagctgggacctgtgccttcccaagctcaaggtttgcagatacttctgtagaggctgtgaccagagtggggagttgtaaggcagagacagctactgaggtacagataggcctcaggacagcagagagcatggaagtccatgtcccagagccaggtgcaggcagggctctgtcctggcctctgtcccatcttatcttagaacccagattccatttcctgctctgtaaaggggttgtttgatggctcacatatccagaactgtagtaatgagcacacagagcaggcagccccttaacaaaacctgtgtattgtgcttcaggtgtgtcccgtttgtcccctgatctgccctgaggaagggagtacgggcattgtgaaggtgacaagggaactgagagttggttcctgggaccctttctctgcatggctagttctgggtcacctccctcctgcttggaggggtcctttcttctcccttgtacatccaggtggccctcaaagggacagtgtatagggctctgattgtccctctgctgcctcccgagctgtaccattctttaacaggtatatagagccccttctacacgctccctcccctgaccgcccgcaaccatcgtccagcctctctgtgactgacaagttgggagaaaggattcaagatcccaagaaattctgtgctctgtcctgcatgtctccagcagtggcccgggtggcacctggccttctctccaggcagagggcaggggggctccttgcagtgcctccagcccttggggtgctggccaacacacagctgagcagagcaggatgggaggtgggttaaatcaattaaccctgctctctgcctcgggtgtcaggatggaggccccgccttcatcttccccagttagggaggaaagcaatgagaagagacaagcaggccctcttagccctgtcctgattaatgtagtcatctttgcgtgtcggcaatttgtaaagctcgggcttgagtagctttaagcagacctgtgtgtactctgcagtacagcggctgctgctgagcttggcctccatgcccagggtctttctgcacgcagggcccccaggtgccaggaggtagcatgaattgggacagagccacctaggattttcatccaggtagggattctgtatatggctcagggtagacttgaacttgggttgcttccatctcagccctcaactgctggagctataaacatgcactaacacatctggtgccatttagggaatacaaaaggaaggagggacaagagaaggtgtgtaatggccattcatggctctcaacctgactacatccagaattaactaaaacccaagtagccaggtatacccatgagggaatatttttcttaattaaatcatcttaggtgggaagacccacttttaatctatgtctttcggggagggaagactcacctttaatctgggccacaccttctgctggcagtctatataaaggacgaggaaaaaggaagcttgcattctccctgcttgctctccctggcaagtctgttccttccctggcattagtacctactaaaacccatgtacatatatattctgtaagttctgctcctctggagagccctgagtaatgaaggctggtagccagggttctgtctgtgcaatgaccctgggtctaactatctgtgcacaatgtggaaacagaagcggggtggagagcaagagtggtgacagccgtctgtgtgtctgaaaatggcataacaagacctgtcttataatgctaactaagattttaatgtaatgaaatttatttagttcagcaaagccaacatgctatcatcttaacccacatccatatagaattattgaagagaatctttgccttcttttgtgtgtactcaccatccaaaattattcaggttctgacagcagtacatgttagctagagttgtcctatttcagatgccgtgtggcccacagcagccaggcaggcacgcctctcagttacatccattggcttctttaaacacaatctctacttgtttcccgactcctcatcactgcagggctggcccagggtaaggcacagtcctcagtctgactaaattcccaatgaatgaataatttgtccttcccactctttttgctggaggccagtgtgatatcccacactgcccaggcttttttcctgtccctataaatagagagcatctttaggcaggaacactgtcagaggacctgacaagaaggaagtgggccttctatttagtatttgctaatgcatgtaattttgaaaaggtgagaaaagtacagacaggtggtttggggttttgttttcttaagagcctgccttatgccctatctccaccagtcccatcagatccaatcatgcatgcctgtgaatccatgtggccacacagaaaggcagcttgcaggcatactcacaggacaccccacggctgcaggtagaacacggaggcccaggagttcgcatgacacctggctcgtcatgaccctggcagctactctgtggtagtgtggctggccacacagctccgttccactggtccagctttgtgctcttacagggtcttcatagctgtggggtcctgagctgctgcctttctcctccaccctcacacatggagcgtccagctagaaggcgcagcggtgggccctacatcctaactgcctggtcagtggctcagccctctccccttctcttcatctcagtcctgaagcagaggctggctgtactctgcatctcctctgccctctttccccctccagtttgtcccagtgtacctggactagaatccagtggtcctggtcatgccatgaggagcagggccacactgatggtaccttcctgtgcacttatatttggcatttatataagaaacctcgtgtcttggggtttggtgtccatgcccctagtacagacaggcagtggcccttttcagccaactcaggtatattatctacctagaagagtcatgtgaacggccaccaggccgaggtaggtcttgtacgagaacactttacagagcactgcccttctgcagcccaagtccacctgcgtcgtaggtctgctgcatttttcctaggacaggggtggggttagtgtgagggagctttccccattttattctcttagcagttcctgccccccccactaccccctacccctgtcagcctttttcagatgtttttattaaatacagtttgttttgcatctgggttggaatttgaagagcaggtttaagtggttcagtggcctcgggagcaccaggtgtggtacaggctctggcatgtgtgccggctcagtggctccctgaggcggtggactcctccccacaacagagttgccacccttgatggcagttcttcccactggacctgcctcgtccccgccgcatgtagcaccctagcaggaaagcaaagtgctgctgtcctccgtctttgagcattaggccacacagatttcactgttttcttaaatctggctactggctaaggagatggctcacctgacaaagtgctggcgaggacccacgttggacccccacaacccctgtgaaacagttaagcacagtgctgtatgcttggagttccaacactggagaggcagacacagacgcttctctaggacttgctgcctggccagcctaccctagtcctatggtgaagcccaggtctcactgaggagaacagctcgtgagagtaactcccaagatcatcctctggcctccacacacatgagcacacacatgccatctgtctgtctgccccccaccccccagcctacctgctaaatgacttctcctatcgcatagacagggactttgttcagcagcaggtttcttcttccaagctgtactgctgagacgctcctgcttcctcggggtgccagccacctcactagtgatggctatactattaatcagtggcagggcaggctgctgtccctgaatagtgagcattctgggagagtgtacacacactcagcaaccaacaggagagctctcagcactgtctccattttgtagacgagaaacagaagcagtagaggtctgagatttgcccagagtcacacagcagcaaaggcaggggtggtatttggccctggctgcctagcacttttgagcatgtacttactccctgtactgcctggtctccacactcattgcccatggatggccatgcgccaatctgaggaactaacagacacatggcgctgctgaggtaatagcacccgggcgtgactgtggaattcagtgagcttggtttggccagagcctggacaaaaatccattgacctctgactcccagatccttcacccctcccccatcactgttgcctcagctttcagagttccagcagtaagtcctaagagggaccaagaatgtaagcaggtcaccacattgtccctttatggaaggacttgtgtgcagaagacactgcacagtgctgactctggacagataaactcttcatcaaggagcagacagagtcagtttctttggaaccttcccaaagaccacacatgtcagcaagactgtgttgaagtggctatcatttagcacttcacatggagcaggctgaagcagcctggctttggggacttgacttggcatcttccaaagtgcccactctgactaggttgcttggtgaaacagaaactggatccatagtgtcctcccgctgggaagtcatagtgtctgaaatatgacccagtcccccttgaccataggccattgctggggcactaagcccattcctctagaatttctacctgagttgcatcatgttgtggatttggtctaatgcttgtattaatgttaattgagtcctcaaaattgtatgagaatccgcacataagatgctgagggtccctgcctctagttggttttgattggtaaataaagttgctgagggccaatggttggctgggcagggagacagaggtgggactttaggattcctgcacaggggactggaggaggaggaggaggtagagccgccatgctgggaaaggagtagctgccacacctgagaagtaacggatagagagacagctaacacgggaaagtcagggaagagcagtcccacccccctcccccccactgggtccagggcaacagatatggaatagagattttagtaagtaaaactcacatcagagggaaagtgttagccacgtggaggttttggatggcccagtcatcaagctgtttaagacattaaaatataaggctccatgtatgtgtctttaatccaggaacccagaacattggggtggtagcgaggaatgcaccgctgtcaggttgatttgagtagagattgacaactgcagcagtgccacgggcgttagtatctctggagttcctcaggtgaccccagtccacagtgtgtgctcatggctgagaagcactgacccacggggcatgcagtgggttctgtcacttttggttcctcactgaccacagaccccacagcggcccttcctttgttctatgaaagccagggttagctgagaaaggcaggtgtgtaacactgcactacactcttgcagtggctttccacagcgccagtgtcagaagagaaaccttcctttatgtttgtagccacccaccactgtggtcgcagcactggtttggttctggagttaagacagaaggctcaagagctacctgcagagttctaacatcagctccatggagagacatacccagtccctgtagttgtgcaatacagagctgtcccccggcagccacggcctctatgccatgccagcaatggcttcatgagttaccgctagcctcgtgtaccatgttggtgacagacaatagtccctaatacatgcgtcatgttctcagataggagatgccgctgcttgctgcagcaggaagacaagccttttttaaaaagaaatatgtatttaaggccatgtttgtctgtgttctttgcctgccttaaaggtcacctggatagatttttccttctttagcattgcaggccgtgaagagccaggcatttccattctccctccatccagtgaacctgggggactaattagattctgaaattgagtgtgcagtggagtcggtaagttaccgtaatgggagggtattgcttctcaccttgcaagtagcgaggtcatgataatatgaagcgaagtggattaaaaataaaaccaaaggtatttatttatgacctgctcagaattggattggcatccgtgtaagttgcatctaatggtggaagacagtagattgatgttgatgtgtccctgaggacatgctgccagggagatctgctccgtgaattcaatttaaaggcccacagaaagtatccaaaatgcaaaggaaaaaggggtggggagccacggtaaacggcgattaaagaacgtcctggcacatggctcttgtgattggggtgtgcagccctgggctgctggaggttccctcctcattgggttggagatgctgggggctgagccaagcctgggcctctgtcctgagtaccactgtggcctctcctgattctacccgtgccgattgtgctgtcctgctccaccttaatgggcagctctagcccttccgtggtatttatgtagagatctggaagcttggtgggccagtccggcagctaccgtgtttgggaaccaggcctactgggcagtgctcttgaggccagctgttctctgtctcttattggctgtctggatcggggaaggatggcttcagggcccaagtcctatatagctagtgcgcagaaccatcggaaaggagtatgctgctccctggacggggtggcctagcttacacccattcctctttggagactcctctgttggaagctgtcctaaccactcagacctctaaggcccatgtctgcttagttcctcttagtattgtagtctcccaggaccctcccagtccttgatgaagtccccagagtcactttatgtgagtcatcatctgataggagaggccaggctgtcactgccatgatgggggtggggtggggtcacttccatcgtaccatggtacccccaagaccatggcagtgctttccctccatcactggcctcagctattgtcctcttagccctcagacatccctaagcctgtaggggtgcccctacatccccactctgagacatggcccagtgagtacctggggtgctgggtgaagctgaggagctgtagcatggaaattccaaagcagagcttcttatccctggtgccagcagtactgagtgacagtggtgagaaactatccagtgtgtactcagcctgcactcagtgtgtgcccagtgtgtgcagtgcatatccagtgcatgtgtatatactgtgcacatactgtgtgcagagcatgtcaggtgtatgcccactgtgtgaattgggtgtctactatatgcccactgtgtgcaatgcatgtttattgtattcagtccatgcccagtatatgcagtgtgtatctgctttctgcctcctgtgttcaggtatgtctagtgtgttcttgtgtgcctgtctggtgctggagatgtccttgtggtccatgtatcatcccattggctgccaggccagtcatgctgtgtttataaaggaagtctttggacttctaggtgacatgaacgattgtccccaggtgctcagtagggtatcttgttgcccagtcccccagtgtcagaacctgttacctttgctttgggacgaatatggaagataggtggctttgttgggggaccttgtgccggctctgccctgtggtacaagcacactgctgagacctgaagtggtcacctgatacatgaggaagtatgtgtctctggcagttagaaggaagccatgtgtcatctctggtctcagagaggcttttggctctcagaaatctcctgtagcctggcccatggatccttcctgactgtggggacaactgatactatctccatggagggttagagggtttagatacaggggtcccaactgaagcgtggggaagaccactgtgtggctcctcagatactgagctggatggcagatgagaccctgtaaaagccggcatctggctgagtggggttggagccgagcaagtaggaggggccgcagcggctgagggcactgcccatgccttccccctgctgctgatgtaggtctcccaggtgtgtgcatttgggacctggcctgcagcccggtctctccctaaccatctgtctctccccacaggagttgctgctcttcctccagaacctgcctactgcccgctgggatgaccaggatgtcagcctgctgctggctgaggcctatcgcctcaagtttgccttcgcagacgcccccaatcactacaagaagtgagcctggggcccatggcagtggcctcaccctagggatagcatcccctctctgcctgggcagttgctggcctctggactggtcctttcctggtgtgacctagcagagtggacccagcatggtccagggctggcaggataggcagcctagtttgatgagataccaaagagagcccaggagagactcctagcttcagaagctcagtgtggccaggagtgccctcaccctggccctgccttgccaaatgccctccctacagcccccagtccagacagccaagaggaagtccctcagagagccctgctgtacgtacgggtgccaggcagaggtgggcagccatctcaagcctgctctcaattgcacaaatctattctgtcaagtgaaagaataaagtccagaaaacaatgccgagcatgacttaggctgagctaggagttctgcacacagagcctttaatggccccatgtttaggttgacttggtttaaacagggctaggtcaggagttagatcctgggagtactgtggaacaagaggaggccagggcaggctgaggcttctcacggtcaccttactttctgtttttaattaactggttccctgtccgggtgaggaaaagggtcaaggaacccccaggtgggcaggggtttttgtcagtcagggttccagagattgtctcatgggcccaaacttgaccgcaacaagggcagaaattagtggttctaaagtcccagccatgtgtagggggcttcttcctaacaccacccagatggcaatagccaggagctgctgggctggcctctcttcatgccctactgccctttccagagccactgggttagagcctttgccccgttgctggccttctccagggccctcagactggcttctcacatgtatatcccacagatgcccccaccaggctgcctggcctctgtgatgtgggatccccaaggaccaccaggccacctgtaggacaagagcctagactcctagagcagcctcctgtcctcagttacccactgcagcccactctgacctgtcccttctttaggagcagcgcaacactgcccaggcactaggactctgcccagaggctgtggggaagacatagggaagacgtgtgcctgcttctgttcagatgatcctgggtcaggtgggatgtgacatcagcagagtgctgtgcaggcaatccgatgtcctggatcagcagagggacatgctccctcagaccagtgcctgtcctgggtgagaggcacccagttataaggaaagctacctctgtggctctggagaagcaccatcttccctgatccttccatggtgcagatcacccctcagccagaagggtaggcccataacgatctgccccatggtgtttttatgagatgacaaggacccatgaggttaacttaagccctgaatgtatttttatgtgtgcaaatgcttgactgggtgtacgagacgctggcgacagtcctgtgtctgagcccatgagctgagccgggcaggatgtgtgctttgaatgtgatgtgttggaaacacgaaataaagatgcttcatatggcct

SEQ ID NO: 429 - DNA, 3246 bp, Mus musculus
cctctcggctctacgcttcggagtcctggtgtctctgagggggccgccggggcacaggagagggccgctggaggtgtggccgaccgctctcgggtgtcagggttgcggatctgagggatgaggagcggccatggccagcgacggggccaggaagcagttctggaagcgcagcaacagcaaggtcccgggcagcatccagcatgtgtatggagcccagcacccaccgtttgatccgctgttacatggcaccttgctcaagtccacgcccaaggtgcccaccactccggtgaaggccaagcgggtcagcaccttccaggagtttgagagcaacaccagtgatgcttgggatgccggtgaagacgatgatgagctcctggccatggcgacagagagcctgaactctgaggtggtcatggagacagcacatcgtgtcctgcgcaatcacagccagaggcagagccagccttcacagaagacgacagaaccagagccagagcctcagcccatagcagagcctcctgtacctcccagtggtgaccttcgcctggtgaagtctgtcagtgagagccacactccttgtccttcagagagcaccggtgatacagtccctctgcaacggtcccagtctcttccccactcggccacagtgacactgagtgggacatctgacccacatgcccttgctgactcagccctgagtaagagagagacctctcggctggacaagttcaaacagctgcttgctggccccaacacagaccttgaggaattacggaagctgagctggtccggaatcccaaagccagttcgtccaatgacatggaaacttctctcaggttaccttcctgccaatgttgaccgaagaccagccacgctgcagaggaaacagaaggaatactttgctttcattgagcattattacagctctaggaatgacgaagttcaccaggacacgtatcgccagatccatatcgacatccctcggatgagcccggaagcgctgattcttcagcccaaggtgacagagattttcgaaaggatcttgtttatatgggcaatccgacaccctgccagtggatacgttcagggaataaatgacctggtcactccgttcttcgtggtcttcatttgcgagtacacagaccgggaggacgtggacaaggtcgatgtctccagtgtgcctgcagaggtgcttcgcaacattgaggctgacacctactggtgcatgagcaagcttctggatggcattcaggacaactacacctttgcccaacctgggattcagatgaaagtgaagatgctggaagagcttgtgagccggattgatgagcgagtccaccggcatctggacgggcatgaggtgcggtacctgcagtttgccttccgctggatgaacaacctgctgatgagggagctgcccctgcgctgcaccatccgcctgtgggacacttaccagtctgaacccgagggcttttctcatttccacttatatgtttgtgctgctttcctcgtgagatggaggagagaaattctagaagaaagagattttcaagagttgctgctcttcctccagaacctgcctactgcccgctgggatgaccaggatgtcagcctgctgctggctgaggcctatcgcctcaagtttgccttcgcagacgcccccaatcactacaagaagtgagcctggggcccatggcagtggcctcaccctagggatagcatcccctctctgcctgggcagttgctggcctctggactggtcctttcctggtgtgacctagcagagtggacccagcatggtccagggctggcaggataggcagcctagtttgatgagataccaaagagagcccaggagagactcctagcttcagaagctcagtgtggccaggagtgccctcaccctggccctgccttgccaaatgccctccctacagcccccagtccagacagccaagaggaagtccctcagagagccctgctgtacgtacgggtgccaggcagaggtgggcagccatctcaagcctgctctcaattgcacaaatctattctgtcaagtgaaagaataaagtccagaaaacaatgccgagcatgacttaggctgagctaggagttctgcacacagagcctttaatggccccatgtttaggttgacttggtttaaacagggctaggtcaggagttagatcctgggagtactgtggaacaagaggaggccagggcaggctgaggcttctcacggtcaccttactttctgtttttaattaactggttccctgtccgggtgaggaaaagggtcaaggaacccccaggtgggcaggggtttttgtcagtcagggttccagagattgtctcatgggcccaaacttgaccgcaacaagggcagaaattagtggttctaaagtcccagccatgtgtagggggcttcttcctaacaccacccagatggcaatagccaggagctgctgggctggcctctcttcatgccctactgccctttccagagccactgggttagagcctttgccccgttgctggccttctccagggccctcagactggcttctcacatgtatatcccacagatgcccccaccaggctgcctggcctctgtgatgtgggatccccaaggaccaccaggccacctgtaggacaagagcctagactcctagagcagcctcctgtcctcagttacccactgcagcccactctgacctgtcccttctttaggagcagcgcaacactgcccaggcactaggactctgcccagaggctgtggggaagacatagggaagacgtgtgcctgcttctgttcagatgatcctgggtcaggtgggatgtgacatcagcagagtgctgtgcaggcaatccgatgtcctggatcagcagagggacatgctccctcagaccagtgcctgtcctgggtgagaggcacccagttataaggaaagctacctctgtggctctggagaagcaccatcttccctgatccttccatggtgcagatcacccctcagccagaagggtaggcccataacgatctgccccatggtgtttttatgagatgacaaggacccatgaggttaacttaagccctgaatgtatttttatgtgtgcaaatgcttgactgggtgtacgagacgctggcgacagtcctgtgtctgagcccatgagctgagccgggcaggatgtgtgctttgaatgtgatgtgttggaaacacgaaataaagatgcttcatatggcct

SEQ ID NO: 430 - protein, 508 aa, Mus musculus
MASDGARKQFWKRSNSKVPGSIQHVYGAQHPPFDPLLHGTLLKSTPKVPTTPVKAKRVSTFQEFESNTSDAWDAGEDDDELLAMATESLNSEVVMAHRVLRNHSQRQSQPSQKTTEPEPEPQPIAEPPVPPSGDLRLVKSVSESHTPCPSESTGDTVPLQRSQSLPHSATVTLSGTSDPHADSALSKRETSRLDKFKQLLAGPNTDLEELRKLSWSGIPKPVRPMTWKLLSGYLPANVDRRPATLQRKQKEYFAFIEHYYSSRNDEVHQDYQIHIDIPRMSPEALILQPKVTEIFERILFIWAIRHPASGYVQGINDLVTPFFVVFICEYTDREDVDKVDVSSVPAEVLRNIEADTYWCMSKLLDGIQDNYTFAQPGIQMKVKMLEELVSRIDERVHRHLDGHEVRYLQFAFRWMNNLLMRELPLRCTIRLWDTYQSEPEGFSHFHLYVCAAFLVRWRREIERDFQELLLFLQNLPTARWDDQDVSLLLAEAYRLKFAFADAPNHYKK

SEQ ID NO: 431 - DNA, 415974 bp, Homo sapiens
gttgctagtccctgtaatataaaaatggctgaaaggagttggggaagggggcagtgaagacgacgcctgcctctcgcggtgtgaaactggggacctttgctatatgccgtctattattgtggtaggctgaataatgaacccctgaagatataccaggacttaatcctgggacctgcaaatgttaccttaaatggccaaagggagtttgcaggtgtgattgagctaagggccgggtgatggggagatcagcctggaccggattatccagtgggcctgacgtgaggtcagagggatctaggaggaatcggaaggagagaagatgatgtgatgatggcagtagagattagagtgatctgctttccagacagaggaaggagtgtcggccaaggaatgttaagtggcctctagaagctgaaaaaggtaagaaactgactctcccctagaacctccagaagggggcagccttgctgacgctttgagtttagtgcagtgaagtgctaagactttggacttctgacctccaggattgtaggagggtaaatgtgtattgttttcagccgctaagtctgcagcattctgccaacagcagccttaggaaaccaatacagatagaacagtcagctttttactttggggcacaggctcggtgcctatggacggtacagcaccaggaaacttaggaggcagaacccaccaagtgggagtgtggcagctcactcagtaaggtcctgtgagagatattctaagcccggagcaggccatctgaaagcaaagaaagcagaaaacacttcccgaggaacccaaatggcattgcaaatccagccatcctgaaatactatcccaatttttttttgtttgtttttttgaggcagggtctcactgttttctaggctggagtgcagttgtgtgatcctagctcactgctgccttgaacttctgggctcaagtgatcctcctgcctcagtctcctaagtagctaggactaagagtgtttaccaccatgactggctaaaagaaaaaaaaaaaagtttcacagagatggggtctccctatgttgcccaggctagtgttgatctcctggtctcaagtgatcctctcgcctcagcctcccaaagtactggtattataggtgtgagccactgtgcctggcctgctgcacttttgtttgccttatcatgtagttcaatgtagctcagtgcatagcacagttcaaactcaataactatattttaatgtattatgaaacattttatacatgtaaaaactcataaagaatataaccaacacctgaatatagcccatctgccttaggaaacaaagcataatagcacaattgatccgctatgaatgaattccttcctgttcacagtccccacctgtacctataggcaaccaccctcctgaatttatcttttaccattctggttttttttttttttttttgagatagggtttggcactatcgccaaggctggagtgcagtgacatgatcacagcttgctgcagcctcaaactcctgggctcaagggatcctcctgcctcagcctcctaaagtgctgcgattacaggcatgagccaccatacctggtcgcattctcatcctttaaaagaaaatagtactaaatggtatcataccatgtgaattaatattcaactttttctcattcaacactgtggagtcaggtgcggtagtgcttgcatctgtactcagctactcaggaggctgaggtggatcacttgagcccaggattttgtggccagccgggggaacatagtaagccccatttcaaaaacaaccccacagtttgcaaaattcatttatgttgatgtatgcaactaatgtattcatttttactaacttatggtattctactgcataactgtgtagattatcgattctgccatagatggcattttggttgcttctcccccagaccccaactaccactagaagcaacgttgcactgaacattcttgtgtttgcacgcataggcaaggtactctagagcacataccaagagtggaattgctaagttatagagtatctttgctagaaattgctaagtggccatccaaagttagtgaatgaacgtacactcctactggcagtgcaagagagttctgctctgctcacaaatccacatccttattaagtttggtaaagacaggtttttaagtttttgccaatctgttaagtgtaacatggtatgtccttagttttaatttgcattgctgctcaatacttgttgcaaaaatgaataaaaaatgttccattccatacctctgggatttgagaatctgtcccaattcctaggtcccatatgtagactccaacatctgtattactttggctttcaaaactggccttctactcagactttctttttccatcttcacgtttctgttgtgatcctagtaatcctttgcttagctggttttgaagccttcaagtcaatctcagcctcactccttcgcctgaaaacagtagctagcaaagtatacggtaagctataaaaagcacccggatctaaggtgtaaccagtcactaagtgctgccagtttttcctctgtcaattgtttcagttcttccttcctttccccttccatcaggttaatcctgctgtcacctcgctcactggttcttgcaataagccagactgagctggaaagaaccgccatggtcctcagtgttgtctgtaggggacctcactgtctgaggctgtcagggctctgtcaggaggagacccctggggccttctgagccctactaggagaggattctaggagagtaggacgccttgcacatagtaagtactaagtcaatgttacttaccagtaaatgaagaggcatgggaaattgttattatttttgagacggagtttcgctctgtcgcccagcctggagtgcagtggcacgatctgggctcactgcaagctctgcctcacgggttcacgctattctcctgcctcagcctccagggaaattcttaatcagaaaatatgtcttagatttttgttttaaaagagaactggcaggagctccaaatacactaaagctccagtctgaaatgacagtccctgagcattcaatctttggtctaagaagcacagaaatgtaatgcaaaccagacacggtttttttagtgattttctgcacacacacacacacacacacacacacacagtaaaaagatctagtcataacgtgtgcacctgcagttccaactactggggagggtgaggcaggaggatcactagagggcaggagttcgagactagcctgggcaacatagcaagacacccacccccagtcccccccggaaaaaaagaataaaaaaggtaaaaataattttaaaaagagtaaaaggaatgtaaaaataattttaatgcattttatttaatccaatacattaaaaatgttacctaacatgcaaacaatatacaaattattttatacgacgtctttggaatcctgtattttacacgtaaagcgcatctcactccggactagccaggtttcaagcacgtgatagccgcacaaggctggaacccaggcctggggaattaattcttgtcctcggtgctcaaaccattcttcccttcaagcctggcctaatccccagtctctctcatctcttcgaatacgctccgcggttatgcccctcacctcactgcactgcaaatatttcgtccactgagtatttgctgatcgtcactcagtgccgggtgacccagcttgaccagcacccgcagccgccctgccactgttgggccgggtatggtgtgtctggcttccctctgttctgggccggctccgaaacgcgctcaagagaaatcggaatcagacacggggcagttcagctttggaaatgaggagctcgaggctcctgggagtccgttgcgggcaggtgggcgccgctgttgtgtcgggagagccaggagcgacagactcaaactcagaaacccaaccacctccgctccctccgcgatgcgtgtaacgtgcgttgcgcggcgtcgccctttaataacgacgggcgctcggagtgctgcgtcactcgccaccagggacttaggcgggacttccgggcgcgcgtaggcacaacttccggaaggaggcggaagagcttctcggctctaggctctggagtcccgggagcagtgaggggccacccggggcacaggaaagggccgctaggggagggccgggtgcactcggggtgtctgggccgcgggtctgagggatgaggaggggccatggccagcgacggggccaggaagcaattctggaagcgcagcaacagcaagctcccgggcaggtgggtgtgccgcggagggccaggtcggggtcaggggtcagaggtcaggtggccgcgttggcctcctgggctgcgggtggagtcgggggtctggagagggcaacttggactctgaggagactgctggatggtgtgacgggcgttggggggctcggaggtcggagcgtggggtctgggggtgacagtggctgcacgtaggatcgaggcttgcaaggacgaggaggagctattggcgtttttcctgacactggcaggcttctttccgagaaactcctgggctccttggggaggctggaaggaactgattcgggtcatgctgtgaagtttggtggagtccggaagctggccgggctgaggccccccgtctgctgggtggatcagtttctgcagggggtgtggtgtttttgacccacttgatttgcctgtggtctcttgagggctgcggctcttgccttgagcatagaagaggactagagtttccctgtgagtttccatgtttctgcttgctggtctcaaaaccacctcctatgttgtgttagcaggaaggttttttttttttttttttttttttttttttcttcggctggaatgacctgggtacaccctagatgctatacagctccagagctccagagtccttgtctgattgctgtggcgctgagctatgccagggccctagggaatgagacattacgtggagggtacctaggataaaatcagccactggtgaaaacagatcagagataagcaaacgtcaagatttcagaacatagttctgttccaaagctgaagtctggaatgctgaaaattatgaattgtgttacgaagataagtctgagtagaatcattcataaacacagtaaaatggtttgtactcctgtttcataataaatattattgtttgagtgtttgaatgataaactttggaatttactgcatccagttagaaaagtttacttttggccaggtgtggcggctcacgcctgtaatcccagcactttgggaggtcgaggtggacagatcacctgaggtcaggagtttgagaccagcctcaccaacatggagaaacctagtctctactaaaaatacaaaattagctgggcatggtggcacatgcctgtaatcctggctacttgggaggctgaggcaggagaatcacttgaacctgggaggtggaggttgcagtgagccgagatcgttccattgcactccatcctgggcaataagagcgaaactctgtctcaaaaaaaaaaaggaaagtttacttttaagagtgatctgggggttagcagcgtgagttactgacagctcagacagtggctttgagaatgaagggagtcatcaaaggtggccggagaccctattcgactccacaggaccgtgcttgattcgagaacagtaagacctttcaacaaaaccagtgtcagggtccaaggtgagtgaagattctggaatggtggtgggtaggaggtcctggtagtgacaggaacaaatgctgtagaacataagagtccagggaagaggagccacatgacagtgtaacttttatgtgttacttttaggtcttaaggttttggttcctcatcagtctaaactctaattcttaatcagcttagatgtaagaataacagagctgctgtgtggagttacagcagtgactcaacctttggattgaaggctgtggctcttggtaatttgtccttatactgagttgaatttatgtccatctggaaactatggatgtgacatttggaaatagggtttttgcacaagtaatcaaggtaaaatgaggtcatactggatgagggtgggccttagttcgtcaactagtatttttataaaaagagggaaatttgaatacagagagacacacacagggaaatggccctatggagacagaaacagagattggaatagtacatttacaagccaaggaaagccaggggttgctggcagccaccagaagctagaagaggcaaggaaggatgctcacctagagacttgacagagagcatggccctgcagatgaccacttgattttgggtttttggcgtttaaaactgagagagaataagtgtctgttgtgttaagccattcagttggtggtaatttgttatggcagccacaggagactaatacagtctccagctttcttctgtgtgaacctgaaataccgaacaccagctttccttttcctctgactttgatgctattctgtgtcttaggcacttttgagagcagcttctgtattacctttgtgaagttggagtcttggagagttcgaggctgtcactgaagagggcagaagaagaaggagaggttgggtgcaccaggaaggcctgtgaagcctctgtgtctcccatccgtcttgtggctcaagcctctggcagtgctgctctttcaggtggcaggctggaactcttccctgaaggaggagtcacagaggggtgcccgttttcctatcagtagtggtgattggtcactagctgcgtatttatttagtccacacctatgcaagcacagtgctagtggagatcctagccaggttcctgtggctttggcagctctttcaattgtttcccatgattgttttctttctttttttgtttttgtttttgtttttgttttttttgagatggagtctcactgtgttgcccaggctggagtgcagtggtgtgatcttggctcactgcaacctctgcctcccaggttcaagtgattctcctgtctcagcctcccaagtagctgggattacaggtgcccaccagcatgcctgtctgtttttttgtatttttagtagagatggggtttcgccatgtcggccaggctagtctcgaactcctgacctcaggtgatccatccacctcagcctcccaaagtgctgggattataggcgtgagcctccatgcctggccttgttttcctccttttttttttttttttctgagacaagagtctctctctgtagtccaggctggagtgcagtggcatgatctcagctcactgctacctccacctcctgggtcccggttgaagcagttctcctgcctcagcctcctgagtagatgggattataggcactggccaccacgcccagctaatttatgtgtgtgtgtgtgtgtgtgtgtgtgtgtgtgtgtgtgtatattttttttgagacggagtctcactctgttgtccaggctggagtgcagtggtgcgatctcggctcactgcaagctccgcctcccgggttcacgccattttcctgcctcagcctcccgagtagctgggactacaggcgcctgccaccacacccggctaattttttatatttttggtagagacggggtttcaccgtgctagccaggatagtctcgatctcctgaccttgtgatcctcctgcctcggtctcccaacgtgctgggattacaggcttgagccactgtgcccggcaatttttgtatttttagtagagatggggtttcaccatgttggccaggctggtcttgaactcctgatcatgtgatccaccagcttcagcctcccaaagttctgggattacaggcgtgagccaccacacccagccttgttttcctctttgtttttgagtgcagccctcatctcaaggaaactcaggaggaagactacacccactgtacaatacaagactagtaagggatctttcagatagttcaactcttttttatttttgagatggagtctcgctctgtcgcccagactggagtgcagtggtgtgatctagactcactgcaatcactgcctcccgggttcaagtgatcttcctgcctctgctgccaaagtaactgggattacaggcgcccaccaccatgcccagctaatttttttgtatttttagtagagatgtggtttcaacatgttggtgtggatggtctcgatctcttgacctcatgatccgcccgccttggcctccccaagtgctgagattccaggcatgagccaccgtgcccggcccacacctcctgtttttatgcagcctgaactaaagtcccccttttttgcatcaaactcagtgttgttggtgcctctggcttcctgttctccctggtatgtgcttgctttcactagtgagatccacaggtttaggaaaagtatctttctcattcttgcattgtcagtaccgatacctggtgtttattccgaactatctcctcgattagcctggagagtgagtggtttggccagggctataaactgcaggagaggtggtcttgctggtagaccctcggtttatgcacaccctggtccttaggttgcatatgtggctgacgctttcctagaaactttgtttctggatgagccaggatgtgtggtgtggtagatagaccctcctagtcagaggactaggagttggtggtccagattttaactttctttttccggtagtggtcttcaccaagttacctctggggccatcagtgtctgtatctgtagcacaaagcggttgagtttggtttaagtagctatggcaaatggggagatatctttggcttagcacgattctctttgaggagaaaagaatgggcttcttggaccagtttagagaatttgatgatttgctgatccagcaaatatgtattcaacccatagtatgtgttaggaacagccccaggtgctggagataatattagtgaacaaaatagacctagatctctgctctcccagagcttacagtgcagtgggagagccgggtataaataacatagctcagttaaatggagttaactgttggaaggtgacagctgctatcaaaacaatgctgggaaagaggactaggtggcttagtggcaggtgtggtggtgagaaggagcccttcactgaggtgacatttgaggaaagatttgcacgaggtgagggaacaggccaaccaggaggctggggaagagcggtcctggcagaggagtgagcaggtgcagaggactcccagagcgatgctggcgtgcttgaggagaggagctggggccagggtgggtctggccgagagaaggggagagtcgtggggtgcgtcatgaaaggtggtggggtagggcctcatgaccacagtgaagacatggactgttctttgattctggctgaatggggaacctttggagggctttgagcagagaagtggcatggtctgcattaggtttaatgggatatctttggctgctgtactgaagacagattggaggcgttgggagtcggggcaagggcagaagcagggagaccaggaggccagggtgccgcagcgtccagtggtcactggtggtggcggcttgcacctgagtggaagctgtggtggtggcaagaaatggtaagtgataagaatccgaaggtttggccgggcgcggtggctcacgccggtaatcccagcactttgggaggctgaggtgggtggatcacttgaggtcaggagtttgagaccagcctggccaacatggtgaaaccccgtctctactaaaaatacaaaagttagccaggcgtggtggcaggcgcctgtaatcccagctgcttgggaggctgaggcaggagagtcgcttgaacacaggaggcagaggttgcagtgagccaaggtcgcgccaccgccccgcagcctgggcaacagagcgagactctgtctcaaaaaaaaaaaaaaaaaaaaaaatagaatctgaaggttcagtctctgactgtctgggctggttctttcccgggccgctgactctcttggctcccgaagggctgttgctttccgcagttgcagttggaattctcgccacacttcactttaaaaatgccaagacaaaatcacagcacactgggcttgagaacacaggcagtctttcagtgtgggtctgatgtttgctattttagctcagctccgcctggcagggtgtggtctgctgacagagggtatgcaggcagctggggtatgtggagtatgacgtttgaaagtggcatggtggtggctgggcgctctggctcatgcctgtcatctcagcactttggggggcccaggcgggtggatcacctgaggtcagcagttcgagaccagcctgaccaacatggtgaaaccccgtctctactaaaaatacaaaaaatagctggacattgtggcaggcacctataatcccagctactcaggaggctgaagcaggagaatcatttgaatctgggaggtggaggttgcagtgagctgagatcgcgtcactgcactctagcctgggcgacagggcaagactctgtctcaaaaaaaaaaaaaaaaaaaaaaaagaaagtgttatggtagcaagaaaggcccaaattgagcatggcaaggatgtgagtgctgggataaagctggagcacaagagggttcttagtgatgtggctctgacagccttcagcttacattgccagagccacgagatgtctgtgagcaaatcagacggtcggctgaataggccacagtccgtcctcagccgaaggagaggcactgttggggataatgaattcatttggaaaacgtttacgagctcctctcctgtgccaggtgctgtggtgcgtgctgagcaagccatgtggctcttcacggctggacgcctgccctgtgaacacatgcgcacagactgcagtgctgggcaggtggcagtcccgggaccctggcagagtagcaaggccctcactgggtggaatgctcatgtcctccttacacaggtcccgcttccgccgagacctggctgtacagcaggaaccgatctggctgctgaggtcaggggagggtgtataggagtggggagcgcttgactggggaggaggggcatggagggtggtgagcaggcactggagctgcttccaaggccatggtgaagatctgagctgtggtcctaagagccatgagagagtgttgaagggttttaaacagggaggggtgtgatactgtgacactgtttgtcatccttgaagagagggcgagagaggaaactggtgggcttctgaggaggccgaggccagatgctgtggggttggagaggatcgggcatgttcagggtacacatggcacactcaggattcactgatgggcggggtgctgggggtcgaggtgatctccagggtgctggcctgaggggatgggagtgtggtaggcagaatactggccccctaaaggtgtcctcatcctcatccctgacccctgtgaatatgttctgttacatggcagaggggaattaaggtcgctaatcagctgacctgaaatgggggaattgtcctgttacctggtgggcccagtgtaacctcacgagcttttggacgtggtcagagacatggtgtgggatggactccacccacagcggctggctttgcagatggaggaggcagccaccaggaatgtggcgcggcttctagaagctgcgaaaggccttctgcagatggctaacaggagagcaaggccttgctcctgcatccgccaggagctgaattctgccgccaaccggagtgagcaggaaaggggttctcccttcgagcctcccggaaggggcacagctggctgacgcctggacttcagtgtgatgagacccatgccggatttctgaccttcagaacttcgagatagtgaatgcatgttttaagctgtggtaatttgttacagcagctgtgaagagttggggactgtgccgagggatgtctgacagggaatggcaggtggcccagcacctccctcagcagagtcctgcacttggatgtgggcaggagtaccttggtcagcggccttgggggtggtcactgggtaacctccacaaagtgtgtttaaacccaggggactgaagtcagctcggagggttcttcctatgtcctatgtcctgctcaggcctaggaaccaaatagagccctgcctctttcctcagaatgttggctgctgcttctggccgccttgctttcttgtgttttttataaatctgtattgccttttgcttatgttttgaagagattgtttattgggtaagaaccctcagtcctgttttccatgcagagggaagccccggagtcttgttccggcagtgattgtgtgttccccgccagttgggtttctcttcttgtttgtgagtggagatgaccttcctgtgacgggggccgcggaagagctggtgggtgagattttgctgtaggtgcagttccttttcttgttcctttcagcggttactttccatgttattaaatgtcttactttgtccagaaacactttgaaaaataaattgaatgtgaatcatatttcctttctcttacatattcgtctgatagagtaaatctggactctgggttaattttaaatgaagacaaaaatgattgatccctgacaattttggattatttatttatttgtttcttaagtaacaagagcaggaggaagtaccccatcgcctccaagtgtttttgaggaaccatgggattcctcatggaattgaggagaacaagtcttcggagaccacttgtctgtttttctttctgtttttctttttaattttttatttctatagattactggggaacaggtggtgtttggttacatgagtaagttctttagtggtgatttgtgagatttgggtgcacctgagcagtatacactgaacagtgtatactgaacagtgcacccgagcagtatacactgaacccagtcttttatccctcacccgcttcccatccttttcctctgagtccctgaagtctattgtgtcattcttatgactttgcatcctcatggcttaggtcctacttactattttttttttttttgagatggagtcttgctctgttgcccaggctggagtggagtggcgcgatctcagctcattgcaacctctgcctcccgggttcaggcgattctcctgtctcagcctcccgagtggctgggattataggcacatgccaccatgcccgcctaatttttgtatttttagtagagatggggtttcaccatgttggccaggctggtcttgaactcctgacctcaagtgatccacccgcctcggcctcccagagtgctgagattacaggcgtgaaccaccatgcctagccgttagctcccacttatgagtgagaacaggtgatgtttggttttccattcctgagttactttacccagaattgttgtctccaatctcatcgaggtctctgcgaatgccagtaattcattcctttttatggctaagtagtattccatcgtatacacacatatacatatatatgtatacacacatacacatatatatgtatacacacatacacatatatatgtatacacacatatacatatatatgtatacacacatatacatatatatgtatacacacatatacatatatatgtatacacacatatacatatatagtatacacacatatacatatatatgtatacacacatatacatatatatgtatacacacatatacatatatatgtatacacacatatacatatatatgtatacacacatatacatatatatgtatacacacatatacatatatacatatatacacaaacacacatgcaccgcacttttttttttttttttttttgagatgggagtctcactctatcaccaggctggagtgcagtggtgtgatcttggctcactgcaacctctgtctcctgggttcaagctattctcctgcttcagcctcctgagtagctgggattacaggtgctcaccaccatgcccagctaatttttgtatttttaccatgttggccaggatgatctccatctcctgacctcctgatcctcctgccttggcctcccaaagtgcagggattgcaggcatgagccactgcatgtggccacaccacacttcctttatccacttgttgatggatgggcatttgtgttgaaaagaagtcatctctgtttttctttccctgaacggccacagtgtagcacggcctgcctgtggctaggacaagggcagtgctcacttgcaggggcctgtcctggctctgtggcctgagagtgacacctgcccctcctttccttctctggcaggctcagcgtctctgcccctcctcagctcagcccttcaccccctgaacacaggccgtggagatctgcatcgtgcagtgcttctaggtgcagtggggagcccaggaacaggagcccgtgtcctgtcacagggtggggaatgtcaccgtgcttggccctgggagcacaagatgacccacctgcgtagttctttttcctgaggagtcggggagcgtgtctgtgtgcggagcaggctcagagcaggtgtttcctgcagcgctcagaactgaggtggctggggccttggtgtcacacctcacgctagggattgtctgtggagtgcttcccttgggctaggcacttatttttattttttttggagatggagtcttgccctgttacccaggctggaatacaatggtgccatctcagctcactgtaacctctgcctcccgggttcaagcagttctcctgcctcagcctccccagtagctggggctacaggctcatgccgccacacccagctcatttttttgtgtgtgtgttttagtagagatggggtttcaccgtgttggccaggctggtcccgaactcctgacctcaggtgatccgcccaccttggcctcccaaagtgctgggattacaggtgtgagccactgcacccggcgggctaggcactgtacatgcaaccacacgtgtagtcctcatagcagctgggggtggtaccgtgtggtccctattttacaaatgaggaaactcagaagctgagctacgtgctcaaagccacacagctcataagtggcaaagctggggtttgaaccttagaagtctgtgcccttacccatcacagcctcatccttatctcctccattccctaggggacttaacaggtgttgaaattattacagagaaagctgactcactcaccaggaatctgatcctgctgtgggctggcttgggtggaggtgttcctcccgcccccgcacccatcctcctgtttgaactcaggctgctgcctgctgggcctgcctgcccttggagccctgctgagctcagcctgaggcctggctcctccaggctgggggaaaaccaggcttgctgtgctcggcagcagagattcttctggagtgaggtgagcagcttgttctaggtcccccctggtgttctctttgcagacaagaggcagaggtatcaggaggcccagagggaacagggctgcctgggctcttcccatttctgggccccgtgctgtggggaactttcattttgagtatccccagactttttgttccccctttctgaaatgtttcctcttttctggtgataaacatggaaattccaccccgagtgctgcggttcatgaaggggcacgtaggccctttgagtccagttgcttagaatacctgtgggtttccttattaagtaggaagtagaggctgagaacgtctgtgttgttactgatggcagccccccggggcagggccaggcattgctgggcgccctctcctccctgagtctgccttccgtaaacggcctgcagtggggaaggtgggcctctgctcaaggccccgagctcctaggggaacgggttcaccttcaggcccatccaaggcagagccctttccggcttcggggcccctgatatttctgggcccccgactgcatccgctctgttcccacgggtccctcctgggtgttcttgctcatgcttgggttcatttgagcgctgcctcgccctccgccatcctcttccttctcatgtgcgctgtgtgcaccggagcccggccgatgctgatagaatttttaagtgtgccgtgcagctttctgcacctgggcctctactccttgctgtgctggtttgaaatgggccttcttttatcaaacatttttactaaactaaaaaataaaataggcttgctggctctaaggctttcacctagatgaggcgagtgatgtttattgcagtcgtctggatgagctcctgatccttggctgaaagccatcagtggctcgggatgtgtggagaggacagggcagaggacccggtcttggaaagggggtgggtcccttggtgtcactgtggctctcttaggggtggcagctcctccgcgagggcttggtgcacccgctgcccttgttttcacgtgaatgtgtttggggcgggaggctagcgagttgcctgggactccctacattatgctgttggggtcgggagtcaagaggagatctggccttgcttctttccgaatacggaagggatctgggaggaagaaaggttcagagacaaccacagttttatagaatctatgactattttcctgctcacgtctggggccttgggagttgctttctcggggtggaggaagagcacagagcgccacctcttctgttttgagactgggtctggctgctgccaagttctcaggtttattgatggtgcagtaggtgattcctgtgcggccacagctgcctcctggaagggctggtagagggttgttggctgtgggccgcattttgttttctcttagaattaatctctatagtgagttagttttgtgttccaaaaccagtcactagagccactgtaacagcttgtgcatcagccagatgtgcctgcctcagccgtcatgcttttaaatagctgagagaaaaggccacctttacagcagctcactagcttttaagagggtgtcacctagctgggttttgtcgtgagagaatgtgctgtgttcttggaagttaattccttcaaagatacggtgtacctttaaaatgcttaatcattcacacacgtgcacagtgaggaagagaattaaatggaacaagcagttatgggatgcgctctgtttgcacatgaggccctggggcgtgtgcaaaggtgagcctggtgttactcctgctaccgagggacttcgtttgctgagggagacagaccagccaggagcttctgccgcaaggatgctggtgccaagcgggccacggaggggccaggaagccctgtggcagtataggcaaggaaaggggagttttcactgaggacatgagatgacattaaagtggactttgaaggttacctggggtgtggggcgtgttctgtagtcaggggctgggacaaggccttcttggcacagggtggcttgaacacagcctgagtgaggaggagtacagggtgtgtttgggagcctggcgggtcgctggctacctgagaacagaggtgtgcgtggaagtagtgggcacagctgtggctgtatggtgggatggtgtgcgtggaagcagtgggcatagttgtggctgtgttggtggggtggtatggatggaaggagtgggcacagctgcggctgcgtggtgggatgggaggtgagggtcagtgttcaggatggtggctgcaggagttttggcttgaggctcttttgtgtttggagtagggaaggtttctgagcaggagtgacctgatcagacctcctgctactgtttattgacctcttgctgtgtgccagagacagaggctcaggtcaaggaactggcctgagattgcatgggtaggacgaggccagccaggatgtcgggtgagaaccatggccgtggggaggagagagagaggaaggggactgtcaggaagtgcttgcaattcagttagttcagtagatattcaaaacggaccctgtgccacactttgcaaaaggtgggaaaaaagagccctcccgagaggggatgtgtgagccgagaggggcaggaggacactgcacaggcctcataggacctgaaggcatacgagttcttccccaaggcctgtaggaagaccttgaaggatgttcagctggggagtgacccatcctctgatgggcacaggacgacagagctgaggccaaaccctggggcagccggtgcaactgtcatgttcttctcaggagcaggggatgggtcagggccagggctgatggacaggagaagagagatgtgtgggaggtttccaaggtgacctagaggatgtggagacgtgggtgggtggtgtgcttcagggaggagacgaggctgaccctcctgttggtggatggcagttctggaggtggtcacaggagatacatggtcagaatgagagaaaatggagccccgatttaagttagtgggacagagggttttcgatgccaggacatgggcccagtgagagccaggggccgccagaagagggctcgagggagaggtacgaggcagggatgagcacattgtctatttttgtgtgactggtagagagtgatgttgtccaagggtggggaccgaagagtgggtgtgaggagtggccggtggggcacagctgattttttgggggaacccgttgacgtgaggtggtggattcgtggctgagagttggcagtggttttgcttggaggcacgtgtttgagaaccgtttactcgggtggaggaggtcaggagagagcatgatttttcataagagaaggaaggaggactgaggactcggctttggggagcagagttgggaacacacagaagagtctggggcatgcagagaggctggcaggaggcagaggagggagcaagaagaaagagctcagtgtggtgagtcctgaggggaagctgggcagggccaggattgagtgagaagcagcaagaaggagagaggggaaatgggcctcggtgatggctggctgccagggtggcggagccgctccgaaagtcatgcatcacttagcgacggggacgccttctgagacatgtgtccttaggtgatttggtccctgtgtgaacatcacagagcacatttatacaaacccaggtagagttagcgcagtgtcgcctgctgcacacctaggctgtacggcaccgtctgttgctctgaggctatgtgcctgtacagcatggtactgttctgaatactgcaggcagttgtcacacaatggttggtatttttgtatctaaacatctctaaatatggagcaggtatagtacaaatacagaatgaaagataaaatggcatactcgtgtagggcagctggtgcgattggcgctcacgggactggacggtgcccttggtgggtcggtgaatgaagggtgagtgaatgggaaggtctgggtcctcactgtgcatcgtgtagatgtcattagcactctacatttaggctctactagattcataaacacaccttctttcttcagtagtaaattaaccttagcttgctgtgacttttaaacttcataaacgttttgatttttaaaaaactttttgactcctttctattgacacatagcttagaacacaaatacgttgtacagctgcaccaagatatttttctttatatcctgactcggtaagcttttttctctttttaaaattttttattttttactttttcagctttttgttaaaaactaagacacagacacacacattagcctaggccgacacagggtcgggaccgtcagtgccactggcttccacctccacatcttgccccagtggaaggtcttcgggggcaataacatgcatggaatcatcatcttccatgataacattgccttcttctggaatgcctcctgaaggactagggacttgcctgaggctgttttacagcttttattgtattttgttttttaaacaagcagaaggaacataactctaaaataatgataaaaagtatagtacaataggccaggcacagtggctcatgcctgtaatcccagcactctgggaggccaaggcaggtagatcacctgaggtcaggagttcgaaagcagcctggccaacatggtgaaaccccgtctctactaaaagtacaaaaattagccgggcgtggtggtgggcacctgtaatcccagatacccaggagtctgaggcaggagaatcgcttgtaccctggaggcagaggctgcagtgagtcgagatcacaccattgcactccagcctgaatgacaagagcaaaactctgtctcaaataaaaaaacaagtataatacaattagtacaatgaatacatccataaagcagtagcatagttgttcattatgatcaagtattacgtacagtacataatgtatgtgctatactgttataggactggcagtgcagtagatttgcttacatcagcatcaccgcaaacacaggagtatgctttgtgatgtgatgtaactttggctgtgacatcactaggtgacaggaatttttcaactgcattatagtcttacaggaccatggtcctatatgtggtctgttgttgactaaaatgtcgttatgtggtgcgtggcttgacttctctgtgttggacaatttctttctttcttttttttaaaggtgcccaccaccacacccggctaatgtttgtatttttagtagagacggggtttcaccatgttggccaggctggtctcgaactcctgacctcaggtgatctgcccgcctcggcctcccaaagagctggaattacagacgtgagccacagcgcctggccaggacaatttcaaaatacttccatttccttcatattttctgttttctataataaacacacattgcttttgttatgtgcgggaaaaaatcattgtaaaaatgctgtttccaagacctatttccagagatgtccgtttgacccagtaattgcctcagcccctactgggttctcagtgctccgagggctgtgaggagtgtgacatgagacaaaatgcagcccctgtagcagggagtttgtggtccagaagcagcaccacatagctgggagccttgcaggacagcgtatgtgttgctgccagtcagagtggtgtgggtgtcggggcgggacagccctcggagaccctctggtttgggtctcaggtaccacatgtttctgctgttgaccctcggggtgggcacaagtttcagattatgctgtggacggaggggatggtggaattgttcactgttgccatgatggtttttcgtacatttttcctccaaagctcctagagttaatttccttggaaaatttacttctgaatatattttataaatctggggagtatcaccatgtcttagaatgagctgagtggtaaattcagttgccaatttgagtacgtatttcagaaagctgctattgacccctaagggggcactgaataatgactgtgcttggagaagagaggttgattagccatcaaatgaatttgactagatgacttgcctgtttacttcatatatgtgaaatacagagaagcatttaatcgtaaatgtttcatttattttatgatcctgagaacattgcagctggatttattgcttttccatacttttattttctttcactcttccctgtttccctcactgctattttcacctactgctgtttaaccttcaattaaaaaaaaaaaagctgttctgatacaccatcaggtttgtttgaaaagagcaccttggtgtagaggcttcaaattcaaaccagaaaaacattctgcaggatctgccagggagagctgcctcctgtcaaaacccagcggccttgcagcgttggccagagtcgctctgtccctcttgactctgacttgtctcttcctgcttcagagtcacttgtatcctcatggattagctgccttcactgaggcggcccaaggacagggagagggactctcgcttgttcactgtcagctttccaggaccagcccgggcctggtgtggagcaggtgcccagtcagtgtttgttgagtgacttgaatggagaaacataacgcagcgtagtcagtagaagctgaagacatctgtgttgcacgctgctgtcaggcaaggaccaagttggaggccttagctatccagaagtagattctcagcaagtattggattttagtattttgtttattgtttttttaaatttaagcttttctgaatcatgttgtaaagacagctctgggcacagtcctgaagagttggtgttgatgtcagggacccattctctttctcttgggcatttccccctgccccgacccccacaactgaccagtgtctccagcctgttcttatgccgtgacccctctgctcttctccctggaggtgccctcccaattttgtttttttttttttttttagacagggtgtcattctgttgctggagtgcagttgctggtgctggtgttgctggtgtcactgctggagtgcagtggtgcgtgatcttagctcactgcagccttgacttcctgggctcaggtgatcttcccacctcagcctcctgagtagctgggactacaggagcacaccaccatgcctggctaatttttatattttttatagagacggggtttcaccatgttgcccgtgctggtcttgaactcctggactcaaacgatctgcctaccttggcctcccgaagtgctgggattataggcctgagccaccacgcccaaccccagttctcgtgttagaccttagtttacctgcctcgcctgccatgggtgtcctcgggttccccttacgagtggtggcattgcagttgcatctccctgtgcctatgctgaaaaggggagctttggccacaattctgagggctgtttttggggagggcatggggaggtctttttggttgggggtcttctccagggcacagcctcttggggcatctctctgccggcccctccctggcctgccccggagtatcttgtcccttgtgcacattgttccactttcacctgtgtgcggcctctcctgtcgtgggttagagtctgtgacccttcatcagtgtttgctcatgccctcttccatctgagagccccggctgtgtgtttgtaggatcagcaggatgtgtacccattgaccagaacacccaactaatggcccctgccttgctcactactaaccagttagtcctcctcaagtttgggggcgatgaaatctgtcattttcatgtgaagcatgctgaagtgtgttgttctgtggtgatttacgctacaaacttgtcattcatggtgggacaagtggacttggacttcttcttcttattattattgagatggagtctcactctgtcgcctaggctggtgtgcagtggcacgatctcggctcactgcaacctccgcctcctgggttcaagtgattcttctgcctcagcctcctgggtagctgggactacaggcgtgcgccatcacacccagctaattcttgtatttttagtagagacgaggtttcaccatgttggccaggatggtctccatctcttgaccttgtgatctgcctgcctcggcctctcaaagtgctgagattacaggcctgagccaccgtgcccagccggacttggacttatttaaaggttgaatgaatgaggctggtcagccatctcgagccttcccttccatgacgtcccggccttcctgggacacaatggggtcagggagggggcccttcctttcctcccttccatctttgtggagataccacgtacataccacaccgttcgcccatttaaagtgcttggtgtttttagtatattcacagttaggcagtcattactacagtcagttttagaaaaatttcatcaccacagagagcaacgctgtacctgttagcattcacttcccattctctcctccccacccttggcaaccatggggctgctatctggcttcagggatttgcctgttctggatgttgcatgtcggtggaatcatacagtatgcggccttttgcgtctctcagcttcatgttgtcaggattcacccatgctgtgttgcgtaccaagacttcattccctttatgacctaatattactccattgtgtggttaggccacgttgtattgacccattcatcagctggtggacatttgccttcattctttggctgttatggttaatgctgtacaaggttttggtgtggatgtgtattttcatttctcttgggtatctacctccgagtggaattgatgggtcatgcgataactccatgtaaccttctgaggacctgccaaactgttttccacagcagctgcccatttttaatttcccgctagcagtgtgtgaggtcccggtctctctgcatcctcaccatcacgctttagcgtctttttcatttctgccattctgctgggtgtgaagtggtatccgatggtggttttgatttgtgtttctctgatcgctaatgatactgagcttactttttgaaagatttctgtttacagtgtcaaaagaatgggcagacttagagttatcagcactgtgcccccaggagtcctccatgttttgacccttctggagagtaaggcggtgctccagcagtgtgcccgtgtccaggccacgcacacctcaccttcacagagccagagcgatctttaaaaaactagaaagcgtttcagacattcagaaagggcacacaggctgatgtaatacagaacacaccgtatctccatccagcatgggaaagaggacagcgcacacacgcagttgatgccgctgtggggtctttgcctgaactcagctgctccctccacccattctgagttttgtgtttccattcccatgtgtgcaggagcagttttttttaccactcatgtgtatcaaaagtgatatatagtatcatttcgcatttaaaaaatttttttaaaggatgccacactgtcaacttgctctcctctttagtgttttgttgatgacatttatttggattggttctggtggttctagttcattcacatctgctatggttagtattccattatatgtatgtattctggcttatgcattattcagtcaatgggcatctaggtttatctcaaaaaaattttttttatcttttttagcattatagacattgctgagctcatctcctgtgtgcttgtgcaagggttttctaggtcgtctatcaagaagtggaattacgtcatatgcatctgcttttcataaggaatcactagggttctctttaataaaaaacagtagattactgcagtgtttcaaagcagtttaattcattaaaaagtttattgactaatatcctttttttggtatacaaagtcttgctttgttgcccaggctggagtgcagtggtgcgatcacagctcactgcaacctcaatctcctgggctcatgtgatccatctactttagccttgtgagtggcaggggctccaggtacatgccactgtgcctggctaagttatttttttggtagagatggggtctcactatgttgcccaggctagtcttgaactcctggtctcaagtgatccgcctgcctggtctcaagtgatccgccagcctcccaaagtgctgggattacaggtgtgagccaccatacctggctggttaatatacttttttaaagacagatttcattatctgaattgaggtaggtgggtatgttgccacatattcttttaaaatatctttagttgtagtctgcttttctttttagctatgcaaaatcaaataaaagtgcaattttgattagataaaatggggttcctttagtctcagttgaactttgttggaacattttttgtttagtaaacaaaaatggtttgcctatgaagaatttatgaatttccggctgtcccgggaggaaaagcctgtggcctgtgataatgttgcagagactttttttttaaaaaggacatgcaaatagtggccagtaggccaagaagcatgctggttttgagcaatagagatacattgggaaatgataggaagaatgtaaacgttcatatacagagagattgataatattgataaacgctatttgtaggtcatgtcccagtattcagatttctgtgatatacggttatctcatttcatacatgttcttattcccatttccaggatgagaaaacgaaaactcagagtacttacttggttaaaactttaccagctagtaagtgttggagctgggccttgaacccgagcctttgatttttaaacctgaaagctttctaccaatgtcagagagacatccaagacatttcaggaaaaggacatgacagatagattgtgcttgatctaagcaggctgtatctttttcccaccccctggcatagagcaagcatttgattctgctcatagggtttgtgggtcagaaattcacatggggcacagtgggatgtcttgtctcttctccatgatgtctggggcctcactaggaagactcgagggctggggctggaattataagagggctgattcactgacttgtctagcagtgatgcaggctgtccactgggccttcagctagtgctgtgggttgtaatgtgtacatatgggagatccttgtggctaattttggcatcttcagagaatgggtagctgggttccaagagcgggaacccaagaggaccaggtaaaagctgtattgactttaaaacattataacatcttccctgagatacagatagaacacaattcacccacaatagccttcacccatttaaagtatataatgcagtggtttttttagtgtcttcaaagtgttgtgtaactatcaccacaatcaattttagagcatgtttattgcctctagaaaacctcgtgtgtcctttaactatcacccctgccttcctccctgttctagtccccaagtaaccactaatctacgttctctgtatgtagaattgtctattctagggatttcaaataaatggaataatataatgtgcatttctttggtaattatcttctttcactgagcataatattttcaagattgatctacgttgtagcttgtatcactacttttgttttgagacaaggtcctgctctgttgcccaggctagagagtgcagttttgccaacatggctcactgcagccttgatctcaacctcctgggctcaagtgattctcctgcttcagcctgccatgtagctgggaccacagacatgcatcatcatgcctggttaattttttgattttttgtagagatcaaggtctcactttgttgcccagactggtctttaactcctgggctcaagttattctccccaccttggcctcccaaagtgctggattacaggcatgagccacctctcatccttgtctttttcctgagcttaggggcaaaatattcagcctttcaccattaagtgtgatgttaactatgagttttttgtagatatcctttatcaggatgaagattacctttaattcctagtttgttgataatttttataatgaatgagtattgaattttatcatatgctttttctgcatctatttagatgatcatgtggtttttgtcctttatgctattaatatagtgtattgcactaattgatttttggttattaaaccaaccttgcatttcttggataaattccacttgattatgatacgtaatccctttttatgtgttgttggatttggtttgctagtattttgggtttttacgtgtatattcataagagatactggtttgtagttttctttctttgtgatatctttgcttgattttggtatcacggtagtacttgcctcatagaatgagttgggaaatattacctccttttctaggttttggaaggatttatgaagaattggtattaattcttctttatctatttggtagaatttaccagtgaatccctctgggcttggacttttctttgtgcgtagtgttttgattactaatttagtctctttatttttattttttatttttttgagacaggatcttgctctgttgcccacacttaagcgcagtagtgccgtcataggtcactgtaacctcaaattcctgggctcaagtgatcctcccacgtcagccttctgagtagctgggactacaggtgtgtgccaccatgcccactagttttttggtttttaatagatgaggtcttgctttgttggccaggctggtcttgaactcctggggttcaagtgatcctcccaccttggcttcccaaagtgcttgattacaagcgtgagccagtgtgcccggcctctaattcagcctctttccatgttatgtatctagtcatatttcctcctgctccttgagtaattttcagttgtgtgtatctttctgggaatttgcgcattgtatctaattaattttatttgttggtgtacagttgttcataatattctcataattctttttatttctgtaaggttgataataatgtcttttccatcatgtctgactttagtaatttaagtcttctcttttttcttttagtcagtctagccaaaggtttgtcaattttattcatctactcagagaaccatctcttggttttgttcattttccttatatttaaggaaacaaccagaccagcagctttctgtgtctccgtggagtcctgctatggttctgggagttgcctctcctctctttctgtcgagtggcccggccagtgcatgtggcggctcctgcgtctccccttcaccagagtagctctgcctttacctgtttggcatttccatgtaacatttcttttgaaaagttggtttactgctaaagtactggctttcatacagtgaaaccccacagaacaaaactggagctgcgtgcattaacattgatacataaagaacaatcttgagggaacatctagttgcaaaggtacatatgtatgaaatgataacagtgtaaactttgcaaatgtgcagaataatactgtatgttgcccagagatccacgtctcttccataatagtataaactcttacatggaaatggaaaatgtcaaatacaggttggtagccacctcagaggaggcaggtagagaaccagaatggggagggtttcaactctattatatgacaaaatgttggaatttgggggaagtgaatctctgggtggtgtctgtgtggttattccttatgtcctatatgtcactaagctggctgcagcctgccaggggtaggtgactttgggcaggctacttttttttttttttttttttttgggacggagtcttactctgtcacccaggttggagtgcaggggcgtgatctcggctcactgcaagctctgcctcccgggttcacaccattctcttgcctcagcctcctaagtagctgggactataggcgtccgccaccacgaccgggtaattttttgtatttttagtagagacggggtttcactgtgttagccaggacggtctcgatctccagacctcgtgatccacccgcctcggcctcccaaagtgctgggattacaggcgtgagccagcacgcccggccaggcaggctactttcttaagctttctgtccctcagtttttccaccttttgaatgggaagagtaatgatatctgccttattgggttgcaaagattaaaggacttaacacattgagagtttaaaataatgctcatctctgttagctactactattattctctatgctttattgcttgcagtattgatagtaaaaaagaaacggcatgttgagcaaatctggaggctgttgaaagtggttggagctgagcagtggcacgtggcatggtggtcacagggctgttccttcacttttctgtgtgtttcattcctttggtaaaagtatccagcaccagccccactgggacccgcctgtggttcatgccacagggcgtctgtgtcctcagcacccaggacagtgcctgcctcgtaggtccttcctggttgagaggagggatcagcgctttgctttcaggtcatcttcagtttgaaactgaaactcactctgatgtatgcagaaataaatgtgatgttttcatctggatgctgactttagaattttcttctgaaatcatatatttctccttattggcttttttttgggaaggagaagtcataacaaacccttcaaggggccagactcttttgaattcctttctcttctctgggtttccagtcttcctctgtggagtgaggggtgggactgggctcctgggcctttgaaggaaggccgggtgtgggctcatgtttctgcttgctgtggtgacaggcccttggctgccactttgatgtcccactgattccactgctcctggccttcagatcaggtacgtgctgttttgtttgtctcaaccttctgccagccacttttcctagttctaagtgtgattttttttcttaaggaatcttccttcttttctttttttttttttttttgagacagagtctcgctgtcgcctaggctggagtgcagtggcgcaatctcggctcactacaagctctgcctcctgggttcacgccattctcctgcctcagcttcccaagtagctgggattacaggcacgtgccaccaagcccggctaattttttgtatttttcatagagacggggtttcactgtgttatccaggatggtctcgatctcctgacctcgtgatcctcccgcctcggcctcccgataagactgggtttctgtgctcctgtgacatgctcttgtaggaatcatcatagaacagtcaaaatgccagttgaagttttgcttttgtgagtaaactgtaagggccggaatagtttggatgtgttgtgcttacctttgcctccccagtgccctgtccgagagtcagtatcaaaaaaatgtttgtcaagttttgctgaaaaatcttagaatataaaagtgaacatttggtataattaatatgttgtgctgcaggcataggaatgggatactgaatagaaactgagtgggaaactgaaaaatgacccaatgtaatattttaacattaaagatgatgttctcaaagcagtgggtgaaaggagaggttactgaataaatgacatttgaacccttctttatttttttttaaagtttcctactaaacactatatagcaaaataaaataaattctaggtggattgaaaacttaagggtaggaacgagccctctagaaggattgaactagcacacggcaatgtttatgcactctcagaagggtcaggcctttccaagtgtcgtccccaaagtggagtcacgaggaaaggacacaagagtggctcagcctcccagaccaaggaaaacagattggccaccgccattgtctttctgtgactgctctagcaaatcatcacaaacttactggcttacagcaaacatggtatcctagagttctagaatttgcaagtctgatgtgggtctcgctgggctaacaccaaggtgttggcggggctggttccttctggaagctccaggggagagcgttttccctgctctctccagctccaggaagccgcccacgttccttggcatacagccccctttctccacgtacagagtcagccatgttgcatttgtgtgaccttccgcggtctcttctgctctgaccacagccaggaaggttctctgcttttgagtactcatgattagattgtgcccatccggattgcccaggatggtctcccacctcattcgtattcttaattgcatctgcaaagtcccctttgccatgtaaggtgacgtagtcacaggttctgggcattaggatgtggacgtcttgggtgggggccgttattctgctgaccacaccaccagaacgactaagaaggaatcctctgtttacaaggtttttttttacaaagcagtgagaaagtggtgagcacctcattagaaaatggacaaagggtatgagcagacaatttacaaaaagaagaggtacaaatgaacaaaataaaaaaaaaaagttttaccttactaatgaatgaagaggcacatagccgacacggagaccactgttctcttgttgaatgagcagtggtgtgtggtgttgacactgctggtgggatatgaaccacggctcttcagcagtgtggaccagtggcctttttaatgtgtgctttatgtcccaagctttccatttctaggagtttatccccaagaggttatcatagttgtgtgcaaatatttgtctccaaatatctttattactttttttgtaatcactatattattttattttttagagacagggtcttactctgtaacccagattggagtgcagtggtgcattcttggctcactgcaacctccacctcccaggctcaagcgatcatccggccatttttttgtaatcacttattttatttttttgagacagggtctcactgtgtaacccaggttggagttcagtggtgcaatcttggctcactgcaacctcagcctcccaagtagctgggaccacaggcttatgtcaccacgcccagccaatttttttgtatttttttgtgcagacgtggtttcgccatgttgcccaggctggtcctaaactcctgagctcaagcgatccgcccacctcggcctcccaacattgccagtattgccttcaacaaacagagattcgtttatttcctgtgtctggtagtctgtggtgagcagcgcagggttgggcagcagctcaaagctgtcacagccccatgctgtttcctgcctgtctgccctgctgcccttcatggtggcatcttcactcacgcacgatggctgaggcctcacctctgtgttccaggtggaaaaaagggaaagaagctgggggccaaaggggtgctagctaagcctgttttttttttttttttccagaaaagtaaaaaccagcatttatttcttgccggctatgaaaaataaatgtgtgtcacagggccagccgtggctgacgtcagccaaaggagcaaaggcttctgggtagaggttgatgagtcaaccaacagtgtctgccacgtggggtatttcatttccatcagttttccaaatttactctgatgcatgtaagacttttatagtaaaactgttaagtctttttctttttgagatggagtcttgctctgtcacccaggctgcagtgcagtggcacgatctcggctgactgcaacctccgcctccagggttcaagccattcttctgcctcagccttcccggtagctaggattacaggcatgtaccaccatgcccagctaatttttgtatttttagtagagacagggtttcaccatgtttgccaggctggtctccaactcctgacttcaggtgatccgcccgccttggcctcccaaagtgctgggattacaggcgtgagctaccgtgccaagcctgttcaatcttttaaaaaattatatttatcttttgcaattctgcattcaatttcagacaaaatgatggcaggtgagaattcccaggtgggcgtttcttcgagtttttagtctgtgggcagaggcctcagttccttcattgcactcccagacaccctcatcaccgtgtagatgcccgagggtctgtggtggtgcttgtcgggctgaggtccattctcagggatgggctgaatgccctgcttgtgtggggtgtggggtgtgggcttgtatggtgccactcatcccttctgaactgggccctcaggaccccgggtggctgcaggggggcctgcgacagcccatgaggagctgcttccttcagtcctgtgggttcctgggagcccacctttcggctgagctggtggagggctcttgggaaggcaggagagaggctcactggttttccttttcttttccatcagcatccagcacgtgtatggtgcccagcaccccccctttgatccactgttacatggcacgtaagtgacgttccaacctcacttggcgtctcggctctgatatgggagggctgtggcaaccccggtcttcctgcttccttcctgctcccaggcattcctcagggaggagactggtttctcattcagccacactgatcaagcagtcgctttgtgtgagatactgtgcaccccgtgctgcgcatcccggtgaagacggcggatgtgggagccacagcctgatgtggggaggtgggggagccctggggagagccaggagctggcatcctttagccatgggcagcctggctgcaggccatccatgctggcttgtcctttcccctcctccttcccgcattctccaccagctgctggagcccggccctggcctgtcctggcccctccacagcaggcgggagcgcagagtgtggggcttgtgctgggctgttgtgaccctgcaggactgcacctgtctgacaagtttctcacgtgaggtggggccgatgttgtgtgttgtcctattttgggggaatcttgtttaaatgatcatgtcttcaaatccatataccacaggcctgcaccctgcacaggcgctcctggcccacacccctcactgctgggcaggagccttactgggattcggggaaggtgccccaggcactggccagagtgagctggggtggtcctgcagggtatcaccatgtggccctgcgcctcctcccaggtgaccttcctggagccccctccccctcctgccactgagtcctcatgggcttcgcctgctcttcttttggctgtctctgtgaattgtgtttgctttttcactcactattgctagatcaaagctgaacacttctatgcctgtcttttcacctgggaattctttcctggctggttttgggtgaagccttcgagcatgtacgagtaaagactgcctttgcattgcagtttgctcaggtccacggccaagatgccgaccacaccagtgaaggccaagagggtcagcaccttccaggagtttgagagcaataccagcgatgcctgggacgctggggaggacgacgatgagctcctggccatggcggcggagagcctgaactccgaggtggtcatggagacggccaaccgtgtgctgcgtaaccacagccagcggcaggggcggcccacgctgcaggaggggccagggcttcagcagaagcccaggcccgaggcagagccgccctcaccccccagcggcgacctccggctggtgaagtcggtcagtgagagccacacgtcctgtcctgcaggtacgatgggaggactgaagagatggtctgggtttctggccaagctaagaaagtggccagaacacactcactgtgggagaatcagtgggttcccatcctcatttgcagcaggccccctggcccacgagagcccttatggttctcttccaagggtaggggagtggcctgcgctctttcctagggcccccaagtgctttcttctgtcctagctacgtgcgtgtctcctcctagtggagtggaggcttctggcctagctacgtgcatgtcttctccgagtggagtggaggcaccaggctgttgtgggctggccgtgagagggccacgggggagcaagcgcctggggacactgtctccctcctaactccaccagcttgtgatggttccatgggtgacattgccagccgaggggtcaggcctctgcatgtttaggggctggccctctaggcagcttacaggattcctgccaggtgtgcgtacacgtgggctcaggtctgtaggggctgggagtctgacttttgggtcggccacgtttgcactctgaccccctcgggtggggtcgtgtctggtgccatgtgcatggcactggtgtgcagcagctgttcttgaggctgtttctgtggctgctgctctttatgtgttgcaggccatcacgtctgtgatggaaaagctgcatggttgtgcgatgaacccactgtgggccgcgggtactgttttcagagcttgggagaccccactggacagactgaggtacatctgtgccctgcggcaagtccattctggtgagggacagatgcagcactgcccacagtcagcaagggggcacagagcgtgctgggaggcagcaggtgccacggtcaagagaggcagagaatggggtgggaacgcggtggccctgagagcagtggggagcaggtgtcatctgaaacggggaggtcagggtgtcttcgtgtcagtggtgctgttgggaggcagggggtgaggggcaggggcgaaggccagctggattggccactggccctcataggtacctccctccaaggtcttctgggggctagggtgctctccccacatttccagctgagaagatggagattgttagggtggcctgattttaccctggagaactaggtttcatacctaggtctagtttttaaaaccactttctaggaattggttaacttctaaaatgttacagctctcattagttgagaatgctgtgcgtgatttcatttgatcagttttctttttggagtgtaataaattttaaagtctttgaactcgtaactggaaatctggtgatggcctttgcgggaggcttggaaacctggtgactgactgaagcatgcactgaccgccttctgcaggcccagtcctgggcagcgcccttcagcctgtggcagtcggagttggcaggatccctggcttcatctgctcatgggtggtgctgacattgaagctctgtgagcctctcagcaccgtgccccctacccccaagatgcagggcactgtcaggctgagagtggccaggaccgcaggaccacacggtgtgtggctgggggatctgacaagaggcaggctcaggctgtgaccagctggggtcggggagctgtgagatgtcaccctgggatgtcaccctgggatggcctcatcctggaagagccaagcaaaggatgctgcaggcagcttgcgctgggagaagggggcccatgacctcattgccttgtgctcccacttgcctgccttggagttggccacctttcctgtgtttgctttctgggcaagctttttttgagtacttcagtatagtgacaatgataccatatattgatcatttactgtgtggcaggtacagtatcaagtccctgtgatactaaactcattaagctttgcagcagcactaggacatggacttatgggctctgctcaggagtgagcggccccttacgtgtcctgatgaagccacatcagtcatttctgaagatcacagggaagtccagctgagcacctttaattctgggactcagtgcacagctgctcttcctgctgaatattcactctgaggaactgtaagtgctgctgaagcaggagcctctgaaggagggagagggggcactgtcacccatggtcctcccctctgctcaggtgctggttctcagccctgtctgcagtaaggccggcagcggaaactctggagccagacgccccgggctggagccccagcccactgcttggtgtgcggctgctacaaaataggaatcactgcaagggcactgaggctggtgggaggagatcctcctgggggttggggggagtcagggagagtgggcagcggggatgggggaggagacagggcggtactctgaagtctatgtccccactttagcagacttttctggaaatttaactgggccacattctgcccagaggccataggttgcctggctcctggatagcctgagggtttctgtgtgaattattttcccccactcccaggttataagggaaatgggggtgctctgtgggaaggagggcgcgggggagtgcggctcctacctccttgctcagcggctgctggagtggatgtcggcccgtcagctgcagcgtttgcttcggctccatttcctggagtttatttttcactctactttaattttcagtttttgaaaaatgagatagctagacaggatttagacccaggagtttggagcctttcccagcctcttgcttgttggtctcggatggcagtgttgagtgatctgagggccttagggtcttcccttgggctgacccggtcccgggttgctgggtggaacgtgctgtctcaccacctgcttggatccccgtgggcctgtccgtcttgggggtcagtggggccatggtgggcagcagcagagggcgggagggagggcgggtagcttgtactctagtgccactgcggtcactgcctgtggtggggtctgggaaggtgccatccctcacctgtctggcttcctttgtttccttgggatgagggtccctgtgggaccttcctcccagggcactggtgagacccaggagggccaggcaggtggcggggttgggcacgctcttgagatggcaggtgagagccctcgcagcgccctggttcctgctgtgtccccactgttgccttctgtcctcagcacctctgcaggctttctcctttccctcatggtaactcacgggcttgccctccgcactcaggcctggctgacccgagggcaccgtcctacacagaccctctgggtcatgtcacctgggcaggccctgatctgccaccccaggcactggtgggagcctgacctccacacagcccgaggggccctggagttttctggctgtcattgtgttgcttttatgcaaggtggtccattttgttggtgaataatactctgccagtgaagcgagtgaatttcaaaggtgtcagttccatgttattgctcaagaaaccaaggtccccactgctgagtgatgggaagaagggacccatcagcattcacaaagggacagtggcacagcaaggaggaacgtgtagtcgggaggagcgccctcaccctcacccccattctctcacccctgcagaaagtgccagcgatgccgcccctctgcagaggtcccagtctctcccacactcggccaccgtcacgctgggtggcacatctgaccccagcactctcagcagctcagcgctgagcgaaagagaggcctcccggctcgacaagttcaagcagctgcttgccggccccaacacggaccttggtaagcaccctgccctctggaggacacacacagacatttcttgctgtttctgaaatagatcacatcttaaaggattctatgtatgcttatgtaatgcacacgcgtccgtgtgtaatttgccttgcaggaaggtgatgttttcatgtaatattttcaagtcagtcactaaggtagtagcaatttgtgctttagacaagttttgttaatgtttttcccatgcaatttgaaaatgtattttgcgttcctttttgttttctttttttaaaatttgagacaaggtcttactctgttgcctggctggagtgcagtggtgtgatcatagctcactgcaacctggaattcctgggctcaagcaatcctcctgcctcagcttcctgagtatgtgggactacaggattgtgccaccatgctcaccagattttttaaacaattttttctacagatacgggtctgcctgtgttgcccaggctggtcttgaactcctaggcttaagagatcctcctgcctcagcctcacaaagcactgggcttaaggcgtgatccaccacgcctggcccattctgttttcctgttgtcccatttgcactctttattattgctgcccttggtgagcccttcgaggctggccaggtggacatccttgttcttgacagtattctgaagacagtggctcatgggggcacagcgctggtgaccatcaactcaatctgctggttttgtactttcctaccatggggcttgcagtcatcagagggtgacaggctgtgagccctgcaagggggcaggggtgaggctggggcagaggggcaggcccacagggcagagcacagtcaccagtgtgactcttcctgcgcgagttgcttccaggcacacgcagtgcccatgtggactgccgtggccaggctctgtggaacgcacttgctttcagttcctctggtggaattcctgctgaatccacgtccttcctttccctatctcatctttgtggagtgccactctggctaggtgtttgctagacgctggagctctcgggaggaccggaatgtggccttggtcatgagattgcttcattgaggggacaaacctgtatcacacagttatgactggtgtcactgtggcactctaagagccagaggtgcaacgcctggcttggccaggaggtggcgagtggcgcacgcggatgggccgccaggagccacgcaggagccatgcaggggccatataggagcttgcagcagccgggccttcacgctcaagcccagggcagggagagggtttccgggcagaagcagcggttcaaagggcatggctgaagctgtgttctcgaggcgggggagggctcttggaaggtctcctggctagaaggacacagctctgagtagagttctcagagtgggtggttgtttcttccttatgtttgttttttttttgaaacagcaacacttgcatgtgttataacatgacacagcacagcagggtgtatgtgaaaatgaggcctgtcccagcccccaccttcccttcctttccacagctccaggtgtctccttccagcgatggcccatgcatctgttgttttaaacgtttcgtgttgatgcaattcaaacttgcagaacagttggcatgaatagtgccaacaactcccatatgctctgtacccagaatcaccaattgtttacgtttgcccattaccattctgcatgtgtgtgcctgtttttgtgtgtatatatacatttttttcctgaaccatttgagagtcagctggagatatatccctttacctctgaaaccttcgctgcatatttcctaagcacaaagacattccctcagtatcatcacagcacaggggtcacaatcaggaaatttaacgttgacacagtactattttaacacttgtattattttcatccacagtccatagtcacattctgccagttgtcccagtaatgtcctttccctcttttttcttagtccagactccagtggggaccatgcgttccatttggatgtcacgcctctgtcttctccactaacctggcgcagcagctttgccggtctctgcatttccatcttgacactttagcagagcatgggccagtgattttgtgggatgtcccttggtttgtgcttgtctgatgtttgcccacagtgagattctgattgataatgtttggcaggaacatcactgaagggattcgtgttctccttggtcatcacagcgggggcacgtggtgctggtgggtcctcacgttgaagatgtggactccgatcacttggttgaggtggcgtctgccagctctttccactgaagagctcccctttttcctttggtgatgaagtgctctgtagagagatgctctggggtctgtgcatttctacagtgtatttctttgtccccttgcacggcaaggcagttgtgcacctcactttttaagggaatgatacattttcccatggcgtacgtggagaaccgccttagtctttagagtgccctgtaacatgccatcctatggatttcccccgacttgactgcaccagcccctgcggttgggcagcgggttattcctaacttgctattattacaaacaacttgagaacgtttcttcaggcgcctgaacctccttctgtgatggtgacacagagcatccctagccatgggtgaggcgagaaggcagtgtgggggatgggtctgtgagttcgcctagagcaccaggtgtggaggtgtcacccaccaagacaggagataaaggtagatcgtgcttacgggagtctagtcttgtagttgacgtacccatcttggccacttcctcttctagcatgccagtgccccttctctgctggctctcctgcctccagggtggtgtggagatgcagaaccacgttgcacctgggagagtgggtcctggagccgggctgcctgtgtggagagctggctccactggttactcgccacgtgaccttgagccagcttggtgatgatcctgctctcagagttcttgtttgcgtgataggcatgatgaaagcggtgctcattttgcagtttaaatgagatagtacatatgacatgcttaacagagtgcctagcacatactaaacactcaaaaatgttagttatttttatggttgttgttacgttcatttgaactggcctttttatcttctcacttgatttttgtgctattgacgtatatggtcacttttgtggtcattgacgagtcaaggacttacagatgttttcctggttgtgtcctgtggtttccagcagtaggcaggtggaggagagacagctggtgaaagcaagatttgcctgatgggaaccctatgctgggtcaggctctgagtacccacctggagcattctggaggactttgtaattgaaccaacttttggaaattaaaatcacacttaaaagtaaagctttcaagacttgtaggaagatgggagtatgtagggctagattttagcacgtaaaaatcaagtattttgttaggttgaggggactgtgggtttttttctttctttataattctatgtaaatatcaaatctaaaaccaaaaagctaaatgcagagctttcaaagttaaacgatgactgcatttgtatttagtagcaagagaaaacatcgccagtaaattgcctgtttttataaggcagttaagatagctttggaagacagtggaatgtactttcttcacattacatgaaagacgtaagtggcaaatatttgccaatgttggagaagcaaatcactgatgtgagaagtgcctacagaaatgagtctacctgctgaatatcattctgtccagcggagtgctgtttttctttgtttagcttacgctctgttatgagcctggggatgaaagtagcaaatagaacttaatagctcattttactcttagcattggctcaatatttactcacacaaagactgcctgctttgaagccccggaaaatgacactcaagttggtcacatgtatctggtgaatggtagtgcgatttggtaacatgtagaacacgcagtttcctgaggaccgtctagggcctgcctcgcagcagtggggcctcggagggcaaactgtgtgtggagctcagctctggccctcaaggctttcgaacggtaggacagaaggcacgacgacccgtccgtcaaggagtggggccaggccacggctgtgttccacttcccctgaggggtgaccatccagtctaggctttatgagagcgtgctgatagatggaggtcagcgggagagggtgttttgggggttgggagggcatgaacagaagtttggagccgtacaccttggcagcactaatacgagtagatgcccccttggtgtccgtggctctagggcagccgtgaaggggcctgggcccttggtgacaggaggaagcaggtgcggccttggagtaggccctcagtgtgatggctggccgtgtccttactcatgaagtggctcaacctacctgtttcgtcagctgtagagggagcatgagacctgccctgcagggtcctcgtgaaggtcagtgggaatttatgtaaagtcactcatccaggctctgttgagcacctgctgtggttgtaggcactggggaggagtcggcggcgaggcttgcgagcgccctgccctcaaggagctgacattctcgtgtgaggagacagagggagctcgctcagtacccccgcaaccatcagaaggcaggaagcatatagggagagtcaaggcatgtggagggtagaggctggagctgctctgcagttggctgtttctggggcgagatctgcacggagtcaggtatttgaagagggggcatgagcattctagggacaggcccagaggtgcaaaggtcctgcgggcaatagagcttcatgtgcttgaggggtttctgaggctctggcctggtggctgagtggggtgtggggagaggcctgcaaggcaggcagggaccaggtccccagggctgagaagtccaggagaaggagctctgcttttacttcgagcacagcatgaagcctctgggaggttttgaaccgggggagtaaagcgcggtgcagagcatcagaaagcggttgctattctgtggaaggaagagccgatgactgcttctgagcagagtgttgccagtggccatggacgacgtggagtccttgggcagctcatgggaggggctggaggagggtcagagtagggtgggagactagggggcaagagtggaggccgtgggctggggatgtgggtggggtgggctgcgtgagtcgggggctgatgaaatctggagctgggtagactggcgagaaggcaagagccaggacccccatagcttagagcctggggtctgcagggatggggaacagccgatagacacagaaatcagaacacactccagagatggcatttcactggggagacaaaatctcctcctcatgaaacagagagccagggaaagcagtgtgtttaaatgctcccatggttacagccactgggagccttcactctgtgctgggcactgtgctgtagagactgttatcagccaccaaaagacccccctctgcacccccacccccttcctgcgtgccccagattgctggccttatcgctggtttacagctgaagagctcgagacaaggttaagcaggcggctgccctccagccccacagtgagggcagagctggctgggaaccggggtcaccccgggctgggctcccagcctccaggtcacacgtttctggttagtgtagacagtgggcattcttggtgctgttggaggcctgaggaagggcggcggttttctctcctgtgggccttgttggagatctcgcttctgctgtgggagctggggcccggcccccaggagctgaggcggggagggcgcttggttcttgcgacccggccgtcagcgttcagcgtcgccctctagtggccaggtgctgtctttgcagcctgggcttcatgaccacagcagggcacgttggccttgtgggtggggggtgcttacacttgcgcgtgtctgtgtgtgttcaccgtgcttactgaaaggcaggcacagcctcagaagagaataacgtgagggacgaagatgaaagctctggctaactcggccttgccctggcgtctcgtcagggaagggctttgtcaaggaaggcagccccctggccacctagaactgctgaatgcagaggcccggggcagagggaacaaactccagcttgcacagtccttctgtgcatgcactggcccagccacacccagatccttgctggccctgctctgtcctcaagtcccctgcagtgagtgtcacatagtaggtacttgtcatttgatggttcgctgactcttcagctagacctttcttgccttcttttggtgcatacatggtcctgtgtctctggttttactttgtttcttagataaatttactaggtaagtaactgacactaccatccaatggcagctcagcaacaatgcgatggcacctccttgagccaaggacgggctttcccaaccgtgtgactctgggtttgcgttttccccccgtggcttcccccacatcaccgttactctgctttccctcaaagcttgcccccggccttggcccctttttgcccgtgtgttcccacttaggacaggagctgtgcctatttcttttctctgctcattttgtcgctaaagggtttctgtgatcatcattaacggaaatgttattgaaagttagagaaatggaaaagataataaaaccaacaaaccaaaattgccactgtttccacatgctgtattaactagagttgtgcttgctttttctctctaatttattccctcttaatcagttcttaccagtccttcagagctcactagcagaaatggctctctctcagcggctgttttatctgcagagtgatctgggcttcaggcagggcatgcgagagcctctgtgaacacgctggctccccactttcacagcattgccggcatccttttttctgggtgatgtgttccctgctcgatgtggtatttgaactacatgtgatgtcacttggcttaaaataaccaaattagatatgatttggtgaaaattaggaattttatttactatccatagtaatgtaaatcttcagtttaataggaaacctttcactgttccttcaggtgatttgtttctgttgaatggtgatttttagtctgtaatattaaaagcaaatgctaaaagagagtttgtaagtctttggtatggttttaaaggagccgccttaaaaacttatctgttgcatgtttgtcttttttttcttataatttcttttgtagatgaggatattggatacagacttgagcaattgtgcgactgtggtattttctctatgtgagggataggagaaggagagtagggcgagtatggcaggatccccagggactcattgctcctcgccctgtacaacattttctacttgtaacttagctcctattatggtttcctctaagagagtatgagtttgtgtccatctgcccattagactgtgatcctctcttgggccgtggctggagtcactcatcctcctgttccagtgactggcacatgcatggcacattctcaggaaatgctggcagagttaattgagccaccagcggtcagtctccttctctcctaccctgtgttcttcagcggtgagtggggcatcactggttttccagttgacacagggtgccttgtatctggggccttccgtgaagatgtgtttttgctgtaggtaacagaaaagcagacgcaaggacttttgaacaaattcaaaagttaagtttctcagcaagatgcctggaggcaggtagctgttggcactggttcactggctcagtgatgtcctcaggatctaagctccaagtcacttgacctcttcctcacagctctaaaggggctgtcaccatcatggggtgatggaaggagcagtcaccagggcaggcgtcttcttactgggagagtagggctgccttcagagccaggccacatggccactcctggtggtagggggagctgccaaggatgtgtctcctgtgggctggacatgggcactttcaaaccgggattctggaaacagagaggtgggatgggttggatattggtttggcagccaactgtgtttgccattcacagagattgatgtgtgtgtctctcaccgcccccccgcaccccccacccgatttctggttccttaatgtctttctgtccttcttcttcttcttcttcttttttttctttattttgagatggagtcttgctctttcgcccagactggagtgcagtggcttcatctcggcccactgcagcctccgcctcccaggttcaagtgattctcctgcctcaacctcctgagtagctgggattacaggcacccaccaccacacccggccccggctaagttttgtatttttagtagagacggggtttcaccatgttggtcaggctggtctcgaactcctgacctcgtgatccacccgctttggcctcccaaagtgctgggattacaggtgtgagccaccgcgcccggcctccaaccctcttatcacatttaccccatggctcagtgccgagcgctgtgtggaaaacgtagtatagagacccagatgtttgattgcattgaactgtctacagagtgctgggtgtagagggactcagtaaatgaactttgaattctcatagtcagtgacatggcatttagaatgaaccctcctctgttctgatttttttttttttttttttgcccggaaatggagctgagactcaaagggccacaaaccataccattactcaagtgcatagtactgaaagctgccgagaaaataatgtttttgttttaagatggtttaaattccttggagtctattatttaaaaaatatttaaaaattattaaaaatttttaaatttaaattaaattttaaattaaattaaatattaaaaatatttaaaaattatttagaaaatattatttaaaaaaagtatggccacagaccattagaactgacatgtaagactgagctgaaaagaaaatcaagctaaaaaaggatataaaatgtgttaacttagaaaaatgtgataatgtacctttgactttctaggggctctgggtatgatggtgagttgtcacccaagcctgaggacagagtgatgggagcctgagggggcggaggtgagtgtctgtggctggtgggtcccacccagggtctggagtgggtagaatagtgctgatcttcggccagtcagacctgagtagctacaattatggaattgggtttgctgatatgaggaggggaagttcaacctcttcacagggctggccgagcaaatgtgtgcagagccaatagggctttgctcctccccaggcatggcctggatactctagtattatgggatattttataagaggattggcaggttctgtgaccgcagattcttcctgctcaaccgcagattctacaggtgcatcctgtagacactttacaggcgaagttacagggaagaggatttctttaagaaggaaagttggaagacagtggtgagcaattagaattcaccaccagcgtggaacgatggaggatcaacagcagcaggattgttctccttctttagaattcagggcttcagggattagtgttgattgtgatggtgattgtgggggtgatggtgatggtgatgatggtggtgatgatagtagtgatggcgatgataactgtgatgatggtggtgggaatgatagtgataccaactctcctgcttgtcggtgttgtggaccctgtcagcccgtgctgaggacttctgtcctgtctgctctgaggccccagtgctgctttgcttggagctgtttgggaggcacagtgggtttgatgttagaaggaagaagcacatgcatgcgtctgtgtgacaaagccatttgcttgacgacacgctggcactacttggcactgtacctctgcagcggcagtgaccagtgtttatccagccttccccacaggctagctcatttgtttggcatttactccatatgatgagtagggcggcaggattcctgtgattcccattttgcagatcaagaaactgaggcttagaaatggaggaggacctaaggtcagatgccagccagtagcaacaatcacttgatttaatccaggcttctttgcattgcacactgctttgcttactttaataggacatgaagagttcggttttagaaattttatacagggccaggtgaagtagctcatacttgtaatcccagcagttgggaggcctaggtgggaggattgctcgagcccaggagttggaggctacagtgagctatgatcatgccactgcactccagcctgggtgacagagcaacaccgtgtctctaaaagaaaaagcaaaaaaataaaaaagaaacttggtacaggattaaatcatagatgattaaaataagaaaatgggaagaaatttctaatgaacagaaatgcagtaaggggctgggcacggtggcttatgcctgtaatcccagcactttgggaggccgaggcgggtggatcacctgaggtcaggagttcgagaccagcctggccaacatggcaaaaccccgtctttactaaaaatacaaaaattagccgggcgtgatggcacacgcctgtaatcccagctacttaggaagctgaggcaggagaattgcttgaacccgggaggcagaggttgcagtgagccgagattgtgccattgcactccagcctgggtaacagagtgagattctgcttaaaaaaataaaaaaaaataaaaaaataaagaaatgcagtagggatgggaggtgaaaaataaaaaaataatccagttaccatcacaactggatacaatacaggaagttacaccttaaatcagttgccaagaataaagcaaatccttggttttgcatagagaggtgaaggatatcacctttatcctgatgttattgtgtgtggtgaaatgtagtcaggtaaggctttgactttggtgtttagccagctttttttttttgggagacagtcttgttcggttgcccaggccagagtgcagtggcgcgatgttggcttactgcaagctccgcctcctgagttcacgccattctcttgcctcagcctcccgagtagctgggactacaggcacctgccaccatgcctggctaattttttgtattgttagtagagacggggtttcaccgtgttagccaggatggtctcaatctcctgacctcgtgatccaccctcctcggccttccaaagtgctgggattacaggcgtgagccaccgtgcccggccttcgccagcttttgaggtattcatataaactattggaggctttctcttgaaatcccagactatgttcaaattggtcctaaagagaagaagttcaagtttgcttaaaatcctaatgtagattatcttagggtaagagaatctaaagaataggttagtgtattaatttgcctgggctgccataagaaaataccacagactgggtggtttatgcagtagacattgatttctcccagttccagaggctggaagtccaggaccggggtgctggctgatccagtttccgggaagggctctcctcccggcttgcagatgccacatttttgctgagttgtcacatggcatttcttctgtgcatgtgtggggagagagatccagagagagagagggaggtggagagcgagcgtgcacaggagctctctgggtctctccccataaggacacttatcctgtggctcagggccccaccctcatgacttaattcaacttcagttacctcgttatagtccctgtctctagacacagtcacgctctgggagaggccttcaacatacgaatttgaggatacagttcagtctcgaatagttagcatatctttttcaactcatcttttaacccaaggtaaacccatggatttgttttaggttctagaagtaagaataaccacatcccctgccaccctgacccttagcatctcgggggtcagggcagtatgggaaacaggaccatgggctttggggtggcgcatgtcaggtcctgtccgggcttcgacatttactaacacagtgacctgggcagtgtcttcatctgtagaatggggtaatgtcagaggcctccatagtgtttgggaggcgtgatgaggccatctgcggagtggttagcagggagccctgcccggctgctgtgttcttaccgtcgttttcctgtgtgtcctccccacccagattttccactgaggccatgaaactatatagatggcatttgttgtccttttattcaggttaatattacatcatcctcctctcccatgctgctataatcttcataaccatcatttttaatggctgtataatgttttgaaaatgatctttacttaaaattcttattaaaattgcatatctaagtcaaaatttcatttatatgcttgatcaaaatgtagacttgtttgagagtattcaaaatgtgtcacatcagctcacgcatacagaagtgatgttcctgggtgttctggaggagggaggaatgctctggggctcaccacttgcagtttaggaactggtaacattgatttctactctatttaccagcgtttctaattggaaaagctgcattatacgaagttaaaacatttacagtggttcctcagggcttgcagcctgacaaataaatctccttcgctcccgacccttctatttctgtctcctttcagaagtgttccacacatattcgagtagatttatatagacgtgtgttaatatatttcttactccaccccattcttttaaaaatacaaatgaaaacgtaatagtgttacgtgccccttttctcactcaaaaaaaaaaaagtatatatttatggagagcatgagaacaggtaagatttagtatataggtataatcatcttttattttattatgagggtcaaaatggcataaaatcatcaaatttttaagtaaaaattctgttttaaaaacttgaggtgcaattcaaataacagacaataaactgttttgtggtggacagttcagcggcttttggtacattcacactgctgcacaacccctacctcaggtattcctcatgcaaaagaataggcagatatttaagctttgggaggagttttttttaaaacaataattacataattggcgagttcttattcttagaatcaaatgaagaggtagctctgctttcgacccttctagacgccccatggtgatacactcttccattaaggaactcagattcctcctgggagataggagacaccaaatccgtccttttgtcctcatgtgagttctctgggggcagctgggctgctgagagtctgtacccttacatgcaggatgattgaagaggctgggcttactttggggagcatggctggcataggccaggctgtgtgtcagagtccatcatgcggctgtcatccaggacagcctaattaccaagtaccctgggtgcagggcagcagactggcctcagattcctgtgggcaggggacagtgggcatcggatatttgatgagcttgtttcggccagattcaggcagtggatggtgactgggccatgtggacaggctttggtgcctgtccgtggcctggtcaggaagacccattgcatggagtggtaaggagctgtcagggacagattctggggtggggtggaaccagaagagagacacaggtgacaagaaagcaaggttcccatctcttcattcatccgtcagacacgagtaggtgcctgctgtgccaggccctgtgctggacggtgatgagcacttgagttgtgtggcttctgaaggctggcatttgtgggtgcatcttgtctcatgggtgtgatttccatagtgggagatggggcaagcctctcttagggagggactcacttaagcggagagttgagcggaggaggcagagtggagtctgagtggcgagggtggcagcagcagcaacagtcacaagcaacggtcacaacggtgtatcgagctgcgtgctgagcgcgttgtgtgcagtgcccctgcgattcctagagacttacagaggctcagtgtctggctcagggtcgcccagctagtggagccagcactcgaggccaggtgtgtcagagagagccagcatccagtctgtcgccctgcaggactgatagtttcagaagaaggcagtggtaggaaaagccaaaaatgcagctggggtctgttcttggaaggtctggcccgccaggtgaaggcattcgatttgaggcagctgtggtgccatgagaaagccactggagatggagaggaggtgctgagatcccgtgctcagatcctgcctctgccaccctcagaccgtccagctacttaatcccgccgtagcctcagtttccctaccagtaaaatcaaggaattggtccaggtggttgccaaggtctggaaatctttgttctgtgtgtagttgggagtcccagaaggttttgggcagggattggaatgatcagagctgtgctttggggaggttaatcgggcttctggtgctttgtgattatcctgctgtagggctggaagtgacgtgggggtgacactttgaaattcagcagcaggtgaattagctgtgctctgagctgtggctgtttggaactccctcatgccgtttctgggtctggtggcagcttctgctcccctgccgctgcctcctcctgcctgctcgttccctggcaccagcgctggcttctctgcaccccctgtgggcacagcaggcacaaggataatgaggctgtttgggtgggcttgtggtgctgaggagacacggagcacccatgaatcatggggatcacagtggcccagatgtgaggctggcatttgaagtttgcaggctctggggctcccacgggttggtcacactgtgggctgcctggcctcacagcctcgtcagccactcttcccacccctttggggacactgcccacccctgtggggactgccgcctttctgctggctgtgtgtggctttggtttagctcgatgggggttttgaaatgggttttccgtgaagttgattgaggaattggcagaaggctcactgtgtttagcgaaaatggattttagttgaagatgcagccaggtaactcaaactttgggatggctttactgacccttgttttattatcatacttgtcaaatgtagggactgctattcagttgacaagaaaacgtttcctaatcctcgtaagcttaaatttgcttgtttcgacttaatgttagcatttatcttttttgctttggttctttcaagccatttgatgcttcttttgactctttccatgctgcagttgatctttgtggcgtgtacggtctctttcctgttattgatagagtctgtcgtgtccggagctgtccgtgaggtgatttatgcggccgctgctgccccttggtccgctctttgtctcccaggcggctccgcaggtctttctgtatgcaggccactgcatttcatttgcttcttcctttactttaatgaccttctagatcagaccattaaatacttcactaaagtacactcttttcttccatttattcatggttatttcctcaataaagtgtatattgaattcgtaagacacagatttccttgtgtgtgcctgttccatcagaagtcattgaaacttttctaggcttggggcttctgtgcttggaaattctgtccctattacctaagccacatattaaagaataagatctatttagcaaagtcattttttgatccttagtatgcggcatttaatttacagttattttcagtgagattttaaatttgctttggccagtatgggtgacttctctggagagggagaaatcttatttttactttaactttttattggcttttccgttttcccagggtagaagaagaatgctttaataatagtgaaaattatttctgattatttcattcaattacaatatgtagtgagctcctaccaggcgaggcacaggggacccaaaggcttctgctccaatggagaaagagatctgccgcagataatacggtagaactagggagggttagggcccttaagcatatgtcagaagttccgtggaaacacagaggaacgagtaatgaattctgctggggatttggctgggggtgggagcaggtgggccttcaggggccagaatagctgcagagaagttatcctgtctgtgctgggccccggaggctgagccacctcctcagcccaggactggggcaggggttccatgaaggcaggggcacctgacggacaagaaatcagatctaaaaatgcagacagtatttgggaaagtggcgtggtttggacatctgaatctctttgtcagacataggaggctgagccctggtgctccttccaggagccttggtggcgaccagaaagctgttgctggtttctgcctttccgcagcccttgcatagtcagcgcacaccctggcctcttcacccacaggctggcgtggcaggagcaccagccttaccttcttagagaatatttacttacattcatctttgctattcttaaatattatttaaaattacagatggtcagtgtttgaaatttagaaactactgagagtaataataagaaaaataatagaatctaatgctatgtgccaggtgtggggtgtggagtccttgatgtatattttcttgatcatttctcacagtagtcctgtgaagtggatgctatttttattcctgtttgacagatgaggaaactgaggcttgaaggggttaagaaacatgcctgacattccaagattttgacgtcacagagccagggctcaaacttaggaatgtctgagtccactgggcacaggctctcctgcctgctgtgcaacctgccaagaccagtctcaggaagaaagataaaaacccatgtaaactaccaccctggattccccaggacgttaaaaaagctgatcttctttgtctttttgtgagggctgtgtgtgtgtgttttccttttcacgtagacttgagattaagcagtgtatctaattatatatcttcttatatttattttatttttaattttttttttgagatggagtctcactctgttgcccaggctggagtgcaatgacaaggtcccggctcactgcaacctccgcctcacaggttcaagcaattctcctgcatcagctcccgagtagctggggttacaggccgctgccaccacactggctatttttttttttttttgtatttttagtagagacagggtttcaccatgttggtcatgctggtctcgaacccctgacctcaggtgatccacccacctcaccctcccaagtggtgggattacaggtgtgagccaccatgcccggcctatttttacttattttaaataatgtcttttcccatgacactaactttctttgaaaacatgattgttcatggctttataatagttatcaaaatacattcatttcttccatttgcttgtaggtgaaacatttctgaagacattctattatttgggtgtttaagttgtttccagttttgtttttgatgttgttttttatttattgtaattactaacctgtgagacacacccctgagacataactcttgaacacttccttgtgtatttccatggcgtgagccctggggcgaggactcggtgttaaacagagctgtgcggcggtcgcttgttcactcgtgttgtcttgcttgtccctgcggttccctgctggccccatgcagtttgatagccgctgttgacttaattactctttgcccttcgtttcctctgtatcagtgtttttgaattgaagtgcccctgggcacagagtcctttatttggacctttggatgttttctcgctcagagtacgcaatcctacttcccctgtgtttgatttgccaaggtttttctgcttcagactttctaaattcttcagaggattggtgggcagttctaacaagacggtgcccatttctctttctaatttattcacttgtttgctcactcatgaattcagtcatttgctcattgatttgttcactcatttactcggaaaatgtttcttaagcatctgcctggtgctgggcactgacgatacaaagatgtatttgtgagtggtgctccctgccctgtagcagctcatccatgttgagagaccaggcaaaacaggaaaattccagctttatggcaaggtgaaggaaggggatgggtgcctggacctccgtggatggggcttgtttggctggtgggaggatggaagatggagggagagggcctgcgtggaggggaggcctgctggtgggtcgggggtgagtggagataatcggctggagcccgtggggtatacctgcgtgcgccatgggcaggtaggtcccactgcagccttggggagggctctggggaacgagaagcagattggattttaccctgcaggtggtgtcatttccctgcctacagttctttaacaatcacactcacacccttgggatagggtcccaagcctctggccctctggctgctgcgagtgtcctgggagcctgccctggacctcctgctgcggccggccgcctgcctgcctgctcttggcggcagctcctcctctgcctgcggtgctgtccctgagcctccccactggaagctgtctgtggcccatgtgcctcgttcccccacactttggtttggagggtatcacaggggcgggattgggcttggtgccgggcctggctcagggccatgcttggtaatgatttggtaaactgaagagtaagctctgcctggagctgtgtttactctttcccttatctcagccaaaaactgtccttttcaagaaatttactgcctttctctaagcactgaatgaagttattctttccaataagattaggtaaattctgtggaggacttgaaggagaaccagtcccatcagaagtcagcccaagaatagtaccatctcaacagcagtagattttattggggcacattgtgtgtgaggctctttgctttaggcagtggagtgaggtggggaacagtacagggaagttagccacgtggtagatgacaggatgagtcatgattctttttttttcttttttgggcttttcagagccttttgatgcttatgcatattatcaatccccatgaccaaaataagataggccacatttcctaacatttgtctacagagctgcttattcacaggccactttaacatttcacggtcgtggtggtctacaggaagcgggtagagcttgtgaaaactgaaaaccttattcatggggtcattccctctgattgaacctcattcaaagggtcattccctctgattccctaattatcagatcttaacatctgaattctctcagtgtccttttcacataggcaaaatgctgatgttcgaacattaaagacttccagtaaaaagaacatcttgtattgcacagcttagaaaattctttctaaactcatcaagttgtatacatttaagtaggcacatctttttgtaagtcaatcgtatctcaagagagtggcttaaaatttttttttccttttggttgtactggaatagctttctctgtaacttctacccattggctgtaataagtggggctgtattggatgagtccaattccctattcacattgctgtaagtatatgaggatactaggttgtcctttttttttttctttattccttctaaaaaaaatctgggatacaggtgcagaatgtgcaggtttgttacgtaggttacgtgtgccatggtggtttgctgcacctattgacctgtcacctgttgacctgtcctctaaattccctcccctcacccgcccaccaacgggtgctggtgtgtgttgttccgctctctgtgtccatgtgttctcattgttcaactcccagctatgagtgagaacatgctatgtttggttttctgttcctgtattggtttgctgaggatgatagcttccagcttcatccatgtccctgcaaaggacatgatctcattcctttttatggctgcatagtattccatggtgtatatgtaccacattttctttatgtagtctatcattgatgggcatttgggttggttccatgtctttgctattgtaaatagtgttgcagtaaacatatgtgtgtgcacgtatcttcatagtagaatgatttatattcttttgggtatatacccagtaatgggattgctgggtcagatagtatttctggttctagatccttggaaaatcgccataccgtcttccacagtggttgaactaatttacattcccaccagcagtgtaaaagtattcccatttctccgtagcctcaccagcatctgttgtttcctgactttttaataattgctattctggctggtgtgagatggtgtctcattgtggttttgatttgcatttatctgatgatcagtgatgttgagcttttttaaatgtttcttggccgcataaatgtcttcttttgagaagtatctgttcatatccttctcccactttttgatggggttgttttttacttgtaaatttaagttccttgtagattctggatattagacctttgtcagatggatagattgcaaaaattttctcccattctgtaagttgcctgttcattttgatgatagtttcttttgctctgcagaagctctttagtttaattggatctcatttgtcaattttggcttatgttgcagttgcttttggtgtttttatcatgaagtctttgcccatgcctatgtcctgaatggtattgcctaggttttcttctagggtttttatggttttgggttttacatgtaagtctttaagccatcttgagttaatttttgtttaaggtataaggaaggggtccagttgtagttttgtgcatatgggtagccagttttcccagcaccatttactgaagaggagatcctttcctcattgcttgtttttgtcaggtttgttgaagatcagatagatggctgtaagtatgtggtgttacttctgaggtctctgttctgctccattggtctatatgtctgttttggtaccagtaccatgcagttttgattactgtagccttgtagtcaggtagcatgatgcttctagctttgttctttttgctaggattgtcttggctatatggggtttgattccgtatgaaatttaaaatagttttttctaattctgtgaagaatgtcaatggtagtttgatgggaatagcattgaatctgtaaagtactttgggcagtatggccatttttacgatgttgattcttcccattgatgaggatggaatgtgttttcctttgtttatattctgttacttccttgagcagtggtttgtagttctccttgaagaggtccttcacatcccttgttagctgtattccttggtattttattctctttgtagcaattgtgaatgtgagttcattcatgatttgactctctgcttgcctattgttggtgtaaaggaatacttgtgatttttgcacattggttttgtatcctgagactttgctgaagttgcttatcagtttcagaagtttttgggctgagctgatggggttttctaaatataaaatcatgtcatctgcaaacagagacaacttgactcctctcttcctatttgaataccctttatttctttctcttgcctgattgccctggccagaacttccagtactgtgttgaataggagtggtgagagagggcatccttgtcttgtaccagttttcagagggaatgcttccagcttttgcccattcaatatgatattggctgtgggttcatcataaatagctcttattattttgagatatgttccatcaatacctagtttattgagagtttttaacatgaagggatgtgatgttgaattttatcaaaggccttttctgtatctgttgagataatcgtggttttttgtcattggttctgtttatgtgatggattatgtttattgatttgcatatgttgaaccagccttgaatcccagggatgaagcctacctgatcatggtggataagctttttgatgtgctgctggatttggttcgccagtattttattgaggattttcgcattgatgttcatcagggatattggcctgaagttttctttttttgttgtgtctcttcccagttttggtatcaggatgatgctggtttcataaaatgagttagggaggagtccctctttttcaattgtttggaatagtttcagaaggaatggtaccagctcctctttgtatttctggtagaattcaactgtgaatttgtctggtcctggactttttttggttggtaggctattaattactgcctcaatttcagagcttgttattggtctatttagggattcagcttcttcctggtttagtctagttagggtatatgcatctaggaatttatccattttgtctggattttctagtttatttgcatagaggtgtttatagtattctctgatggtagtttgtatttctgtggggtcagtggtgatatctcctttatcactttttatcgtgtctctttgattcttctctccctttttctttattagtccagctagccatctatttgttcattttttcaataacccagctcctggatttgttgattttttggagggttttttgtgtctcagtctccttcaattcttctctgatcttagttattttttgtcttctgctagcttttggattagtttgctcttgcctcttctagctcttttaattgtgatgttagggcgtcgatttgagatctttctggctttctaatgtgggcatttagtgctataaatttccctcttaacactgctctagctgtgtcccagagatgctggtacattgtctctttgttctcactggtttcaaagaactttttgatttctgccttaatttcattatgtacccaggagtcattcaggagcaagttattcaatttccatgaaattatgtgattttgagtgatttcttaatcctgaattctaatttgattgcactgtggtctgagagactgctatgatttcagttcttttgcatttgctgaggagtgttttacttccaattatgtggtcgattttagaataagcgccatgtggcactgagaagaatgtatattctgttgatttggagttgagagttccatagacatctacgaggtccacttggtccagagctgagttcaagtcctgaatgtccttgttaattttctgtcttgttgatctaatactgatagtggggtgttaaagtctcccactgttattgtgtgggagtctaagtctctttgtaggtctctaagaacttgctttatgaatcttggtgctgctgtattggttgcttatatattcagaatagttagctcttcttgttgaattcttccctttatcattatgtaatgcccttctttgtcttttttgatctttgttggtttaaagtctgttttatcagagacgaggattgcaacccctgctttttttttttttttttgctttccatctgcttggtatattttcctgcatccctttatttcgagtctgtgtgtgtctttgtgtgtaagatgggtctcttgaatacagcacactgatgagtctttactccttatccagtttgccagtctgtgtcttttaattgggggcatttagcccatttacatataaagttagtattgttatgtgtgaatttggtcctgtcatcatgatgctatctggttattttgcacactagttgatgcagttgcttcatagtgtcattggtctttatattttggtgtttttttgcagtggctggtaccggtttttcctttccatatttagtgcttcttttgggagctcttgcagggcagagctctgcagtttatctggtggtaacaaaatccctcagcatttgcttgtgtggaaaggattttatttctcctttgcttatgaagcttagtttggctggatgtgaaattttgggttgaaaattcttttctttaagaatgttgaatattgattctttctcttctagcttgtagagtttatgctgttagtctgatgggcttccctttgtgggtgacctggcctttctctctggctgttcttaacagtttttccttcattttgaccttggagaatttgatgattatgtgtcttgcggttgatcttcttgtggagtatcttaatggtgttctctgtatttcccgaatttacatgttggcccgtcttgctaggttggggaagttctcctgggtaaatatcctgaagtgagatttccagcttgtttccattctccccatccccttctggtactccaggcaatcgtaggttcggtcattttatgaagtctcatatttcttggaggctttgttcattctttttcattcttttttctctattcttgtctgcataccttatttcattaatgtggtcttcaaactctgatatcctttcttctgcttggtcgattcagctgttgatacttgtgtttgcttcacgaagatctcatgctgtgtttttcagctccgtcaggtcatttatgttcctctctaaacttgttattctagttagcagttcctctcaccttttatcaaggttcttagcttctttgcattgggttagaacatgctcctttagctcagtgtagttttttattacccatctgctgaagcctactcctgtcaatttgtccatctgatcttctgtccagttctgtgcccttgatggagagacactgtgatcatttggaggagatgaggcactctggccttttgggttttcagcattttttcgttgattctttctcatctttgtgagtttgtctagtttcggtctttgaggctgctgacccttagttggggttttttttgggggactttttgttgttgatgttgttgtcgctttctgcctgtttgtttttcttgcaatagtcaggtccctgttctgtagggctgctgcagtttgctgggggttcacttcaggccctattcaactgattcactcccatgcctagagatgtcactcatggaggctggagagcagcaaagatgggtgcctcctgcttcttctggaacctctgacctttaggtgcaccaacctgatgccagcaggatctgtcctttatagggtatctgataacccctgttggagggtcccacccagttgggtggcatggggagcaggacccgcttaatgaagcactttgtcccttggtggagagggtgtcttttgctgggggagaacccacttgtctgggctaagggttggtgggggctgaggtcaccaaatgaaggggccctacttttgcttgaatggggaccctgggctaagatctaggtgagctccagtatatgtgagaattgcctgtctcctggggagctccccaagccagagaccccatcattcctgggttgaaaaccactatcctagggtaaaggacagcaagagagtcggtgctgggaccattcagaccaatgtgggtaacctctgctgtcaggaaccacaagtatccggctgcatcaggcttctgggagtgactgcaatttgaaatccaaagcatcttactgtcttctttgaagaaatacacatgtaggaggccgaatgaggtataaggttgagggtccatgacagtgtctctgtgaagaatccaaaagccagggcaacaccaaactgtggtgattcatggtgacccacagccttacaaatctgatttattcaaaggtgtgatatagaaaagtttaggcttatatacataatgcacgtttattatagaaaaatttggaaaatatagaacactgctgcaaagaaatcgccacgtgtgcatcaccagctccattcagtttctgttcttcgtgtggttgatactactgtaccctacctgccatttgaggtcccctgggaagggcaggcccattcagggaggcccagggccctgggtgagttctcagggcatgggaagctgtgtggcaggtgcccgcgtggtgtttgtgccgttgtccatgctgggcaggatgcagactgcagtgtggcttgaatcctgcctcaccacttacggggaggattcaatgaattcatggaaggcagggtcttagaatagtgcctggcacgtgggcagtacttaataaatgttagcgatgctattgagttttcttctcatggtcactgctgggtctgctctgccttctccggaactcttgatgtaatttaatcagctcacagcacttctggggtaagagcctgctgcgtgccacatgccgtcacaggagccgggagtgcggccgtgaccaggaccagcaggtgctgcacacgcacacctgaccccatccgcacacaagtgggatggacagtggagctgtgattcagatgatgcaggaccatggtctggggcagcaccacccagggcgacagtgccagcccgggtgtgatttaaagtgtccctgtagccgtggtaaggaagtagcaagcaacaggtgagatgagttttagtaatacattttattaatataatatataaactatatcaccataacacgttataaattcagtatataatagatataaaaactgtcaatgagataacttacactcagttttctgtactaagcctagagtgtgtttcctacttagagcgtctctcagctggaccactttttgggtgtcctgtagcttccgtggctcgaggctcctgtgttggacggtgcaggggtgaagaaggggctgcttatgaaggtgatttggatggtcattctgatggggtgacagtgaagcgtagacccaaaggatgagaggagatagccacctgatgatttgggggcacataaccctctaaggaggggtgtgtggggatgagcttggtgtgcatgtggtccttctccaagaaggccgctgtggctgcagtgaagtgaaggtggagcttggaggcgagcgaggagggaggggaatcagagctgcatcctgcaggcccctgagggcggtggaaggaggtcacattccatgctagttgtggtggaaagccagtggaaggtttgagctggggctggcgcgattcgacttaggctttcagaaagatccctgtggcttttctgtggaggtaggaagaccagttaggagggtggtggctggagtcggtggaggtggaggaggtgatgagaagtctggggtttgagggggtgtattttaaagctgtggggaggaggcttgttgagggactgggtgtgaaggatgagggaaggagggccatcaggagtggctgttgaggatggggcaacttggagaggagcagatttggggagaaaagagacggaatttggcttgggacatgtaaagcctgaggtgccctgagccatcagtcagggtgtcaagtgggcagctggacacaggtgtgtctgtagtgatctgtagccgaggcagatgccaggatggggacgtggggtgtggatgctggagttacattgagacctggcctgcccagcattctttttcatgtgctgatctgcttgggtcaatacatttttaattctgcaaagaagggtggtgcctgtgttttcccttaacgcaaggcatttgcgtgtgcagcaggcgtcagtggagttttggagtgtcagggataatgtaatagttatgtaataacttaaaatcgatgactaaacatccacgttccccccagagaaattccttttgccaccaggaatttcttagaggtgcctttttcttcctgggggtctgaaccccgccgtgcccatgcctgtgctgtgtttcctctctgcaggggcccagctcccctcaccagcacaggggacccgcaatggctctgcctttggaatctgcccgtctccctttaccaggagatgcagagaactttgttctctcccttcatatgaattatataatacccacttgccaaaaaagattacagtgaattgttttttttcttttgagacagagtctcactctatcacccgggctggagtgcagtggcacgatctcagctcactgcaaacgctgcctcccaggttcaagcgattcttgtgcctcagcctcccaagtagctgggattacaagcatacaccaccatgcctggctaatttttgtctttttagtagagacggggttttgccatgttggccaggctggtctcgaatttctggccttaagtgatccacccgctttggcctccccaaagtgctgggattacaggtatgaaccaccacacccagcctaaactgaattgttttaaataaaaattgccctcacatattgcatatgtaatatgaaaaaacgtttttcaaacagaagttcacctgggtgatgagacactgtggtggtcttctttttttttttttttgaaacggagtcttgctctgtcgcccaggctggagtacagtggcgccatctcggcttactgcaagctccatctcccgggttcacgccattctcctgcctcagcctcccgagtagctgggactgcaggtgcccaccaccacgcctggctaattttttgtatttttagtgagatggggtttcaccgtgttagccatgatggtctcgatctcctgacctcgtgatccgcccaccttggcctcccaaagtgctgggattataggcgtgagccaccacacccagctggtggtcttcttttaacgctaaactgtggccctttgtgtgactggatgttcttctgcaagccgacattcggtaccaatgtggggttccattgtttggctgggccacactttcctggccgcccctgttctccatttgtttcttccaagtttttcccattaaacactgcctcagatatcttagtactcacatcttagctctcatctctggttattttcttgggataattactcaatgtaaaattattgtttccaaagatatgcctatttttaagacttgatcaagttttcttttttcacatcttatgggccatctgtgtttctgctgtcaatttcctgagcggatttttcgctgatggttttgtcttgtcctagtgtgtttgggagagggcttttcgtgtcctggtgtcctggaaggtggatgggatgcaggtggagcttgggcacccagggctcctgtgaggctcagcagggccagcctgggtggaagcgaggtcccggagactgtcccggagcttgcttgagtgctatggtcctacaaagtgaagtgttgtacccattttagagatgaggacatgagtttcagaggggtgactggacaatcccatagcacccacgcagcagagtcaggatttgaacctgggcagacgcttgccccatccagagtgaaacttgtggacgctgtgcaggacggttcctggcttgcagtcagcactcagatagctgttgaatgaatacacgaaaacgtaaatctggttttagtttccgtttttttttttttgaaagacagattagctcactgtaaaatctgtttttcttcctttgccaggaagccatcaacagagactctttcctctatcctgttgtagagttgattgacagggttctttgtgcctggaaagcaaattatgttaaaattatcttcacgacctatttataagtgccacgattcctcagcactctttggttataatctgtgtcctcaggtgagtggggtctcccgggtcccatggcgccccctgcctgttcaggtcaggcttctaacttaccttggagagtgctctgcccgccgtcaccacgcgatggtgttgtgacctcacgtggggcaagtcatgcaggccgagtcggcgttcctgagctcccatgcagcgaatgcatcacctcgggagaaaactgtgttcaatgtcctcttaatgacgttggcattttcaccatcggtgcagcttgtgtttctaaaacatgactacctcacccacattgcctatccctaaggcatttcagccacccagagccccttcggaatctgctttcctttctcacggacttaccttttgaacatgcgtgtaccaaatggtattttataagtcgtagtcttctcgtatcaaaacgagtcctggccgccagcagaacgtctgatcagcctaggtgatcggcctgcccagagagagctgctgtcatttccacttgaggatgcgtgtgggcttggtcactttgtgcagcctggtggtgtgagtgaggtctcagccttaggtgggcttctgaagggtgacctatgactcctctcttctctgagagtacctgggtggagcgtactggggtcccaggatgatggatgatgggccactttctactggggcgggcagtgaagacttcatctggaggtgcttgtcttatccgcagggactgtctgtctcaaccacgtgagcagcgttaaggccgctctgcagctctttgtgcggatatatggcatgggtgctcccctttgtgctccccaccctaacacaatctcaagtgttgttaggcctgtgcgtcgtgcagtgtaatttccccacaaggtgtcactgcagattattcccaggactttcacgccccagggacttccgtgtgccattgactaagattagaagcatcttgaggccagggggctgctccacactcccgtgccttccaacacagcagaggttctggtgcagcgtcaggactccagtgggatttttcttttgtatttgagagaatggatggaggtgggatacatttgctcagcatgatttctcacccacggattaataaatatatgtaagtgtgataaagttaaaaaatggaggcctcataattctgcaggaagaaagacaaaggaattaaagattgaaaaggcaagaagcctttgaagcagcctgttgtcctcttagttgttcacattctggttctaacaacatgtccacttgaagaactacctgggccactgcgagatgtttgtcactgtgagatgtttgtctgttgcatttctctacccactcccacggcctgtcctggagttcacactctccctgtctctggcctgggccgctttgggagtctcccgtctggcccaagggcgtccagcttacctcttcctgcccgtctcccacaggagatcttgttagaggccagtctgcttacctgagcttctgctttcagatccttggttagcctcctgcatggagctcagagtccagactcctcagcctgggacaggaggccacacctctcaccacctcccacttaggccttctcccaccctcctgtctctgtttggactgttctctgccacccactgtcactctagccacatgggctcatctctgctcttcaggtgagctgtgcacatgtgcacacacagatacacgccctcacgttgagcgctcatttcctttgtgcctggtgctgttcttagtacctcatgggtcttatttcatacttgaaacgacctacatggcaggttctatattgtctgtttcagatgagctagaggcactgatacagtaaacaaagtccttaaggtcacacactctccaatgtcacaggtctgggatgagagcccagatgtgtcccccaccccctccacatttctgctggtggtcaggggtgggggtttccctgcttcgcttctgtgcattctccaagtgtcggatcaaatagcacctcctctttgtggctcttttttctttgactcttctctctgtccttacaaaattaattgtgcagtaatcaaacgcattgtttcatagttacttgtggcctgggctgtgagccctcagggtaggggtgcatcttattcatcttcaggttccgtggttcagggcacatattacgtaggtacctggtgaaattaggtaatgtttgggatgtcttgaaaatgtatgttgtggaactcacccccttcatggcctggtgagtaggggtttgtgagggatggtcctgttgttgcttctctcttcctgtgctccctgatgctcctgaagtcacctctgcttttgctgctgattagagacagaactcttctaaccgacttactagcacggagagaatacatctgcttcacattgctgccaagttaatactgcatctgggaaggccagagaaaaaccaagttaagagaatcttactgcataatttatgaaagactgagtcataaaataagcatttacagtggcctgtttgcccaaggtagggaatgctaatgcagctattattcatcccgatggggccagcggcgtttctatgcctccaaaaggtcttctggctcttagttgcctccatggatttctgaggttatctctagcctttgtttccaaaattggctcttttcctgtttgggggccggaggtttggagttcagtgccgcgtgaaacaattttgtaggaactgtgtgtgttgatatttctaaacaatggaggtcgtaaagaaaaaaatcccaagacaccagattcagtgccagctcagtactaggcaccatgaaaggagcaggggtacacagggaaatgagactggctttgttcccaaggcgctgtgctcggcgagagacagaatgtctgcctggtgctgtgagcgcagagccctgggtggggaaaggatctgaagtggagacatttcccagttgctgatggtacagcagggctggaagggtgtggagctgggcataggtattgtgggcatcaggcgtgccgcacccaaggcgggaatgcatggggacgctgaggcgagtgactggaggcaggctggcatggtggatggtctgctttctgaaggcttgtggttgccaggcctgagagtgactgctcatcgtatgtgacttctctccactcacactacttcccatcacccttcgagcccctggagggtagggccctattctcaataaatgacagatcagtgattgcagtgtttccagcagccctcagatctcccagggctagaaatcgcagggcgtcatgttgcatgtaggctgcaagctgtgagcagctctgtgtgtgtcctcattccagccctggctggaaagtgcagtctgtctgggaccgctcccatggcacagagcagaagcaaagggctggtggaaggtcccagtgcctctttgagctttgccaggacagtgtgtgtcacatcactttccgtgggccagctgatggcacaaggccaagcccaacatcaatgggcaggaatgtataatccttttacagggaagtgaatcttcaagaacagtgatacaggctgctactcagagcacttgaaggatttgaatctgggaagtaatgtgatcctatttataatttttagaaagttcattctggtgcaagtggcctggaaaagtgcagatagattcagggtcagcgtaggtgggaaatacatttatagctgcctgtgccgagcgggctctgggcagagggtcaagctgttggagtggggatgctgaagaaagaaaagctttaagaggtatctccgaggaagatggagtcagagaatctagtgactggtggtgtgagggagcctcagggtcccagtgagtcatgctgggcattggagtcacggtggatgacagtgacctcatctaagaggacacgagaggaagagcagattgggcaggccgaaggcatttgatgttggccactgggtcctggcaccatgagaatggaggtgttggtggacgaaatcacccagtgggctcttgtcaggcaggagcagagagcatggacagagcccacccctgacatttccataggagggaggatgctgacgtggaggacctcctgtgtgtctgacattgttgcaggagtctctgtagagtctcctgttggatttccagcaactctccagagtagattctctttaccactgtttcgtttaacggttgtgggaaccgaggcccacagaggtcaagatacctgctccaaggtcatccagcagatgagcctgaacctgcagtaactcccggactcggagcacaagcacgtggcttgtgtgttccttctcaagtaggaccactcctggtgtcctttggttcaagatcatatctagtatataatgaaattttgttttatgcagtttttcaagtgagttcacacccatggtctgattgaaaaagtaattagtattcctattagagcttaccaaacaatcccctgatacgtgagcatccacagaggaacagagcagcactgtgtttgtgatctttgatttatagctgcctgtgcccagcgggctctggcagaaggctataaataaaattaaaataaatggaaacaatgcacctataaattgggttgcaggaacctccaattaccttttagaggaaatccccaataaaatgctgtttggcaatccgtttgaaagagaaggagcgatagatcatcgtggcgaagtcaggaaagtgaaggacaggatacaatgttggaatgtttcaaatattaaaattagctgattccagtgaattgctgtttggtgttatcaatgttggaaggtcctttcccccctcattattattgtatctttccaagtgggataaaagccatcagttgcaagtgcaggattttagggaggcaagtcagtatttctcttattccttttgttttttgagtcaacttctcggcttcatgttctggaaaatggtgggggcccagcaagaggctgggtttgggcaggatgtctggcctgattttgcccttgtatctgagagacagtccatgcatcatggcagggaagggccaaactggagaccaggtggccatggggcagatccagagcgggagctgtgggcctgtgtgtggggaagtcacgttgtctctctttagaaatcttgttatgcccttcttaattgtgtcccagaaagttatgatttatggaaaagagtacgttttcttttaaaatatgttggctggggccgggcgcagtggctcacgcctgtaatcccagcactttgagaggctgaagtgagtggatcacgaggtcaggagttcgagacaagcctggccaacatggtgaaaccctgtctctactaaaaatataaaaagctgggtgtggtggcgggcacctgtaatcccagctactcaggaggctgaggcaggagaatcgcttgaaacagaaaggcagaggttgcagtgagccgagatcgcgccactgcactccagcctgggcaacaagagcgaaactctgtctcaaaaaagaaaaataaataaaatatgttgtccacataaaatattttaataaaaatatgtaaaatacatttattcttattctgtggaaataaatgataattatttggctgatgtttggatatctggtgctaacaagccactgaagtcattggccagcgacattctcactggtcagactttggccagcaggcactggaatgcgctttctgtcacctggcttccacttggctctgtggaatgtgaggaagaagggatagaacagggacagggaagggcggatggtgtccatccccagctaagctgcatggggattcctcttggagactgaacatgagtgtcagcagaagcctgtagagcacaaagcatgtatgcattctgaggccctgtccgcctgggcagctccaggaagaggcaaggttagatctctcctgactaggaggcccagcctcaattaaagctgtgatttgaaactttcaggttagtgggaagatacatatgagttaatctctttctatttaagtcttaattttatatatgtgatgactaggcagtgtttagaatctttgtttgctgtgtgtcaatgcactaatgtgacttttaacttattggaccatacttataggaagcttaagttgtttggactgaaggttatagctcaggccctattataaacctacttgaattgtaggtgggggatgctcaattagaccagctcatggtaactgctaagctacctgtcaccacttgagggcctttcaagatcggcagttagaaaccagcatggccggccggctccttgcattgcaggcacagtggcttctcctgagtcccacggcacattcttctactgggctcaagctgccttgcctgaagggctttgtgctactgtccctgtccttaaggtcttcatgactcgtgggggtgataagactcaagccagcaactgagaaaggacgaatattcaaaggaagggaggaacacatctggctggagtgatcaggaacatttttaaaggagaaggtgacaactgagcagaggagcttggtcttgaagaaatggagagatgggataatattccagaagaagcaatggagtaaagttgtgaaggtggttccagagcagtgaaaggtctagtttccctggagccttgtctttgggtaaaactgcaactgcatgccagcctactgatacctgagtgctgataaacaaaggcgtttttgtgggttgaagcaaccataggccagggtgcaaggacttgtcaggagagaggaattgggtttttgttcccatttggtctctctgccagatgccttaacattttaaaagtcttttctttccattttctttttctttttttctagaattcttattcttctcaacacttttattcgtagcattttcttatttaaattgtatttggaccctctatatccctagcctctgaagtagactcaaccccagccaaaaggagcaggtgcaaagctcaaatcctgattaagaggaatgaatacagactgctgggttgactaaaatagggaagagactcaagggtataaggaaataccagaataaaaaagcacactgtggcaaatgatgtcagaaagatggtgaaataggagttttcagccctcatcccccccagcagtaatactgattttgacaaatgcccacaggtgagagtacccctgtggagcacaggagtacaagtgcagaggtcttagcagtcttgttggagaaaatcactcaagaatagacacactgaagagggtaagaagaagagtttcacttatccataacacccctccctgaaggcagcatagctcagtgccaactcccttggttcttgatttctctcaaaagggaaggtgagagcatagtgaacacccagtgaccccagccatgtgggatgctctccagcaggcccactcctttctcatccctttcagaacactgagtggatcagcatgactgaatagtttgggagcaactaagagcaaggaaaaggggctgggactgtcagtagtcagggcatggaactcaacaaagggctacagtttctactaactgccttgtggacttcactaagaggctagtccacaaatttcataggatctgtttgctgcagacacccccacctagcccacatatgcctccagcattctgtatgcctcccttccttggcagctggcacaactgcacccctgtagacagcacgtgagcctctgcagattgtgtacaagcagacacagacagctggcttgactttcctatattgagagaaagaacttaaccttagacacttctgagcactgccctaaggaaaaataaatggaagcttcgtgacacctggcctggctttgtgggattgagataaggtatagaatcctaagacttacccccaaatagggaacaagaggagtggagtgggtacattaataggaaaggtctgagaggctcccagaattcctagtcaggctgattggaagatctttctcttctgaagccagtcagtaaagactggggaaagtgactgttacttcaaatgcaaagacagcaatgcaagacttaacatgaaaagtcagggaaacatgacctgacgaaaagaacattataacttttcagtaactgatcccaaacagatggagatctacaaatttcctgacaaagaatttaagacaattgagaaaacagacaactcaacaaaatcaggtaaataatatatgaacaaaaatgggaagttcaacaaagagagaaatcataaaaaagaaccaaacaaattctggagctgaagaatacaaagactgaactatgaaatgcaattgagagctttaacaacagactctaacaagccgaagaatcagtaggctcaaagacaggtcatttgaaattacccaattagaaaataaaaaagcatgagaaagagagaagaaagtctgtaggatttatggaacaacattaagcaaagccatatacgcattatgtgaatttcagagggagaaaagagagaaaggggcagaaagcttctttaaagaaataagaacaaaaaatgtcttaaatctggggagagaaatagccagactcaagaagcccatgggaccccaaacagattgaatgtgaaaaagtctatactgaaacacaatataattaaactgtcaaaagtcaaagacaaacagaatttggaaagcagcaacagaaaagcaacttgtcatatacaagagaatgtcctaagactatcaatggatttctcaacataaactttgtatgtcaggagtgaatgggctgatatattcaaagtaatgcaaggaaaaaaaaaacctgccgactaagaatacaatacccagcaaagctgtcctaatgagggcaagagtttcccagacgaaagtggtggagattcattactgctagacctgctttaaaagaactatgaaagggagttaaatttgaaatgaaaggatgttaattagtaacatgaaaacctatgaaagtataatactcactggcaaaagtaagtatgtagtcaaattcagaatacctcaatattgtaatgatggtgtgtaaatcacagttaacgccagtataaaagttaaacaccaaaaatattaaaataactgtagctacaacatttagttaatggatatacaaagatgtaaattaattatggtatcaatagcaaaatgtgcatgtgtgtatttgtaagagagagaactaaaagtataaagtttttgtgtgcgattgatgttaagttgttatcagcctaaaatagatggttagcactatgcattttgtaacactattctaagcctcatggtaaccacaaagaaaaaacatacagtcgatatggaaaatataaagagaaaagaatcaaagcatgctattacaaaaaaaaaatcatcacaacagaagacggcaagagaggaggaaagaaacaaaagagctataaaacaattgcaaaacaacaacctggccatagttaagtccttaccaatcggtaattactttaagtgtaaatggattaaattatccaatcagaagacaaagagtgactgaatagattaaaaaaacaagatccaacaatatactgcctataagtgactcactttagttttagtgacacataggctgaaagtgaagggatagaaaaagatatcccacaccaatgataacaaaagagagcaggggtgactatctttatatcaggcaaaatagacattaagttaaaaactgtcacaagaggttgggtgcagtggctcatgcctataattccagtgctttgggaggctgaggtgggaggattgcttgaggctaggagtttgagaccagcctgggcaacatagggagatcttgtctcctaaaaaaaaaaaaaaaaattagcggggcatggtggcacgtgcctgtagtcctaggtgcatatttgatgttaacgtgaactatgatcacacccctgggttccaccctgggggacagagcaagaccctgtctcaagaaacaaaaaaagtgtcacaagagacaagggcattgtataatgatgaaggggtcagttcatcaagaagatataacaattgtgaatatatgtgtatccaacattggagaacctcaatatataaagcatatattaacagaatttaaggaagaaatagcaatacaataataataagggatttcagtactgcactttcaaaaatggatcaatcatccagacagaaaatcagtaaggaaacagcagacttgaataacaatatggaccaaatggacctaacaagatatagacagaccattccatccaacagctgtagaatgcacattcttctcaagtcataaggagcattctccagattagatcatttattggaccacaaaacaagtcttaacaaatttaagaggattgaaataatatcaagaatcttgatatcacacaatggtgtgatactagaaataaaaggaagaaagttcacaaatacgtgaacaagacacccctaaactaccagtgggtcaaagaggaaattaaagggaaataaaaagaaatcttgaggcaaatgaaaatggaaatacagcataccaacacttctcagatacagcaaaagtagttttaagaggaaagtttatagtgataagtgccttgttaagaaaaaagattgcaggcagggctcagtggctcacgcctgtaatcccagcactttgggaggtcgaggcagtggatcacgaggtcaggagttcaagaccagcctggccaagatggtgaaaccccatctttattaaaaatacaaaaattagccaggtgtggtgttgggtgcctgtaatcccacctactcgggaggctgaggcagagaattgcttgaacctgggaggcggaggttgcagtgagccaagattgcgccactgcactctagcctgggagatagagtgagactccgtctcaagaaaaaaaagttgcaaataaacagcccaacttctacacttgaaggaactagaaaaagaagaacaaacgaagttcaaagttagcaggagacagaaaacagtaaagattagaacaagtaaatgaaatagagagtagaaaaacaacagacgagattaaaaagaacctaagagttggttttttaaggagataaaattgacaaacctttagctagactaagaaaaaagaagactcaaatgcaatcataaatgaggaaatattgataaattcctagaaacatatagcataccaaaagtgaattatgaagaaatagaaaatttgaacaaaccaataatgaaaaggagattgaatcagtaatcggatacatcccaacgaggaaaagctcaggaccagatggcttcactggtgaattctaccaaatacttaaagaagaatgaatgtcagttcttctcaaagtctttccaaaaattgaagtggagggaacacttcccagctgtattatgaggatatattataccctgatttaaaagccagacaaggacattacaagaaaagaaaattacaggccagtattcctgatgaacatagatgcaaaagctctcatcaaaatactagcaaactgaattcaacagcacactgaaaggttcagacactgtgattaattgggatttatcgctgggatgcaaggatggttctacacacacaagtcaataaatatgtatcacattaatagaatgaaggagaaaaattatatcatctcaatagatgcagaaaaatcatttgacaaaattcaacatcttttcttgataaaactttcaataaatcaggtatagaaggaatgtacatcaacataaaaaggccgtatatgacaatcccatagcttaagatcttacaaatgcctttcctctaagatcaggaagaggacagggatgccttcccagccagagcaattagacagtaaaaagaaataaaaggcattcaaatcaaaaaggaaaaataaaattgtgtgcagttcgcatgatcttatacgtagataaccctaaggactccaccaaaaaactgttggaactaatatacaaattcagtgaagtggcaggatacaaaaatcaacatgcaaagatcagttgtgtttctatacactaacaacaactctccaagaaacttaagaaagccccatttacaatagaatcaaaaagaatgaaatatgatactttggtgtgaatgtaaccaaggcggtgaaggattcttcttcttttttttttttttttgagacggagtctcgctctgtcacccaggctggagtgcagtggcgtgatctcggcttactgcaacctggaggtgaaggattcttacactgaatactttaacagttggtaaaaggaaataaagaagacacaaataaatggaaatatatcccatgtgtatgaatgggaaaaattaatattgttaaaatgtccacactatgtaaagtgatctacacataggacaatctctatcaaaattccaatgacatgttttgcaaaaagaagaaaaacaatcctaaaattcatatagacccacaaaatatcccaaatagccaaagtagtcttgagcaagaagaatgaagccggagccaccccacttattgatttcaaaatatgttacaaaactagattatcaaaacagtatgatattggcataaaaactgacatatagaccaatggaatgtaaagtagagagctcagaaataaatccatgcatttgtggtcaactgatctttgacaaaggtgccaagaacgcacaatagggaaaagggtagtcttttcaataagtttgttgggaaaagtagatattcccatacatgagaatgaaattcgacccttaactcacggcatatacaaaagtcaacttaaaatggattaaatacttaaaggtaagaattgaaactgtaaaactactggaagaaaacatagggaaaaagcttcttgacattgttctgctcagtgcctttttagatatgacaccaaaaacataaaacataagcaaaaatagacaaatgggattgcatcaaattaaaaagcttctgcacagcaaaggaaataatcatcagagtgaagagacaacctatggattataagaaaatatttgcaaactatacatctgatatggggtaaatgtctgaaatatataaagagctcaaacaactcaacagcaaaaatgaaaaccaaacaaactaaataacctgatgaaaaagtgggcaaaggacctgaatagacatttctcaaaagaagacatacagattatcaataggtatatgaaaaggggctcaacatcactaatcagagaaatgcaaataaaaatcacaacgagttatcatttcacacctgctagtatggctcttaccaaaaaaacaaatgaggctgggtggtggctcacgcctgtaatcccagcactttgggagcctgaggcaggtggatcacgaggtcagaagtttgagaccagcctggccaacatagtgaaaccctgtctctactaaaaatacaaaaattagctgggcatggtagtgtgcgcctgtagtcccagctacttgggaggctgaggcaggagaatggcttgaacccagaaggcggaggttgcagtgagccgagattgcgccactgtactccagcctgggtggcagagcgagactctgtctacaaaaaaaaaaaaaagacaaatgataacaagcattcgtgagaatttgtagaaaggggaacctttttacaccattggtgggaatgtaaattgatatagcctttatggaaaacggtatggagggtcctcaaaaaatttaacacagaactgtcagatgatccagcaatcccacttctgggtatatatccaaaggaaatgaagtcagtgcctcgtagaggatatttgtaccttcgtgttcattgcagcattattctcaatagccaagacatggaaacaacccaagtattcaccgatgaatgaatgagtaatgaaaatgggtgtgtgtgtgtgtgtgtgtgtgtgtgagagagagagagagagagaaagagagagagagaaaatgggattgccatggccttaatgatccccagaatggatgtgttgaaatgtaatcagcaatgtgatagtattcaaaggtggggcctataggaggtgatgtgattcatgaaggtggagccctcatggatgaggttagggcccttagaaagaggcctgaggaagtgggttcactctcttctgctatttggccatgtgaggacatgacatttgtcccttttggccgttccgccatgtgaggacacagcaagagggccgttgtcagacacctaacctgccagcaccttgatcttagactttcaccctccagaatcgtgagaaaaaattttctgttctttataaattatccagtctcaggtattttgttttaacagtactaatggagtgagacagtgatattattcacccttaaaaaagaaggtaaccctgtcatttacagcaacatggatgagcctgggtgacattatcctacatggaattagccagacccagaagatattcatcatcttccttatatgtggaatccaaaaaaattgccttcctggaagtagagagtagaatggtggttatcaggaactggagggctgcaaagtggggagatgtgagccagagagtataaactttcgtttatacgatgaatcagttctagggatctcatgtacagcatgatgactatagttaacagtactgtatggtatacttggaatttgttaagaaagtaggttttaagtgttcttaccacacacgcacacaaggtaactgtaacatgtgaggtgaaggatataattaacttgattttggtagtaatttcacaatgtctacgtaaatctgaatcccatgttgaacatcttatttgcataccatttttactttttggttacatctgttaagctggaaaaaaattgcatccagatattcctggtatccctaataataacattctgtattattatttggcccatccaacatgaaacaaggatagatgggtttgtaagttacaggtataggtatttttgctgcaacttaaaaacttttccttaatttaaaacaggcaccatcaattttgcattctttggtaaaggcatgaagaacccagagctgaaataacaagctgctttctttggggccatttgaatgatagggacaactaagatgtgggatctcattcggccaaaagccatataggctgagcagtcatgggtttgggtctctatgggatctaagacttggaatttatttttaacattttatttgaaacttttcaaacatggagaaaagctgaaagacttgtcatggccatccattgaggccaccatatagagtatgttaggtctcctccatctctctttctgtctctgtctgtccatccatcattccgtctcttctttttggatgcatctcaaagtaagttgtagatatcagttctccccgtaaacacttgagtatgcatgtcattaacttgatttagggttttcgtggaggtaatatttacaccatgaaatgtacaaacctgcagcacaaaaatcagtgggatgagttttaacaaatgcatgacctgtgcagcgcgatctccgatcaaactgtagaacatcagccttactgcagaacgttctccagggccctttggcagtgcacacactgtgtagccacgcccagcgggcagcttcgggagatgagttggggagggagggctttggcgccctgacaggtagggatgttccagagctgctgttgcgtgcccagggcatgccttgacagcatcacagttgaatggagcagtgtctgggtgacatcgatgagaagggagctgaaggaggtgctgcggcccatgttcatgaggagatggaaggagtgcagaatggcagggctgggatcctgatgtaccctgggacttggctgtctctgagtgtctgcagtgcctcgagcacactgtgcgtacctgaggcagttggtgggaaatggatttagttccatgcgttcagctgggtggccggatttcagggcatcatttgtgaaatgacccactgtaatgtggtggttcaaggggaggcactgagccagttctgctgctcgcctttagctcagggtcctcatctgtcaagtgggaatcacttgcttctgttgttacgagcattcggtgtactaatacagtaatacaaaccaccacctgcacagagcagcgctcagtcaagtcagctgttgttgttgtcgttgatttttatgataataactcccctgcagagataaaacagccacgggtatacagtggctgcccggccggtgctgcagcagctcttcctcctgggatgccaggggattgagactcggctttattctgaagctgtcccaaatatgaatcattcactgttattaagccacctcagcatgccccctttgttatctgggcccaaaagagcacagagtgtggcccccagtacattttgggtgacgcctttacacccatccagcaagttggggctgggagtgggtatcacgcgttctgtagatgacgtctgtagacttctggggtttttcaatagaggggccatattgtttatcatctgttttgggggtaaacggggcactcttaacagtttaagaggggcaggtgagcggtgaactgggtaaactgagatgtatgatatcctagttccctggggtgaaggaggccaagcttttctgttaatgaaaataaactgcatctcattcacagcggattgacctgtgagcgtaaacacagcctggggagtagcacccggcagcaccctgtgttctcacatcatcgggaaggacagctgccttccattcatcatgctggcagatgccgttggctgtgctggggccagaaagcatttgggatggggtcaggacatctcaaggcagatagatgtttgtggggttgttcggtcttgagggtcacacggtctctgtcttcttggctgtcatttgcaaaggagtacaagcttgggctggactggccagccagccttcctgtgggtgtaaacatgtgggtaaggcatgctagatgctgggcgtgggcactctggtccaagcacattcttatcaagccgttctaagcattccaagtaggagtctcattgagaagcatccccgtctgtggtcttgccatgccacggtgcccatgtccagcagtcactgagtacaccgttaactgctgtgtagaccgtgaactattccactgcgtgctgcttccttctcttcttactctcctctttggagaagtttataagcttagttgcatttagttataaagcatctgggcagccctgtctccctctgattgtaccccctgtgggcattcattaagcacctcctctgtgccaggcagtgtagccaccagcataaagctagtgactgagtgtgtgccagatgtctgtgtggttgagtcgtcagcttgacgtggtgggacagaagtgagtttgcaggagactgggtataaggatggggagagcttatgggtgggtagaggagcacagcacagccagagtgaaccaggcagaggtggggccgagtgattcctgggaagggttgggctgagctggatgcttccatctgggtcccccgtggggtctggagcagtcacttacccagttgtaatgaagccctcctgctcacttgcaggcatcatagcagttgacggtctgagcacagtgaggctggcctggacgtctgagcggggtcatcccaggcccaggggtcctactgggctcttaagtggagagtggtaggagactgttgggttggagatgctgcgccctccttcatgccagcaagtattgcctgggtggtctcaaaagtcctgtgccatagtcagatttggtttctaggacttctccaactctggaattctctggagaagggagtcctgtctgtgcctggagtccagtgggccctggtgtttcttggtcataccctggcgtccagtgactgtagtctttgattcctgcattatctgcaggcggttgcctgtgccaggagaaggccattttggtgagacgaggaatgtctttgttgatccgtggaggaaagaacgtaacagtgggatattgagattgttaatcaattgttttaggataaatacccaactttctctcctcttagctgattagattccatctttctctgtgcttgagacgtaaggacgtctgtgcttgggcacaaggttgtatctgacgttattttcagtcttctacatggatcctgaataagtcttttgttccatggagaagattaagggcagtatttggttggaaaatttttaatgaagcacctaacagagctattattattcatttctgaaacaacttgctgcggttaccgtagtaatattaagccttttattaaatatttttcctttcggttttgaggtaagttttcattaaatgctgatgggggagctggagatccacgaacctggtgtctggaaagaattttctagctctgctgagttaaatcattcaaggaatttatgttatgggaacataaagcttataaatctagtttatcatatctatcatttaattgttcatgcaagccagctcttcatgtagcgatttacagtaatctcagtgaaataacagtgttgtgtcccaaaatgaataatgcatgccaagaaattgttgagctccttaaaatcattatgctcaaaatattaggctcttttatttgaaagtgatagaatgatgatcatgtactagttgcaagctggggacttcagagtctgtcgttcctgctttgcgttgggtcgccagccctcaggaaggaaccgcggcgagccgattccaggaggaggatacgccttgctgcagtcggcccgcaggagcagccggggagctggcaacagccagggctctgtgggagggctgggatgttggcttaggggtaaaaaaattctgtgtttaaaagatgagatgctttttagacatccatctgtctgggacaagaaatgggtatcttgccattagtattgttgccaggcagaaaccatggagtttatcacaatgcatctggaaggcagcaatgtgccgagtgctttttctcccctctcctgttactcatctatctcaacagcacacatataccatgatgtggttttaaataatgaggcaaacaggcaatagctgttgtgatctttcaatgagaatggtttagtgagttggatttgttgctagcagcactgatccatttgtatgtatgtttgtcagtgggcgtggcgacatcgcttactcacctatgctttccgtctttgaagagctaccctgcaagcagtgttgaggtcagaggagacagttcactgtgggctgtggggtgcttaagtgtgggaggaagggtgacttcttttccagaagagggaaaggctctgctcctcgggaaatggacggagttttccccaatgggaatatcatcaatcattgtcatcaggcctgggccacctttaccatctctcacacttaaaaaacaaaaaaaactgtgttataaaaaatttcaaacatgcacaaagatcgagagaacagtgcagtgaagcaacacacctatcagccagattcggcgggtatcaagatacgccaccagcctctcatcttcacccggattcggcgggtatcaagatatgccaccagcctctcatcttcacccggattcggcgggtatcaagatatgccaccagcctctcatctgtcccattcttttctttttctttttcttttccttctcctttgctggagtatttcaaagcaaaccccagacatcctgtcatttcccctttctgtacgtcagtatacattccacaaaaaacaaaacaactcctgcggttttcagaacccggtgctggtgccgtcgagagactgtttaggcgggtgtccccttctgtggaatctcgcgtggggttcagcagtccagggccgggccttggaggccatcagccttccttatcggctgtgcaactaatgatctttggtcaattgggactggactgaggactctgcagtgtggaaaaccagttctgcggtgacctctccctcatttttggagaccccaggtgggcctaacctggaggcatttggtatgttttgtgccattagtttgacatttagattcccacataggagaaatagtgtagaagagattgccaccatgggagacctgggaggcaggaggcctggcctcaggtgtcctggagagttgtaaaggccagaatacaccttttcggaggagcagaagtcacctagccagtgctggtttacatatctaccagtatctgccctagacgtacccagtaggtcctaaggcatgaaggttggcctggtttatgttatgtgtcattttcctcacttctgtttgtcaagaacattttctgcacgttgagaatgatcattgttacgcattctgctgcttctctgcctttcttctatcccttctcttcacacgctcctcctgccccactgtgtggacgtgtctgtaggaaaatgtggggtgtgttgggttttcctgttggtctaagtcatgcctgccaggtctgttgatgatgtctgaggtctgtgtttttctcaggttaggacttttgagtcctttcttacaaagggctttatgtacaaaacaaccctgtagtagaggcacccaggcttgttggtcctctgtgtttggagaggagtgccccactcattccagggagggaaaatggggtttgaaatgaaaaagtttccattgtaaatggacacttttatgtaaaacatctaaaaacatgtagaggaccagttctgatggcacctagagaaatagtcaaggtaccctagtgggtgtgtgtgtgtgtgtgtgtgtgtgtgtgtgtgcgcgcgcgcacgcgctctacacagtaaatacccggagggaagactgcaaacacttcttgagcagcagatattctttctgggtgacattccttcttagaagggaggggttgggaaactattaaatagttgggagagtgatctaagttagttggatgatggctttgtgataggaagtttttgctcattaagagcggctttaaagcttttaatttttatatacttctgcctgtaactttccccactccctccaaaaaaatggtatcgcggaggcggtgtcagaagagccccagaagtattctagtggaactcaggtcgtcctccacccttgcgggcataaatctcatgctagaagctttccttcagggacccgagagaacagggaaggagtgcttgctgttggaaggcagtggagagccagctagaggtgattctaggctcatgaactagtctatgactaactgcagtgagtttttaaagcaggttgtataagaagtttaagtgatgcctcatcgaggctctgatttcagagcagcctgtatggttctctaagccgagggagagacctggcgcaacagggagtcgaccaaccgtttgcagcccctctgtcagtgccttagacaggaatccaggtaggctctctctggtacaaatgttattgcctttttcttggtaacaagggctttttggttggcattgctgagtctgtatgatgatgtttatgctgttactgtatattacttttttatggcatactatttctgttgcaaatagtcataaatattgttacagttttgagtgcattatgacacgttgctctaagtagtctcacgtacactttgggttgcagggctgagcaatttgtatttttcctttggtgtttctttgagtgtgtttcagcccaccgtaatagcacctcactgcttcaccatgcagttttttttttttttaaactcctatgacatttcattgctggtagggacctcatggggacccttaaccagtgcaccctctcctccctgtccccagtctctgtttgagccattttgtgatacatggttcacagatcaccctcagatcctggattcaccacttagtagctagttacaatacttaaccccatctgtctggagtggctatctcacaatttgtgtgacgctctaggcagagggcgtggttgtggccattattattctgatgctggacaattctttcttctgtggcaatgctgtctgcctgcaggttgtccccgttgacctggccctggctgctggagtggatgcctccgtccaagtgggtctccagacggcagattgctctgtgggtgacctgccatcactcaggcagccctagcctgccctcaaggccctctgccaactgcattcctcctggacacctttttgtctctcagtgtttctctgtgaaattctagaactgattagtggaggcctcagatcccattacctcccaggacagcttccacgcactgtggtcctcactgaacctgctgttgactaagacacagtctctgtcatctttattagagaacagctaagtcaagtcacctgtcctgggctggacaggtgactcagattcatctgtctttttactctcatcccagcctgcaaggattgctgggagaggctgggcagtgggcagcaggcaaagggacacctggaaatgtgggtcacacaacccggttcatttattgtctctgtttttctctgatggagtgatcttggattggttgtgcagcttttggggagtcttcagatataaaagttgcaacgacaaaatgaggtgccggatacaagtgtcagctctgccgtgctccgtgactgtcgcctggtcccgtagtttctctcattcggttatgattgctctttctatgatgtgtggctggtggattgccgaacatgccttctttgtcttcactttagttcttgttagttatgtatttagccaggttggtttagatgaacttgggtaaatgacagctggtgatgatattttagtttagttatggttgctacctggggaacatttggaggaagttagctgcccctggaacagctcctgcatttgtggagacatagcccttctttcctgggtgtgcatctgtgcagcagctcgactgcatgcctgctgtgtgctggagtgcatggtggatgcaggcaggggccacatgttcctggagcttacaggtcagcagagatggagacgagtgctgaggggcacgcaggagggcctcttctctgccctgtctctcaggagacaggctgctgtgtgccgtggggttgtgggtgcctttgaggtaccctgtgaaatgtctcatttcctggcattgtcatgcacctgatgccagcatggtggctgtgtgtgtgtgcgtgtgcgcatgtgtgcattagaaattcacacttgcaaatgtggtatgcagaactcttttgggaaggtttaaaactagatccaaaatcttgggaaataactattatcccattctaaaaatgttccagttgtacccactaggatgattataataaaaaagaccaaaaagaaaaaaaagacagggattaacaaatgtttgcaaggctgtggagaaatcagaactcttatacgctgctggtgagaatgtacggtgacgcagctggtgtggaaaagagcctgaaggttcctcaaacagttcaacatagagctgccatgtgaagagctgccatgtgacccagcagttggactcctaggtatgtatattcccgagagaaatgaaaacccatgtccacatacagacttgtacatgaatgtttatagcagcattttccataatagccaaaaaaggggaaacaattcagtatctttcacaggtgaatggataaagaaaaatagtctctccagacagtggaatattacttggtcataaaaaggaataaatggatgaaccttgaatgcattatgttaagtgaaataaatcacagaaccccacatattgtatgactcctatttatatgaaatgtgcaaaataggcaaatccatagagacggaaagtggaatggtagttgtggggctgaggagtgacagtgaacaggcacgtggttcctgtatggggtgatggaaatgtcggtggtaagggtcgcacaggtctgcatatactggaaaccactgagtcccacatgttaaatttgatggtatgtgaattatgtctcaataaaaaaattcaaaacatacctgttggctttgccgtgggatgtccctaaggtgatctggaagaggctctgccctcaaagaggtttcagtctgttggagaggtgaggaatagtagtagaccacgagacacagctgaacaggttcgactttcaccgtattcctacctgacatcacctccagggttcaaacccgggctggggcaggcatggctctcaggtcacagagcccctcctgctgctgcactcatctctagagaccccttccagcgggagaggctccccagagcttggtgcctgagtgcctgtgcccgagagcctgctggtgccggcctggcccaggccctgaggcaggaggccctcgatggtttgagaaggcactgacccagtttgtttgaaacggtttgccttggcgctcttgcctggtcctggctgttctgcccggttaaggacagagtgcgaggagtcctgggagctctcctctgtggcctgtgtgagccatcaggattcaatgcagtgattagaattcctcatcttatcttcagatggggagagatgccactgggagaagaatcagaaatggaatttcagaggtacttagtgacctccatagctctttgttgactgtggttggcagggctaggaaggggtacacggctcagcatacagtggcagttgggttttaggctcttaacaggggtgtgctctttctgtctttctgccatgaatgtcatgttggtcaaagtagggcacattaagaggcaggggtcatgagctggtggcagcaagccagtggcaggctcctcacagcccctggctttgttgtgcatttgggtttgatgaagacaggaggcttttccttggacaaactgggcctagaagatgcttcgtgggcactgtggtggggctcaggggcgccgcaggcagctgtacagctctggtggtttctgggagtcagccgtctttcccaggcgtgctgcagctgctcagctatttggggggatgtcgtgggcatcacagtggccttgtatctgtgtaagcccttgctggcctgtccttctcaaagtgaatgagggaaatacagaagaaagggtgccttgaagctctttggaggctccctcccatcccagggcctcccggcttcccggcccgcagagaactttagcacctcccctcttccagaaccccagggtggcggctgctgctgcgtgtgcccccctgtctgtggtctggcctgtttcttcagcgacaccattcacatgctgatcccttggtacacgttcccttgaggctgagcacaagcttatgagacttacggaatcttccctctgtatttgggatcctgataacgtttgtccgaatctcagtggcgtgaggtccttgttttctcaggggtggacgaatctgcctctggagacatcatactgggttgaaggcttgttcttggttccagctccacgaggcctctgcctttgctccacttcactcacctgacttctttcttgacccctttgaccatcagtgcccagccttttcctcacatcagactcctgctgaatctattgactcctgtctctctgctcctgcttgagcctccgtctgagctccgtccatctcgccttgtgtaaagttggctgtttcctggctgcatcgcgagctcctctagggagagctgcgctttgctcatctccctgtgcgcagaccctgcccgtcctggagttccatgtcactggcgttttctgcatctctgccgactgaggtccgttccgtttcttgcatgaagagcctggtttgggtcccctggcgctcttgtgggactggacgacagtccattgcctgcacactgtgacctccaatgctgcttctgttgggagcacgattcctttgcagcccttcctgctgaggggacactttggaggccttttaagaccaggagcttagcaggcagttgtctatggagagatgggggcctgagaggatgacggggcctttgctgagcatccgtgtgtgtttccaaagcatttgcccctctctgccttcatcctcggctctgcctcccctcgtccatcctttcatgctccatcagcaccccagcctggtcatatttctcacctgctgtggtggggcaggggtgacagaggcacctctaggatctgagcagaaccttgggaacgttgaaagcaggcgagaggcatgaagccgcctccttcaggatgttctactcaaccgtaccgtggaaggatgggcgcaggaaatcttgaacatttgaaaaaaatgtcctttacgtgagggtaggccccacgcctggctctgtgcccacgtggctggccttgactctttcgggggcttcctccagcctccaatagaggatcagcgtgagggagtgagggcttcacgtcagctgctgtgagggatgacgtgagatacgggtgttcttaaagtgctgtttcccttaaaatctggtttttacttacttcgctgaaactggtcaccaaagacaccacatttgcctcattgtacttgagagcggaacaggaacggagaaattaattaattcagttttatagatgaagaaggggagcctgaagaggttcattgttcaacagatacttactgagcactcactcgaggcagggcctcgtcctctgggccctggagactcagcagtgagcacgtggctggtcggagtgatgggcacagagctgggcgcaggcagttttggaaagcacatgagactcttttctgcctcagggatcactttctcagccatgccgcatgacctcagaggcattttgcaccaatggacacttcgtgaaaaattttttcccagggttctgtgacattttgccccgatttcccccgctgtctccgagtgtcccctgtgagtggactctttctccttcacacccatgtgcgtttctggacttcttgttttaaacacgctcttccttggttgggactctgcctgtctttccgcacctctgagcctcattgcccagtgtccgtgtcttccggaggtgcctactgcactgtcttgggattttgccctgtcagaaatgtgtcacgtgtgataggaaaatcatggacgtggttgagagtcaggcccctgagtttcctttcctcatttgtaaaatggggatgggaactgctctccaggatgacaaattgtcacgtggaaaccagtgcacggcgcagacactgctccacagtgtcgacatcccttctctccctccccttcccgttccctgctcctcctccactgaacaagccacccctctccacttcctgtttacatcatagatggcgccaatctctcctacccagggtaatgtttggtcattgtcattttggcctttctttttccccatatctagttattgctgaagcccacccccacctgttcttgttgtttccggatgttctcgcgctaattccttcagcctttcctttctgcctttgatgggtctgccctagatcagacctttatgatgtctgcccaggcattgaagtagcttcccagcaagtctccttgcttccctcttccccctgcgatgcattccaggtcctggcaggaggtgaatcacattgaaacgtggctttgacctctgcttttacagctccccgttgcttgcaggacaaagatcacactcctgatatttaatgcctttcttaatcggactcctaattacgtgttcatcctctgtttcatccagacataggaacctgctgatcccccggctcattgttaatctctgcctaatacttgtgaacagtaactattaaaatatatgataaaacatagaatactccaatgacacaatagatggcagggtgtagtagtcattataatagttaataataagtaacagccattaatatttttctttgcctggactgtgtctttccacccattttctatgggcccagtgctaccaggaagcctcctccacctgtgctacccaaagcacctacggcagagccctggacacaggttgatcagaggctgaggttgctgggaagtgctggtttatccctgctgtcctgggataattattacttgtgcccaaggtgtctgctttggatgatacaccatatggtccccttacctatacataatacagagtgtgaatggcaatccactgaaatctagcttacccagagcccttctttcttgcccatctcactagacaggtggagggttttgtattgttactttttgtgttctgtttaacaaaccttcctcagcacctcatctgtgcagtgataccaccaggagttaggaacacggggatgtgggaggtacagaccatgagcttgtggttggggttcagaggggcctggaaagaggtacagctcttgctggcatgaatgcaggaagggagtgattgtgccactgtggggtggaagtgaccttgtgcagcctgggagtcaaggtgggatccatgccgtccctttcacggagtagcagtgggctgctgggtagaaatccaggattgatggggttctagacagaagcgctctggggcaccagatccaggctcccgcaagataaagcaggcctgaccgtgccgtgtgggttgtgagccagccgggggggttgatggtcagttcttgactgtcacagggtctttcgttgccatccgagcctttcttctatgcttctgtgcgttttatttgaaattatatgtaggggactgtgggattatgttgctttgccttcgtaattacattgcatacttatctaaaattaattgagcttatcatggacaagactctctctagcctttctgtgtatccagcttcctgtctggtggatttctcagtcatgtgtgacatctaggcgtgtgctcgctggcctccggagccacagaaggaaagtggacagagggagtccctcggcagtgctgagaggctgcccctttcctctgcatgtcccctgaggtttgttccgggggcttctaaagggtgacaggtgtgggaatgatgagcctggggtacagcacgtgccagagaggtcttgtgatgccagggccctacccgaagtgtggatgtggtgaaaagctgtcttaggagcctctgcgtggctgccccattaatatttacgtagcgtagcatcagaacgattatgcttgctgaagccaatcttgttattgactctacctgttaagaaatggagtaacctgctgccaggtactgttaccagcaaaggctgctaacctcagaaggggtttgagctgagtcctgctgtatatgttttaatgctgaaagtataagaggctgactgagtccaactggaaagtaaaaatgtgaacttcaagcttctaatttgttgaaaggatttagatttttaacatgaaatagcagtagcctttcctttaattaaatgccatgcaacattggctgcgggatcaatgatattgaaggaaaaaaacagtgtaattagaccttgtgaagtgactaacaaatgattagggctctctttcaagagtgggggtgggggctggtaccagacgtgcagattagttgcagtttgcctttccttgctatagactttgaaaggccaaagttttcccttaaacattttgggtctgtttcttgatttcctgtcagcaacaaatggatatagctctaatttaatcacttccgtattattagacatttagatctttttttgatgtataaataatgctgtgatgacataaatatttgtttgcattttggataatttccttgggacagattcccagaaatgaaattactggctcagagggtgcaagcatttgaaatgaggttgggatgcgagctagaggcatctctccccatgaggtctagtcgtacaattgcctccagccctatttcttgcttgatgaagactggagtgttccctggaatgcctgtgtctcccatgtgtggggtgcccccatggaaggggtgccgtggtcatcattgggtcacagtgtcttcccaagcaggtttggtttgccctatgccaacctcaagccctcacagttaaaaacaaaaaacagaacaacacaaccacttacatcagtcctttgtgtggatttcttgttagcgtaaccaggcctggggtctctgggagagctctctttgctctgctgccatcttgccatccaagaagcactgtccagactgaaatctctgctgcccctgggtggggctggtcagccctcctcagccctgacccaaaagctgcacgtcaaagcccatcatcgctgtagtcccgcagcagagggcctctgtttctgagagctgcctttctgagaaggtagttggggttataaatgtccttaaaacatccttattctagactttttttagacatctttactgagatgtaattcacataccatacagttcaccatttaaagtgtacaattcagtggtttttagtgtgtttgcagaattgcttgactgtcatcacagtcaatttcagaacaatttcatcatctcacaaggaaatcctgtacccattagtagtcgttccccactcccccaatccttccccctgccccaggcaaccaggaatctgctttctgtctctgtggattcatataaatggaatcacacaatctgtggcctttgaaactggctcccgttccctcgcatggtgctgtcaaggctcatccgggttggagcacgcctgcttcattcttttttggccaaataagattccattgaatggatgtgctgtgttttattcatccactcttagtgaatggacatatggggtgtttccactttttgacagttatgcagactgctgctatggacattcatgcacacgtttttgcagtcgtgttttcctttctctcggggatatactgaggagtggcgctgctggctcacgtggtaactccatgttgagcatcgccaggagctgccagactttcctgcagctgccacagcattttaccttcccaccagcaatgcatgagggctctggtcttcccacatttaaacattgtcaccatccttctgtgatcccacatttaaacgttgttgccatcctcatgtgaaggggtatctcattgtggttttgagctcccggatggctcttaagtttgagaatcgtttcccatgcttattggctgtctgtatatcttctttgaagaaatgcctattcacatcctttgcctatttttaattgggttactcatctttttgttattgatatccaagactcttgacactcaatactgtctttttaagttggctgccatgaggaccgggctggaggcagccgacagcaggcaagccgccctgtgccggcaggctttgtttcttgtggcaaacaccccccccagctctgatccatgtgtatctcacggatgaccaagctgggccttagagctacgtttcatgtttatgatgaagtagtcgcgggaacgcatgccatccgtgttcctgcagaggcgcctgcaggcatttctgatgcttccccaccgattgtgggaggagacatctctcctgcagaagagcaggtggaccgagggggagcgctgagcgatacgctggcgggtgtgcttcgagcgcttcttgggagaggcggcctcaaccattccagatggaagggctaaggagagggaggacacccaccgctgagtagggtagaggagttattttcctaagaggatttgtttttccctctatgaattgggtgcgttcactgtggcaaattactaaaaataaaagaattctatgtgtgttgcacatgagtgttaaaactagcaaattcaaacaaaacaaaaatgatgagaaaaaaaagtcccacatgcccacgcgcagaccagaatccttttcgatagaggtctgtgtagtgctgtgccccttcccgggaccagaatccttttcgatagaggtccgcgcagtgctgtgccccttcccgggaccagaatccttttccatagaggtccgcgcagtgctgtgccccttcccgggaccagaatccttttccatagaggtccgcgcagtgctgtgccccttcccgggaccagaatcctttttgatagaggtccgcgcagtgccgtgccccttcccgggaccagaatccttttccatagaggtccgcgcagtgctgtgccccttcccggggccagaatccttttccataaaagtccgcgcagtgctgtgccccttcccgggaccagaatccttttttgatagaggtccgcgcagtgctgtgccccttcccgggaccagaatccttttccatagaggtccgcgcagtgctgtgccccttcccgggaccagaatccttttccatagaggtccgcgcagtgccgtgccccttcctgggaccagaatccttttccatagaggtccgcgcagtgctgtgccccttcccgggaccagaatccttttttgatagaggtccgcgcagtgccgtgccccttcccgggaccagaatccttttccatagaggtccgcgcagtgctgtgccccttcccggggccagaatccttttccatagaggtccgcgcagtgctgtgccccttcccgggaccagaatccttttttgatagaggtccgcgcagtgctgtgccccttcccgggaccagaatccttttccatagaggtccgtgcagtgctgtgccccttcccgggaccagaatccttttttgatagaggtccgcgcagtgccgtgccccttcccgggaccagaatccttttccatagaggtccgcgcagtgctgtgccccttcccggggccagaatccttttccatagaggtccgcgcagtgctgtgccccttcccgggaccagaatccttttccatagaggtccgcgcagtgccgtgccccttcctgggaccagaatccttttttgatagaggtccgcgcagtgctgtgccccttcccgggaccagaatccttttttgatagaggtccgcgcagtgctgtgccccttcccggaaccagaatccttttcgatagaggtctgtgcagtgctgtgccccttcctggctctggcgtggccagcgtcttctggcgacaggcgtcctggagactggctctgggaccactgaggagatcctgctgccaggcgggtctcctggagcagtgagcaggacaggtcctctcgggctcgagtgtaaattacacgagtgtttcctgtggtgttgagtgggggttacagggtgtgggacagagggagaaggtgcacatcagcttccacttcctttgggggaggctctgctcattctgagaagctcttttggcgaaggcatatttgaaaacagataataaattaatttttttttaaggcagggtctaagctctgttgccctggtcaatcttggctcactgtctctgcctcccgggttcaagccattctcctatctcagcctcccgagtagctgggactatgtgtgcaccactatgcctggggttaattttttatttttttgtagagatggagtttcgccctcttgcccaggttggtctcaaactcctggggtcaagtgatccaccgtgcctcggcttcccaaagtgctgggattataaacttaatttttagaattgtgttttatctcacgtaaaatgacttaacagttaattgtaggacagtttctagaataaaatgtgtctctattttaatttttcattccttttaaaacattcatcttttcaggttttcaaaatctaacaatgtggccagcgtctagcccaggtggcctctctgtgtgttttaccagtggcttgcaggtttctgtcctctgtgagcagctcaggtggccggagaccccagggggccctcccctttattcagaacttgcaggattgtgggagtagatggcctggcttctcttgtggttcttgaatttgtctctgaggacattgcatcctcagattctgtctctcactggggtggccacctgggccagcggtgcccatgttctactggccagaattgcgcacctcccaggagggggaggagggcggctgttgccctcactcatgtccccccgctcagaacccatgggcaaactcagaattgtgtatcccggccgcactggggctctgagcagtcgtcttggccatggctgacagtggggcaggaggtgggcttcctcagcccactctgcttctctctggctatgatcggtgttgacccagtttgactctgacttttcaccttgtcctaaggatcccatgagaacatgtctgtagaaggcacagagcacagtccctggccctgtttctcccttcctgtgcttccaggagggactgggcatgtggtgtcaggacagtgtactggggcctctgtatggcctccctggccttgtggcttcaggagggactggacatgtggtgtcaggacagcgtagtggggcctctgtatggcctccctggccttgtggcttcagacaagtgactgagctctcctgggcctcagtgatgacattcaggtgttaatgagtgagtgtgaagattgggtggaacgcggtatggaacctggcgcacagtaggtgctcagtgaatgtcagcttttgttccccagctccatgaggtcttctcgctcttagcaccccccaggtgactggccctcacgaagtgggtcctctgtagatctcgggtatgtgaagtcaacagtggcccaaggaggctgtgggcaggagaggcttgaatggttgcagatggaggtgctggtggtgcagttgggagtgagatgagatttggagattttctcttgccgtgagccttcctcagccccctcttgcttctgttctcagggcatgtatgcactctgtggcttgtccagagcctgcaaccttggttgaaaatggctcccgaggccattctcccagtgaagcacttgcttccactcactgctgttcagccccgggagccagccagcgagagcggggctgcgggaattggctgtttggagacagggtaggagggctgcaagctgagggtctgcaggggtgggtgtagggggtttcccatccaaggccgcagcccagaagggtggtggattgcctccctgtagccatagagaagcagagaggaggctgtggcagggcagaggccccaccctgggaggtgcagctgagaggccggatgctggggctttttggaatggagggggcttctgattctggggtgcaggactggggagcatgggaggaaaggggacagtctcttgaagaggcaccgtggacccgattttagaaatttctaaattaaaatttctgttttagaaattttgcctgtaggtagagtgtctctggtccgtgggcttccgaagcatcttgtccagatttctaccactgcagttgccatagtctgcgcagggtaagcgtggcatggctgccccagcaggagctgccctcctgggggagagagcaactctcacttctctttctgtggttgcactggtcatgggttaggtactcacaccaggtttatggagtgaaggcaacatgcgccccgtcctcccagggccttgagtctgatgggcacccatgacaagcagccaggaggtggctctccaggtggtcactctccaagacaatgagaggaggagctggaggcttcatggaggagatgatgttccaaggatgagcagggcttgcctcggaggaaagcgggaggggcaggagacatactggtatgccagtagtagattcggaatgtctcttctgatcaagtactgtattggtgacataggtggtgcatactaattcccaattgaccaagggacagaagccaccagagcagtgagctcagagccctgctctctttgatgccatttctttcaggctggctgggttctgactggtcaggataagttggtctatctggtatctcagcaactagtcacctctagtatttaaccttgtcatttgatgcactttcttggtcatcgtgcttatcccaattaggatttaattagagccccataatagggttttaaaagtgtattggaaaccaaaggggtcatgcgatatgattttacacaaaacaaaagcatttccgtcattcaggagcctcattcagtccccatgtctctgtcggcttttcccttaaaatgtccccttccctcagcccgggttgcacctgcttctggcctgcatagctttctcagatgctccccctccgtgaagaatgcctccctccattctcctgtctgccggcctcatggacatctcttatgtccagggacatagagccttctctgcgaggccttctctagctcagcatctagcattgtacagaggcctctcgagttgtccctgggcccactccttgtgtttattcactcaggtagctgtttgcctcctaggggttcagcacagcacatcgcctagtggagcatttgtccagcacctttcctgacattcctgatgcctccacgtgcatattccttcctatttgtaaccagaagctgcctgaaattacacatacacacaccccaactttcaaatagaagaagaagttaaagctagagaagttattttgaaaaactctgttatgttaatgatagcaattaagggtcacgaagcctagactcccataactcgagaaaagctgccaggcaacaagcatctgtggctctctcatggtcctgtagtggaagcagagacagagcagccactatcccttgctgcggtttgggctccagggtcctgcagaaagaacaccttccaaaaggctcatttaactctatcacatgatcagggaaaccagtttccctcctggctgtctgtggaagtgaaaccttgttgaaatctgccaaaggctggagaggaaaagaacaaacttatttctcaggcctcctgtactttgccctctgacattccgctttccacaaacagattggtgaggagcacacaattcagtagataaacgataacaatcatcttttggattggtggttttctcttgccccctattttcacctgagaagaaacacagcctttttcagaaagttaattattccattttgaaagcctgagggtgatgggggtgtagtatgtttctaggtgtacctgcactattttggggaccttatggagtgccagtggtgttcccgagggagtaccgtgggcagctcctggctggattgattcccacctctgttgcaggacagtgcccggcccataccaagttcatcctgtgtgttgagtgcagtggcgtgatcgaccgagtgagtgaggaactcaggcctagggatttgctggctcccatttgggctctgccatttctggttgctatgagcctcccatcactgtgcttgactttcatctcccaagtcacccagcaatacctgtggcatctgtccaaatactggtggtggtctcaccgaacccacaccaggtcatacctctgaaatctttgcctaacatccatctcccaacctccattggctcctcagcacctgtgtgtataaatccaggtggttggcacctgttcctggcatctctgcaggatccaggccctgccttcctctccagtcttatttcttgcaggcaccaccccccgctgcatctccaccctctggatgggtgcaccatactaagctcttgcagtgacgggcagatgttttattgttttacactctgtgcttctgtttgtgctgcttcctctctagctgcagtgtccttgacatataccttacttggttagttttaggtcagatatttattttacaaagtcatctatgtccctggttttaaaaatggagtagcgtaggttgagcatccataatccaaaaatctaaaatctgaaatgctccaaagtctgaaactttttgagcagtgatttgacaccacaggtagaaaattctacacctgatcttatgtgaaatcacatgtgaactcctaggtgcacaacacacagtttatcagtatccccaagggaaatgagacccttccagccccttcagctgtgatttgtcttgtctgcgcacatccagattcccctgcacaggcatgtccacagggggtaataagaccacacgtgtgcgttggacacaccaagggccggttcccccaatgcccccccatgggggaggcctgtgtgcattacttgctgtggctttttgcttactctttgttctggggcgtaaagatactattgaaaatgccaaaaaagacctgtagatacccctctgagtaacaatgataagaacaaggaggatttatgtttatctgtagcacagaaaagtcaggctgttggagaaactggactgtggtgtaagtgaaacatcttacagcagagtgtggtgttggaatgaccaccatatgggacctgaagaaacagaaggagaaaccgttgaagttctgtgccgaaattgatgaatagaagttaatgaaaaattaaaaaccagtgcataaagccaaaaaataaagatcttttaaaaatttttattttatctattttttgagatggagtctcactctgtcacccaggctgcagtgccgtggcgtaatcttgcctcaccgcaacctcctcctcctgggttcaagcgattctcctgcttcagcctcccaagtagctgggactacaggcgtgtgccaccatgctcagctaatttttgtattttagtagagatggagtttcaccatgttgggtcaggctggtctcaaactcctgacctcaagtgatcggcccaccgcagcctcccaaagtgctgggattacaggtgtgagccaccactcccgaccccaaaaatgaagatcttgattgggtattgagagagtgaatccatcagcatcacactgaacatccacttaatgatacacctgtcaagcggcaagcaaagctgtctctccatgaactaaaagttgaaaagaactgttactcttcaacaggctggttgcagaaatttaagaatagatatggcattacatttttaaaggtttgtgctgatcatgaagcggtggagaaattccttagtttgccaagatcatctctaatgagaagctgatgcctgaacaagtctatagtgctgatgaaccatcattgttttggtgttcttgccccagaaagacactgacgacagctgatgagacagcccttcaggaattcaggatcctaggacagaatcactgtgctgggctgtgctagtgcagcaggcatgcggaagcgttaacttgctgtgatccgcaagagcttgtatccttactgttttcaaggagtggatttcttaccagtcctttattatgctaacagaacggcatggatcaccaaggacatcttttctgattcccttcacaaacgttttgtatccgtggcttgggctcattgcagggaggctggactggatgatgactacaggatttgtcatttcatgacagctgttctgcttattctccagctgaaattctcaacaataataatgtttatgccatgcatttccccccagatgtgactttattaattcagctacgtgaccaagtatctgtagatcaatgaagaatagatatcaaaacactttcttgggcagcacgttagcagcagtgaacagaggtggcatgggtttggaaggttgcaaaagatgtttagcacgaaggatgctgtatatgctgctgccagtgcttggaacacagtgacaaaacaaacagctgtgcatgcctggcacaacctctggcacaacctctgggctgtgactctgtgttcagtgatgatgatgaaccaagtggtgactttgaaggattctgtgtgtcaaatgagacaaaaacgatgtctgacctccttacatatgtaaaaaatataccttcaaggtccatcagaaaactgggagaagtggatatcaaagaagccctccacatcgataaatgaggtaccagttgttaaccattggaagaagtggatatcaaagaagtcttccacatcgataaatgcattaccagttgttaaccatcagtagatgtggaaatagccaaaatggttttgagtccaggtaactgtgatgatagtgatgatgaagatgatgacgttaacactgtagaaaaagcatctatagatgacatggcgaaaatgtgcgacaggcttactgaaggactagggcagcatgcgatcacagcagggcaagaaatcacgtcaattgacaaaatcaaagagacacttaaaagacagaaactgttgctaataagcagatgactccagaggaaacatttaaaaaagccacccggcagaatgccttctcatccctagagcacccgcttcctggtccctcagctgcttctgatgtttcttctcactgagaaaacaaaaaccaaaaagcaaaaaacccacagtgtccaggaaccttttaatggaaacccagcactgtagatggagactggaagccgccattgtttgttgctgccgttgctttacagcgggtgcgggtgttctggggaggctgcggtgccgcttagctactctgaacgcagttttttcactgtattaatggtaggtcatattttttactgttaagtacgtatgtgggaataagtgtaagaaaatgattgcttattggtagcatgtaaatttagagtcaggaatgatgatgatgccagacaaccacagattgtcctcacgagtggctgagatagtgacaccttggcttttgggtggttcagtatacacacattttgtttcacgggcaaaattattttaaaaaggtatgaaatcaccttgaggctatatgtgtaaggtatatatgaaccataaatgaattttgtgtttagatttaggtctcatccccaagatatctcattatatatatgcaaatattctaaaatctggaaaaaaacccagaattcgaacacttgggatcccaagctttttggataagggagactcaaccggcagtataagatttgtactggaaagagtagtcctccgtccccacccttcctcatccctgccttccgtctctgaggtgaggctgtcattgtacctcttggctattgttgctggtacttgtcttgatatttctaaatactatgctaattttgcagatttttacagtttagccgtatttattaactttctactctgaagcagagggtttaactctcttaccatgcttcttcctcttctccttccccatcctctcagtttaatttttggtgacattgggattcattgtttgtgatgttgtaactctaactctggttcatgactgagtacctgtcacgtataacttgttttatcctagagttgttcatttgcggggtgaggtgggggagctcactgtgtgggtaggagtaggtggggggtgcccctgtgttctgctccaacacagccctttctgggggttctttgccctcagttggccgctccgtgttggcgtccccttgtcaggctgttatctgcgccgctccgctgcctcccactgctgtgtctgctgtccatccttcacatttctgctgacatttcttgtctgcctcctttacacccttgtccttgtttatgacattattcctttactgccctgttggtgagagttagggagtagtagagataaatctgtgctttgcttagtttcaagatggctctccagcagcagctcacggagaatctttcctgatgtccccttcttcagagaagagaccacccctcctctggtgactcactgtaccttgcattcctttctcccatagtcctggtgaacagtgatttcactggctagatttcttcttgttatttgacagtgagccccttgagggaaggaactgggtttaatcactcccttggaggctagttctgggcctggtccgtggtgagtgttgattggcacccgccaatgggatggattaatgtgtgggtggactcggtctggggagtgtctcagtggctttgcccagaggcagcttacacagggggcatgctcagcaagtgctggccacatggagttgatctgtgaggctcccctgtgtgtggctttaggaacaggacatatgcgtatttttgtagaacctctttatgctggtgacactcagcgtttagcctagaaccacatgtaagcctaagtgattgcagtgcacatgcatttcttactattgttcagtgtttcttccagattttattattacaaaaggttttaaaaatcataattaaaggcagttaataagaaatgaatcttaagaaaaaaagacgcttaaatgatgggttgatttttctgttattcttggcttttcagaaaaaaggttcttataattaggagttctttgcatacaccactttgtgacagatttctggttcagtctcaaatgtgatattttacatccaattagaatgaatgagtcccagttgctttatggtttgggttcacagagtgtgctgaataactgcatctgtcagcataacagaagcgtgctcttggatttgtacattatgtcacagttcaccaatgtttccccatgtattgtctctttgttccttgtaaaaattatgtgacttaagcaaggcaagtatttttatttgtcctgtgttttaggggaggaaactgaagagggagagcctccagatagtctttggccaagctggtccttgaacccaggtgcactgaacccacaaccagtgtttgttcctctaccctctgctctctgtctgctctctttagagttagtgcttggtaatttcctattgagaagtaaagctttcacagtgcagatgagcatgaaattgtgattttggtggtgttttcctgaaaatattccaaagtttcagttttcagaaaggaaatccactgttgtagaagaaatgctatttatttctcattcacttaatctcattcattttctacttatgtaagttttttgtacattttagttttctctcttagagcacttaggattttactgcctgactgtgtgaaaatatagagacagaaagctgaaaggaaagctgtcttagtctgtttcatgttgttctaacagaataccacagagtggataatctgtaagcaacagaaattccgtctctcccagtttcggaggcttggaggtctcgcatcaaggtgccggcatctggtgaaggcttgcttgctgtgtcatcacatggtcgaaggcaaagggcaaaacgggacaaaatctgtgtgctcacatgacagaggagcagaagagggcaaatctacttttgggagcccttttataatgaccttaatccagtcatgagggtggattactcatgacctaaacaccttcccacaaggccacctcccaacactgttgcactggggattaactttccaacacatgaatttttggaggggacaaaaacattcaaaccataacaaaagccagacacacatgttttaaacataaagacaggcagttgaaataaaagggtagaaaaatatatgtcatgcaagctctaatcacaagaaaacgaatttgcttatagttacatcaggaaaagtagacctcaagacaaagagttgtattagagacaaagaggaatatttcatgatgatgaaaggatcaattccttaagtagagagatgagtcctaaatgtgtatgtaccagctttacaatgcatgaagcaaacattgacagcaataaagagagaaataaacaagtttacaatcctaggcagaaaatttaacagccctccgtgagtaattgatacaacaggtaaattaaaatgttagtaaagtgtagaagattagaataacattatcaaccagtgggatctaattgatttataaaataccgcatctactaactgataatgcacgtccttttcaaggacatatggcacattcaccaagtagactgtatgttggccccaaaaagttatagtaaatatcagagggttgaaataccaccaaattcatctgaccaaatgctttaaattaaaaatccataacaacaagatacacagagaatcctcagatatttggaaatttacctgcatacttctaaacaacctatggatcaaataaatcacaaggaaagtttgaactgaatgataatgacaacaggtgtcaaaatttgtgtgatgcagctaaaacagtgcctggaggaaactttatacttttaaatgcctgtatgagaaaagaataaaggtttccaatccatattcaacgctctcattttaagaaactagaagaagaacaaaaaccgagtaaaagaagagaaacaatttaagggtgaaaaatcaataaactgaaaaatgggtaaacaagaaaagaatcactaaaatataaagtttttttgaagagacccttgaaaaacctctagttggactaatgaacagaaaaagagaaaaaacaagttaccaatatcagaaatgaaagaggagacatcactacagatcctacagacattaaaaaggtaataagggaatgttatttacaattttatgccaataaattcatgaaatggggatatttctagaaagacacgacttaaactaatacaagaagaaatggagacctttaatatccttatattgattaaaaaaattaaatttgttatacaagagccttcactcaaggaaaacatcaggaccagatggctttgtcggtgaactgtatcaaacatttaaagtctatcaaacatttaaagaagaaataatagcaatcttccaggatcactttcagaaaagagaggagtagtaaacacttctcattttttttaaggtaacataatcccgataccaaaatcttacaaagacattataagaaaagagaacctgagaccaatatttatgatgaatatagacaaaaaattctttaaaaatatattagcaaattgacttttgccttaacctatgaaggagtaactgccaaaggaattgctgtcctgttatcaacagctagaaaactggaccagatatgtgaaacaactgttttcagatgttggacaacaggcagtgcagggctgtgaccctgtgagataggagataagtaaggtgaactttataaggactcaatttgcaattgaatgcagttgccaagcagcagcataagtgggggaaccctaatgaaacaggcagctttgctgagtgtaggaattaggaaagagttttgaggaggccaaaacagaatcatatatggagcagagtgttggagaggagggaattgtatagggagagaaccccagatgtctgcaaagtcccatcaagtccttagctgagtattgatctgctcaggagtagggtgggattctatgagctggggaaagtcaccaaaaagcagtgagttgaataatcccaaatgcagtgggaatcgagtgttggagagacagcacctgcaggaacctggcgaatgagccatatgaacctggaagaaaccattcgtgtccctccagccctctctattgaataggatgagatcatgccagctgacaaaggagaagtttttacaagatccagttccagtatcacagtggcaataaattgatacttgggatatctggcattcaataaaaaagtaaccggtatgcaatggaacagaaaaatatgacccataatcagaagaaaaattagcaattagaaacagactcatgaatgaataataaaattttgaacaacccaataaaatatgggtaaaggatttcaacatacacctcacaaaaagtagagagatggccagtaaacacatgaaaatctcttcaatgctcaacatcattaatcatcataaaattgctatgtaaaatcacaatcagataccctttaacacgtactagaatggctaaaataaaaagactgacaacgctaaattttggccaagatgtggaacaattcaaatgttcatacattgctggtgggaagtgtaaaatggtgcaatcactttaaagacccttatggcagatttattttaattaattaatttacttatttatttttaaattcagggatacatgtgcaggatgtgcaggtttgttacctaggtaaaatgtgtcatgggggtttgttgtacagattctttcatcatccaggtattaggcccaggatccattagttacttttcctgatcctctccctcatcccatcctctgccctccagtaggcctcacaacatgtggtatttggtttcctgttcccgcgttagtttggtaaggataatgacctccagctccatccatgtcactgcaaaggacataatcttgttccttttttttttttttcttttgagacagagtctcgctctgtcaccaaggctggagaggtgcagtggcacgatctcagctcactacaagctccacctcccgggttcacaccagtcttctgcctcagcctcctgagtagctgggattacaggtgcccaccaccatgtgcagctaattttgttttgttttgtttttgtatttttagtagagacggggtttcactgtgttagccaggttggtctcaatctcctgacctcgtgatcggcctgcctcggcctcccaaagtgctgggattacaggcgtgagccaccgcgcctggccaatcttgtttctttttatggctgcatagtattccatggtgtatatgtatcacattttctttatggagtctctcattgatgggcatttaggttgattccatgtctttgctatagtgaatagtgctgcagtgaacataggtgcgcatgtgtctttgtaatagaacgatttatattattttgggtatatacccagtaatgagattgctgggtcaaatggtatttctgtctctaggtctttgaggaattgctacactgtcttccatgatgtttgatctaatttacactcccacagacagtgtaaaggtgttcctttttctccataacctcaccaccattaataatcacaattctgactgatatgagatggtatctcattgtggttttgatttgcatttccctaacgatcagtgatgttgagctttttttcatatgtttgtttggctacaggtatgtcttttttttttttttttttttttttttttttgagacaaagtcttactctgcacccaggctggaatgcagtggtgcagtcttggctcactgcagcctccacctcttgggttcaagtgattctcctgccttagcctcccaagtagctgggattacaggtgcatgccaccacgcctggctaatttttctatttttagtagagatgggatttcaccatgttgcccaggctggtctcgaattcctcacctcaaatgatctgcccgccttggcctcccaaagtgctaggattacaggcgtgagccactgcacctggccttttgaaaagtgtctgttcatgtcctttgccccctgtttaatggggttgtttttttcttgtaaatttaagttgcttatagatgctggatgtcagacctttgtcaggtgcatagattgcaaaggcagtttttaaataaagggagatgtacatctgccctatgacccagcagttccactccttcacacctgcctaggagaaatggagacatacacccacaaaatgtatatccacaagagcgttcatcgcagcctatttatggtaaaaatcagtgacacagaagtctaagaatgggtgaatgtgtaaacaagttgtggtatattcttagaatacttttactgcttgtaaagaatgaactactggtactggcaacatgtgtgactcttacaaacacattctgagcaaaataaataggacacaaaggatatatactgtctgtactgtttataggaattgcaagaacaggcaagtcccgtctatggtgatagataccagaaggcagttaactgggagtgggggccaagaacgactagaaaagggcaatagacatgttctgtgtcttgtctgaggtcagcaatactttttttttttcttttttttgagacagagtctcactcccacccagactgcggtgcagtggcgtgatctcggctcactgcagcctccgcctcccaggttcaagtgattctcctgtcttagcctccccagtagctgggactacaggcgccagccatgatgcttggctaatttttgtatttttagtagagatggggtttcaccatgttggccaggctagtcttgagctcctgacctcagtgatctacccaccttggcctcccaaagtgctgggattacaggtgtgagccactgcacctggcctagcaatatgcttattatatgtaaattatactttgatttcaaaatatcacgccccccaacaaacaaacaaatctctaaaggggaggaggaaaggatggagtattgtgtccagcacttaactggagacagacaaaaagccaagtggtggagtctgaccttcaggagcacatacattacttctaggagacaaggctggtgctcatgaccccccctgtcattggcgctcacagaagagataagtgagtgaggactgtagttgtcaggaaggcatcttagatgtggcaggtcttgcgatgggccctgagagctgcatggaatttgacaaatcggagattaaagtggcgacgtcacagaaactttgtagttttgtgggaacaccatagggcgtacagtggaacgtaagtcttctaccatccttgactccatcctgggatcccctccccagattctgcctgtgctttcagattctcgtatgtgcctacagaaataatcattgtatctacagattgttccctttttacttcataatttagataaacttacttcatatccgcacaaaaagacagacattcttttctatggcaacagtgtattctattacaaagacacatgtgcatacaaagacctagcaatgtcattactgggtatatacccaaaataatataaatcgttctattacagagaacatttttgaatgttcctgtatttggccatcttgcttatctcagaactctgtttcctgccattctctcgggtctgcctctgtctctgttggcgtcattcctcaggctggttgggtgcagatggttgcagcagttctgacccccacatctgaccctggtagctttcaggggaagaggagtgggttgcctccaggaacttcccaagagccgggtggagtgttctcagaagccctcagctgtctgtgctcagtggcttaagtaggcgcctaggcccattgctgactcagcctttggtgaggtgtgggctagctctgcggggctccaactaggcccacctgtgggttcagctgcctctgggctgactccccacccccagggctgctgcagggaagcatggttactttgcacagctgggattctgctagaaagatgtaccaaacacctatgaggatggtcatgtggcttccctgtcgaccccattcagcatgtgggtaaagctacaagatttcccgacgttgaaccatccctccttcattctttacctgtattattctttgaatatcccgctgctgtgctttgatctactaagattttattttggatctttttgtctgtattcagaagtgagatttgtctgtgctacaaaagtctttttaagaatggaagggacgtagtggacagaccctggtattgaaggttgcttagttcctgtgtaaccttggtcaagtcacttaacctctctgaggctctttcatatacaatagtgatcacagccctaagtaacacaagcttgttttgaggatcaaataagataatatgtatgaaagctctcttttaacaccaaagcttgagcagagtttgaggcttgtctcattatgtatattcaggatttttgaatttttgtgaatttcttccagtgaggagagaggttcagagaacattaacgaatgagtttcctctcagctttttctcgtaaaccataatcagaaaaccagagttatgccgagggagagacactgggaacatggtcggtaaacattacattattggtgttcagatatgaggttcctgcttttcataatatccttagggtactggggaagatttgatattttctgagattgctgtaaaatgcaagttattgctgcgactatcgcccaattattctgtacttattttacttagactttagtaattggaaaaagattagatgtcaggactttgtattttgttgattatattagcaaagtcttctctttaatcatttcttttattcccgttattaatcattagctccaagctgttaggaaaacaacctaatggtagattcctaacttaaaggaaagaaataattacttgagtttccatgggattggacaagtgttgctatacctagacattgaaatggattctcttgccatttggggcatgggagtgagacactcaaggagactcggaaggtcgatggaatgcagggcccacagccttacccctctgcctgatgcttgtccttccctgcccttggaggtgctggaccttgctccaggacccctctgcctctggccagcgcctccctactcgtgatttttttctacttgtaggtatttataaagcctcattgacttgtattagactaccttgaagactttgttgtctgtgtagaatatggccacatccttaattaatggtgtataaagacaagcttatctccgtgaaacaatttctttcaaaaccagtagtgagaaaaaccacatcatatatgtatgcttaaatagcatatagaaagttgagatggaagaaagaaaggaaaaccaattaacatgatcaggttggggaaaaagccttcaggagagagtggggggaagggagagaaggagtgggagggtgggagagggggagagaaggaggtgggagggaaggaggccagtgtactctggacttctctggttgaaggaggaagggatcatggggcctcacgtgttccagggtagctccaggattctgttgtaaacaggtaacctgtagcttggtttgaatagaatggtcacttaccttctctcagatattgaaatcaatcgtatctgaaatgttgatgatttagtttaatttgtttatggggctccttgcctcctaattaaacaggtggaatgtgttaaagcactggggaggtttgctaaccttttgcaaatcttgtttttccttgtctcttttttcatcaacagaggaattacggaggttgagctggtccggaatccctaagccagtgcgtccaatgacgtggaagctcctctcagtaagtcccaccgcaccgtccatcagcgcctccttcctgtgcacagggactgcaggcgtctggcctgagtagggcctgacagccacagcccacgggtttgccttggctttgttgcagtgataaaggcctttgctatggctaagctgacattttccattctttgcttaattttaagcttggtttgacaggactggcagaaaacaagaataggtaataattatgacaactatattttttcctcagattttattagaaaatctttctatgttccagcctgtgatatagaaaggtttcagcatagatggttgtttcaactccgaggagttgaaacagggaaatatgttttaaatttgtttcaaatatgctgaaaacaaggacatatgtttgaccaagtttttttttttttttttgtaagtattagtagcgctgttaggaaaagagaagaaatggatgagagaagtggtttgtgtttctgtgggtgagagaagtggtttgtgtttctgtggtggagtgtggagttctggctgccgcagctctggcgctcagctgccggtctggaagtccttggggaaaggttggggtaggcggtggtgacatcagcatgccctcgtacacttagctcaggcttgccgttggaagtgagtttggccctgcccaccatttcagaatggtttatagacagttttcttctcttttcctttttcattatttttggagctaagtcaatagggagctctaagtgtttactctaaactgggtctgacttttagtatttaagactctttctggctaatgagccttaataagtttgcagcttagtacctcgtaatcctaaatgcagacgcagctctgaacagcgaatatttattgattaaatattcttttgcaattaaaattagacttgctgccattgcttatgtttttgttttgtgcttttttattttaacctagttttccagtttatatccagttttctaaatgtcccctaagataggttgcagacttctcaggttggtttgtaggaagttatgatgaaaacaccgaattgccgttttctatttattaaggatgtgccgtgtctagggggaaagtctcatgtgagttattttatactgtgctttctcctctaattctcagcctctgcgggttgtggttccgcttccctaatgtgtgtagcacaggggttgatgtggacatggacactctggtttcagtagacagaggagcacaaggggaggtgacagccccactctgctggttgtggacaggagggcaggtgggcgtaggtggagtctgacccaggaaccccggcgaggcaagtgagagtgtgaacccaggagatctgagactggtctcagttgatttagaaagtttattttgccaaggttgagggcgcactggcgacgcagccttaggagatcctgacgacatgtgcccaaggtggtcggggcacagcttggttttatacacttagggagacatgagacatccatcagtacatgtaagaagtggcgagggagcttccaggtcacagataggtgatacacgaatggttacattcttttgagtttctgattagcctttccaaaggaggcaaatcaggtgtgcatctgtctcagtgagcagaggagtgactttgaataaaatgggaggcaggtttgccctaagcagtttctagcttgagttttttatagtgatcttgggggcccaagcattttccttcacaagagaaagcctgagcattctcagagcgttgacttatgaagggacaggcacgtgtagtcctttaaccatcatagcttgcaggggcctttgcttgggagacggagatgaattagacactagcctgccattaggaggaggtcgggtgctgcagacttgtggtgggacagtggtggtggaggccagactgcatgctataggatggacaggacacgagtatgaaccagggggtggaggagtaccacagcgtgggggcagtttagtacagagggtcagcttctgctaagaggggacttcacacctgggatctgcatggccatggcaggtggggaaggaggggagggtgtggagacttgcagtcacaagggatacggatgaacgtggtggttcttggccctctcagggcttggattgacagatgagtaggaaataaatgttagatcagggagcaaagcttgtcgttgcaaatgttgggtgctaagaaagggttcatgaggatgccaagtaaggcttcttggggaaggtggcatcttacgtggcatctcaaaagtgttgttagtgttctctctgctagtgggaagtggggaggccatgagagctggggcacacagtaggggtgggacaagcaggaacacaggctggggtagaggggcccaagaggagaccaggtgacagccgccctactgccatccctacccaccccattgcttgggttttattctgaaggagaaactgggagtggtgagcctgtgtttctggaagagtaaagccttgaaagagccgttggttggttcattcattcatccattcattcatccattggcatttattgagcactttgtgttttaggcactgtgtcgggtgctgggaaatagcaggcagggaagaagaccaagtcgtccccctggggcctgcagaacagatagtggaaggcctgcctttttctcttgccccctccaaccccgacagacctaggctacgtggagacggatcccattctctcaggatcttattcctgtgctcccagtgcactgctgccctgtgtctgtcccttactgagtgcttgccgtgcgtcagaccacgcattcagagattcttgtggacaggcgtgtggcaggcaactcagggaacaggctgttcttgcccagtgtctggctcgtaggagcagtgctggttgtaaggggaggctgctcttggcaggctcttgggaggggactagagctgggacaggaagaactgggaagggacaggtaagggagttgaggggccaaaggctacaggggtggagtaagaggactctggcagctagagtagggggcaagcgttggttctttttccgggaacaagtgctcactgtgcatttgccatgctccatgccctgtgttggtgagcactgatgccatccagctccccaggcagtcatgctgcaccatggctctgggccttctgtaagaggagagatctgggagcacagtgcacaatgcgagtcacccatccctgagtcagcatgtgctgctcacacatctgccctcagccaggccctctgcaggtgctggggttacaagaacctctgggacaatggtgggtactgggaactcagcagggaaggggtctccccaatcaaggatgcctctttatcattccctgaatcccaaggtttaaacctggcttcccattcaactctcctgggagcttttcccgatcctggtgtccgggcccacgaagcaaattggaatctctagggtggactcaggcatcagggtgttgactgactctagcatgctgtgaaccatgcagtccacagagtgcctaccctgcggctaggcaggggatgggaggcgagggtgtgggaggttcaggcctgccctcttcacctgtgggtttccattctggtcacatgtcattatcacctttggagctcaggaaatactgttacgtcggttcttgggggttctcacgtgtgcccagggctgaagacggctgctctaagacactcaggctccagtggggcaaggtggggcatacatgagccaactgggaagcaggtcattgaaagttatgcgctatgcccgccactgcaggcagcacacacctgggctgaggtaccagggcaggagagctggcctggggcgttggagggcctgcgttggaggagagaggctgagtgagactcgctgagagccatgagcgtgttgtctgggagggttcgggtgagcagggtaagatgggagggatttatcccagtctgtgagtccttccaggatccagaggttaacagttacgcccagaattgagaatttatcatttgtccagcttaaaaaggcagataaccaaagaggcagataaccaaagctgtgcttgaatgggaacctatttcagggtctggcaaacatcatgactctttttcattgtgtttatgatttgtcattaacatgattctagtagccttatttttaattgatgagtgggcagtgccacttcaatgaagaaggacgagaaacatgacttggcatttatgaaaaactaacatctagtctagaacataccattaagccactagtaatactacttaatgtttacattttatgcaagcagggtagtaactttttaaaaattactgctatacagaatcatatttctggctcttttttaaataagtatttcagaaacgtggcacaaaaactacttaaacattgaacatttgcattagtgagtctaatggttaaaaatgatgagtgaagctccagtattatctttgtttttgcagtttattgaggtaggtttgcataggaacacagtgggagggaacaatttgatttttgtgtcaccgggacaatttagatataagtatatgcatgcattgttttacatttatgatgagtgtttttatagcatgctaatacagcaattaagttttctgtagttctgtcatttaaaattcattgcatacttgaatgtatttcatttgcataatttctagtcttgcttaattattgaaaggcctcaacttgcatatgtgtgttttcctttagggatgggagtgtcaggagcacgtgtagggtttttattgcctgcattccgatgatgacgtgcttgccttttagaatttgtgtttcaagttaatttacattttggggagtgggaagtatttctgagagccctcttgcaagttcactatggattttttgttgccactgaatgcagttgatgtcaggctgcctacaccacggcctagctgatcacccctgctggcccacgctgccctgtgttgaaggctgggccccttcactggcacacaggccttctctcctggctgctgcacacagcttcacacccatcactggccaggctctgtttccggccttgcccctagccaacccggacacatttccctgtgtcctctgtgctccgtctctttctctccacctctgtcttctccactatcaaaaccaaacccagaagtgtatgcttggtcttacttgtcccaagtgagcacacgcatctttctccctgagtctcagggctgtggccacctttgggtctgacaggatctctgcacgtcgtgatcactcttgcactcagcgaggaaggactgaggttccgttgtggggcaaacagcgttccaagcccttggacgaacattccgccctcgtggacctcacattttggtgggagaagacaaacaatacaccgagaagtagatttgatgtgctgtggaatgtgaggagtgctgtaggaaaagggctgggatcagcttggtgggatggtgagggccgaggaggggaaggggctgttgaagtaggtgggtagcggtcagggtgggccgcactgaggaggtgactttgagcagggacttagaggagcaagggaggcagctaagcaggtgcctgggggtgcattcctgtctggttcattctgtggagagggcttacccgttccctcactgtgtttcccatcagggaatagtgcccaccagacacaggtgatgaagagggagaacagtaagtaacaggaagcagtgccgtgggctcctcccacagccggggaggtggagaccgagagagggtgctcttgtggaaaggcggctgctggccctgcacagactgagagcagcggccagcggctgtcctcgaaagggcagccagtcaacaccctgggcttggtggcccctgtggtctgtagcagctaatctctgccattgtggcccagagcagccacagggaatctgtataaaggaaaacacatagttgtgttcccataacactttatttacaaaaatgggtgggcaggattggctgatggtcagtttgctgacccctgatctagatgaaatgggtcctagcagaggaagagtaagttcagagaggggcactgaggcaggagaggtgtggcatttaaggaacatttaagcagcgaagtaaaagtgggaggggccatggtgagtgacgagtctcggcctcttggtcagagaggcaggaagggccaggcccgcaggagccgtcagcctaggcagggcctgggcttttatgctgggcatgattagaagcaattggaagtgttttcgggctggtggtgttaaaatgatgtgattgtcacagagtctctagagccagcgtgtggagaaaggaccgtggggtctttgtccacccactgatggacagtcacctgtgagcccggccagtcttcagcgtctctgtatccagggctgagcagcgggtgggagagtggctggggctgggtgaatgaatgttgttgttgtgtgtatctgtgggtggctcttagcatgcggatttgtccccaggtcttcggtgacttgggatcacatggctctcctgagcagtgtgggacctcaggttaggagctggggcttggcttgagtttgccttcgtgtccatgtgactctgggcacattaaccacgtttcctgagcctgtctcctcgtctgcagatagggacagtgacggccttctgtgattagtgggattaaagcagcactgtgtgaagcacggagcgtggtgaggacccagcccttccttagttcacctgcgggtatggcaattcgggggcaaagaaaaagaagtaatcttatgtaattgttattgccaagagacggacaggcttgaaataacaacaaggtgcagacgggtctggatgaagcctgtggctctgagacggttatctgtgaagctggcttgaacttgaagtagaagcttgtttcactcaggtctggctgtcactgcccccccttgtaattttatgccttcccatcactgtgggcagggctaggtacccaacagaaggagctctgcgcctggcaatccaccagcacatcccagtgaaagaggcctgattctggagatgctcaggtgggtcattaaataatcacccggaaggcaccgcagaaccacgcctggcacttctgtgcacactcggggctggttattctttttgttactgttagaatttttttttttttttttgaggcggagtctcactctgtcgcccaggctggagtgcagtggtgcgatcttggctcactgcacgctccgcctcccaggttcacgccattctcctaccacagcttcccgagtagctgggactacaggcgcctgccaccacgcctggctaattttttgtgtttttagtattttcaccgtgttagccaggatggtctcaatctcctgacctcgtgatctgcccgcctctgcctcccaaagtgctgggattacaggtgtgagccaccgcgcccggccagtcactgttagaattatgtgaatcaatacgctctttggaatactgctatttcctcattttatgggaaaacagaggccaggtgggaataatggccacacctttcctccatcacgaggactctgagtgtccctctcgagtgcatcttggcagctagactgttctgtgcccctctccagaatactgtaattcaccgagcgattgttttctggagagagtgttctcctctggggcacctcctcccattgggttggggatgcgtctgacacgcgtgtaaccaggccgttgtgacctgatgccctttctgccagggctacttggaaatcacgcatcgtgaaccttgaaggtatccggtattcctttgagctaaaagttcactgtaggaagtttacttcaggaagtaattgacattgttagctgatgtgtgtttgagaatactgggcaattagaaataatcaaaatactcacaaattggggaaaggtgacatagaaatgcgtatgatggaagccagtgtcaccttcaaaatggatgttttagagcacggttggcaaatgttttctgtaaaggcctagatagtaaatatttgagcctgtaggccatgtggtctcttgtagccactccactgtgctgcgacagggcaaaagcagccacacacagtacataaacagatgggccgtgccctgtccagcaaaattttatttacacaaataggtggtgggccgtagtttgctgattcctgttgtagaacaggacttaacaacagtgggaatatggccatgattttaaagggaaaggaccaatcataaactgggctacattaaagttaggaacttctcttcatcaaagacgtcattaatagagtgaaaaggcaagtcacagaaggaggctgttggcagcagggctcacgtgtggactatctggatatgaacacctgtgaatcagaaaggaggaggcagatggcctcatgggaagggactcaaacatctgtactcatacttcacagatgcagacacgcaatggcatccctttgtctcctgggaaattcagatgaaaatgaaatgtagcttaatagataccactgcaaagccatcagaatggctaatgtgaaaaggttccacagtatcaagtgttggcaaggatgtaggacattgggaatttgcatacacttctgacaggagtagagtcactttgaaaattctttagcaaagtctttcggaggtatgcaaacctagcaggcccactcccaggtatacacttaacagaaatgcatctcatgtactgtaaaagggagcttcaagaatctttaaagcaaaaactggaaacagcacaaatgtttgttagcagaatggatttcatacacagcagtgttatgcgacagtggaggaaggaactactgttacgcgttataacatgaattaattttcaagtgtaacactgaatgaaagcagccagacagaaaaaatgccacttaggaggggaggaggtaaggggcggtgaccgagaggcctgctaagacggtgatggtctggctttgacctgggtggtattgacggatgtgttcagtttgtgataatgcacacgattttggggtacacctttatctaagtatgctatacttcaataagcatttattaaaaagaagtttcagtggtgtgatcctaatgtgttaacatgagtgtgcctgagtgtaatttataatatggaatagatgacagtggaagcttaaggaggatggaaggaatgccagtgctcacacagctgaaaagatggggctagagtctggcttcatgctcgaggcctggcggctctctgagtcccgctctctttcaggtcagcttttctcagtggacctgtagcttgtgattctcccctcccatcagagggtggccgccgcaactccacactgtgcgcgttcactttcattcacagcagcagccaagaaaagccctggcttggctcctattcctgccttgggccatctctccacctccaaactgtcagtcatggtggctggaagatggcttagccgtgtagcttagcccagttaagacctgtcctgaaagaagaggcttcccatccggaccacaagggttgggcagagggtgacgtggctcccagagcagcttcagggctctgttcgagcaaggatgagtagatgtttggtggctaacacagtgatgtctactacagatggggaaacactttcaaaggctaaaagtgccatccgggatgtatttgttcattcagtcactcgttcatatgtgattcacccagtgaaagcttgtgtgcccgccatctggttggtaccatgagggcctggtcctgagtgaacttcctgctagatgctgctggagcgccaggtgaccagccccacctcgtgggagaagtgactactgaccaggagcccagtcagacttcatgggagaagtgaccactggagacacttgagggatgagaaagacatggccaggtacagcagtaagactgctaggaaaaaaacaaggagaaaagccttttctgtttttttgagacagagccttgctctgttgcccaggctggagtgcagtggcatgatcttggctcactgcaccttccctcccgggttcaagtgattctcctgcctcagcctcctgagtagttgggattacaggcatgtgccgccacatctggctaatttttgtatttttagtagagatggggtttcaccatgttggccaggctggtcttgaactcctgacatcgtgatctgcctgcctcggcctcccaaagtgctgggattacaggtgtgagctaccgcgtctgtccaaaaatctttttaaaataagatacaggaacactaattataaaagaaaaactatcaactggacttcatgaaactttaagaccttatctgtttgagacataaaagcaagccatagactggggagaggaatgacagtaaatacaaaggaaaaagagatttgtatctagagtgtgtacagagctcgtcaaactcagtgagaagacgacacacaacctgagtaaaagctgggccaaagatttgaacagatacttcaccaaagaagagatgcgatggccccacgaagagatgtttggtatcattaatcattatggaaacgaaattaaaaccacacccaactgcatggctgatagttagattcacagtactaagtgttggaaaggctgtgtagcatctggaattctcatacattgcttgtcggaatgtaaagtggagtaatttctttagaaaaagaggtgacatcttagaaaactaagcatatcccaatgttatggcccagtaactcgactcctaggtatttaaccatgaaaacccaaagcgtatgcccacgaaaatcctgtgcaggaatataacaaaccccaaaccggaaacgaccgaaatgctcatcgacaggcgaatctttaacaaactggtggatccgttcaacggacacagctagaaaaaggaaatcacagctgattcacgtaacttggatccgtctgggaaggtgctgtgctgctgagtgaaggaaaagcttgcacgatgtgtaggtcctgagtgactccatttctggggagtcctagggcagcctcagccatgcacagtgaggaggtgagcacctccccggccagggctgggatggactgcagaggatactgggaagtatacaggggcggggggatagaagtgtgtctgtatcttccttggagcaggagttacatagctggatgcccttgtcaaaagccaccaaactgattgcttaaaatgggtgcatcttattttataaattagaattggccatttatatctgggggttttgcatctgcagattcaaccaactgtgcttcgaaaatatttgggaaaaaaaggccggcacggtggcccacgcctgtaatcccagcactttgggaggctgaggcgggtggatcacgaggtcaagagattgagaccatcctggccaacatagtgaaacccgtactaaaaatacaaaatttagctgggcgtggtggcgggtgcctgtaatcccagctactcgggaggctgaggcaggagatcacttgaacccgtgaggtggagtttgcagtgacccgagatcatgccactgcactccagcctgggcgacagagtgagactctgtctcaaaataaatgaataaataaataaatggtaacagtgcaacaaaagataacataaataaaaaacaacacagtataacaattacttacatagcatttaccttgtatcaggtgtcataagtcatctagagattatttaaagtattcaagcagatgtgcataagttacatgcaaacactatggcattttatataagggtcttgagtagctaagaattttggtatcccccatagatacttagggacaactatatattgtcaataatgtcaagttaaaaagtagaaacaaggcaacagaaaccatgaaatcctgggcagtctggcccaggaatcaggctcttcgtgacctccttgtgctgcctggccctttctgacttcaagtcccctttatgtactgagactgcagctgccatgggcccatgagtctttgaagatagcacatttgcataagtgagagtacgtacacacgtatgtgtgtatatgcatgcgtgtatatgtgtgtgtgtgcgtggggtgtgtgtgcgtggttgctgttagaagacagttcagactttggaatcctgtctggtatatgaggcctctagagaagcgcttgtttcatctcgcagccctgttgtagaagagccttgggcccacctgctgcagggcctgtgggactgttgtccaggtgagtggggagggcctgcaccgggaggctgcggacgcaagcccaggccccttcctgagtgctgtcgggagtggtgcttgcattgtgttcagctggctgacctcctctgtgtgtgtttcttttttcccacaatttgtgctcctctctgtgtcagatttcagaatgccaagcttaggtatgatgcaagtctttttatttcacgcttaataatagggactccatgaattagctataaccatgtatattttttgtttatttctcacccagggttaccttcccgccaatgtagaccggagaccagccactctccagagaaaacaaaaagaatattttgcatttattgagcactattacgattctaggaacgacgaagttcaccaggacacatacaggcaggtgggaatcctttctttttttcgtatgttgcctgatgtactttgctttgctgtgatttataggaggaaatgttttatcaaaaccatgtggagttggtcagagttaaagatgcaggtccctgattagctcacagatttttattttctaataaataaattttaaaacaaataatggcaaatttcctctgctagtactatcttgcttgtcttcagttccctctacaaaagtaaaaagagtattttaaattgaggttacaaaataaatgccttggattcctgagaccggccttggggtgatggtgggagtttgtatcacagtgagctgctgtctggtaataaaaggccattcctaaaggcccaggcccaaccacttagctgatggcatcaggacagagaggttgcctggggttctctggcgctgggctcttcggtctaggtagggatgtgataccgacccaggaaaggtgtgttcatcagtttggttttgcaggggacacacttcagatcatagcagaaggtgtagccaagttaccattttgtgatttagtttaatataaagtgtgtctaattatggtttcttaaatagtcagttgacagatgatgtacataatgggaaaatacttaaaattgatttatgattcacagtacatccagaatttgctgttagaatagctctttgaggactttataattctcactgtctttgtaatatgtgaaaggtcaaaatggtggttcttaattggtattattgtcttagctatctgaaaccagcttctgggtttcctgaggcacggcaggaatgtttccctctgcaaaccctgcttctaggtgacggagctttgccacattttctctctcagttgtgggatagccacatctctttgttagttggttttatctgtaaaaaaaaaaaaaaagtccaaatatatgccttacctctgttacataacaaagattctttaagttaaatgccttcctggacagcagcttcaaagacggatgggacacagggctgcaggaggaaaggtgacttgcttaggagtgaggctggggcaaagcagccatctccatttccttccaggccggagctgcccctggcccgtgttgccttctgtctctcaccagggcccctggaccacactggaccgccacccagttactctgggaaactgatttgatacacagattactttggatttgcttaaggaaatattagcttacctggcctcttttgccactccactggttttaggaaattgataaatttggcgttgttttgaacctattttttaatgcattttaatttcagaaaagatttccaaaggatgacactagcatctatctgcgagttttaccaagtggaattctgttatgagtgttggaagagaaagttaattacgaacaggttgcatacatctttatttagttactgtgataggtaataaaaaggttccagattattgtgaattcccagactatttctacattaatatagatgagacacgcctgtggcaacgcagtagtttttcctgtctgcctgatgctttgaggcctcttagaactgcgccttctgcgttctcgccatcgccatttcaggcagagctgggcccggtgggggtttggagaccttggtttctcctttacatccacttgggcgtttgacctgtggactgagcccgaccagccgtctgacccgcagtgggcaatgccacccctgcacactggtggaggcagcaggagtggggtggcctcggcaggtttcccgcttgctttccatcctttcttcatttgatttttatgtgctcactcttctgctgaagatgctgtgtcaaagccacatggagagccacatggagtcagagttaaacgttcatctggtctgtcttttcctccctcagtcagctctcttgtggcctttttctgatttgcccagttctgtgtatgatgggaggcaggcgggatggatggaggggtgcacagagccccacctgcccagccttgtggaggaccgcctctctaatgttggagcctctcctgacaatggggatgatggcaggggttgggtctggtggatgctgcctcgtctgctcaataaatgtgtgacaggagctcctatgtaagcgggctttgctggccctggtcatgcagaggtggctcagacctggttcctgccctgcaggagcttatgctgctcatgctggggacagatgtgtgtccacacgagtgtaactgtatgggagagcaattaggccgccaggacaccctgatgagagacctgggcccttgtccctgctggcacctgggctcctgcatggggccagcttcagtcctttggccctgcctgtctggatagagtagtgctgcttctgcctcctcctcttcctcctcctcctcggcagcactgctgctggcgggcctcctttggcacgcatcacagatgtgtgtgtgtgcctcagcttactccatttggctgttgactcacaatcttgatgttcaccagtaacgttttcagatacttggagcaggcattttgtagacaaggaaactgaggcctggccacagtgtgataagtggcagagtgatgatgtcccagcctcctgggtgttagagtcctctgtggagatgtgcaaggatggggcgaaatgaaatgcaattgcagcatctcccttggcattaaaatgtgcctgtcttcgctcagtccattggtgccgttgtcctggataaacgggagcgtgggctagtgtgagatgttcacgtgggatgtcgggagcctgcctgtgatgccaggccaagcccacaacactcttgtttggttgcttcttgaaccacaagtgtcctcctctgcagtgttggggactttattatgactctgatgtcagacggtggccaagcaggaaccagctgacactaacagaggctttcaaaggcttcctttgagaaatgttctagattcccccaggacttcataaagtggagaaaaatgtggcctctgtccaggaagaagctgtcacagctgaaaacttgtaaactattgatgtacttgaattgctgtctgtgtcagaggctgaaaatcgatgtttactaattgctatggctgatgttactaagcagccgaggcctgctctgtttctaatcatgcagcaacggctgctggatagggacagtgtcaagcaagcctgtcgcctaggcctgggcgagctgttcagagagaacaggctttggatacctccttcaggggagaaggtggtaacatggagaacgagaatcctcaaggagagagcggggtagaggccggggaaggacttacctcagtattgctgttttaatcatatcgctcgtaatgatgtttgttgtgacgtaacataaatgtccgtttctcctgcttctccagatccacatagacatccctcgcatgagccctgaagcgttgatcctgcagcccaaggtgacggaggtaagaagctcttgccgtggggagttcccctcgttgggagtggctgatgcccactgtgctaaccagacagtgggcgcagccggaggtgcttcacccagaagcaaggttgctgtggcgagctgccggtgcatctagcccttgtggacacagttgctgacaggacttctatttgttctttaaatatttttactgtataatattgacacacagcgaagaatgtatgtaatacatatgtgtggatgtatgcactcatgttccaccaccagattgaggaaacagaaccccccagtgctgcccagctacaaacatggccttgacctcaggcctgacccagagcaccaaggccgcttgtgtatcccccacccctgtgcaacccccttcctggatgacgctttcttgccttttatgtttacgattctttgtgactttcattcatgggacagtagggacacaatgtattcatttaatttgggtcttttggagctgcataactctttgtgtagtctggtctctgcctcttgtttttttttcctttatttatttagagacaagagtcttgctctgtcgcccaggctggagtacagtggtatgatctcggctcactgccacctccacctcctgggttcgggtgattcttttgcctcagcctccctgggctgggattacaggcacccaccaccacgcccggctaatttttgtattttctgtagagatagggatttgccttgttggccaggctggtcttgaactcctgacctcaagtgatctgcccgccttggcctcccaaaatgctgggattacaggtgtgagccacggcgcccggcgtctctcattgttttctaagattcagctaatctgttgtatctagttacataatagtttgttatttaaatattcctcactctccttcgtcttcttcctgttggacatttgggttgtttctgatgttttgctgttaggaagggtgttatctggagccttcacgtacatttatgcaggtgctcacaggcaagatttctctaaggcttttacaaaggagtacaattattgcatcattgggtgtggtgtgtgcctgttgtaccttcaagataatgtccacaagcttcccagacggccgctaccaaataaactgtcctctgcagcgtgtgagtgttccctccgcacgccgcacatccttgccagttcttcatgctgtgggacttcctgtttttgttgctctggtggatattcctgttgcagtcctcacgttcatttctctggttactcacggagttaagcatctctttgtatatttacggatgtcttctgtctttcccccttctgcgaaatgttcctcctgccttttgcccatttttcttttggtttgtcgattcgctcctttattagttgttgatctttacatggtaagaattctgattctttgtcagtttgtatgttgcaaagatcttctgccctctgcagcttttctcttccttttttcttggtggatcttgatgatcagaagttgttagctctagtgtggttgaacttaacagtcttttaaggtgagcactgatgcatgttatctaaagaacttttttctacacatgaaggtgttcacccagattttcctccagaagttttgcttttcacgcctctgtgttcagttcatctgcagttgatggccatgtgtgatgggaggcaggagtctgtttaatttcctcctgggacagtggcagtccccatactgtttctgggtccagctcgtctcccatatttgttatgtcactcctgttttctgtcactgccacattcatatagatctgtgttgtgttgtgttgtttttttgtcccagtatttacgtagtgttcccttcatatcgcaccccgcaagtaatttagcttcatgacgtcctcctacctggtgggggtgcacaccgcccactggtttcctcttcaccgtggactggccagtcccagcccttgctcttccacgtacgtctcagagtcagtttgccaaggtctttcacttgttttttgttttttgggtctgtttggtttatgactggaattgcatggaatctttctattccatggaaagttaggggtcagcaaagacaatttttagtttgggagaatggatagctttaggaaattaaatattcatttttgtgaatgtgctagttcctcttttaaaagtcatttttaatgcttttcagtgaaggttttgaatttcccctatgaagcgtctcgtacatgtgttaccggtggagggtgtccaggttcttggtgctttgaacaaagaattggacaaaatgcacaaacaaagctaggaaagaatgaagcagcaaaagcagacatttattgaaaatgaaagcacactccacaggtcgggagtggacctgagcaagcagctcaagggcctggtaactggattttctggggtttaaataccctctagaggtttcccatcggttacttagtgtacaccctatgtaaatgaagtagtggcccgctatcagtctgattggttgcagaaagcgaccaatgagaggctgaagtgaagctccctatgcaaatgtctgattggttgcagaaagtgaccaatcagaggctgaagtcacaaaattatattcctatgcagatgaagacttggcctgggaccaggctgctaggttgctggaggggaccaatcagaggtactttcagtttttcatctgccacgcagaagaggggtggattgtgaagggagtagcctctggtccttttgttacctgggcatggaaagttgtttttttttgttttgtttcgttttgtttttttttgtgttttttttttttttttagttctaggaagctagtgtgaattggccttaggttacctgcctccagaccctattctcctgcctgacgtgttttattagatttattcttagttatcacatgtttttcttgttatagtaaatgttatctctttaaagctgaaatttttattatttgagatattttgttttgcatgttgattgcttcagtaaaggcacgtttaaactttgacatttcttgtctgtgcagtaaatctgttaaaaaaaacctcaggattgttaaagcaaaagtatttacagattgtagaatacaaaaagagaaaattagtatccaacagaagtagtcattttgagacacttctctttgattgtcctttttagtagttgtgcctatcatacctggaaaatgagataatttgttataacctcctttttacttacgattttaaaaatgggaaatagagcctgccacaggacctttggtttattcttatttattttttcctaccacttgctgcattctttgtacagctgacctctcaggcctcttggtctcagagtgtggaccctgagtcacggctagtggtagcaattggcaattggtcctcttgtctctgaccaccgtgggccttgagctgttggtttggaaagcctcccctgtcaattgagaaaaatgatgagacaacgctcaatcatttttaggaggtttatttgccaaagttaaggacacacgcctgggagacaggtctatgtctttctcccaagatgattttcagggctccaaatttaaaggggacagggctggatattgagaagtgcacagttttcatatatgagggagacagagaaaaacattcatgcctttgtctggctcagtgaatctgcatttttttttaacctaaaacgacatagacaaatggagcagagggaaaatgcagggagtctgcatgttacataagataacctagacacaatggggcagggaacaataagatatgcatttgtgtctggtgggctggggtgcacctgtgaacataagttgtccatttacactgccatggtgaaatttttacagaaacaccttaaaagatcttgcagctcactaggaatttccttgtgggcaaaatatgggggaggcatgtagcttcatcgtgtagccatcttattttggaaccaaaaggggaaggcaagtttgcatggcccaggtcccagcttgacttttccctttggctcaatgagtttgggattttgaaattcaatttcctttcactccctctgcagtgggtcttgctcaggtcctatgtgctccccctgggggtgctgatcctctccaggtcccagttcagcaaggcttggcagagtggatcaacttggagggtagatgagcttctgggagagccaggctcctgcaggctggcagagtgtgaagagtgggtaacctgagcacagccttgtgtgtgtggggaaactgaatgatgagcaaggggctttaggaaagtattgaaatgtttgtcttggccgggcgtggtggctcacacctgtaatcccagcacttcaggaggccaaggcaagcagatcagctgaggtcaggagttcaagaccagcctggccaacatggtgaaaccttgtctctatgaaaaataaaaatattagccaggcgtggtggggcgtacctgtagtcccagctacttgggaggctgagacaggagaattgcttgaactcgggaggtggaggctgcagtgagccgaggtggcgccactgcactccagcctgggtgacagagcaatacttcgtctcaaaaaaaaaaaaaaatttgtcttgtgttggccagtagaaaaaattgagttatggtttctggcattgtagaggtgcagaggttagatttcaatacatctgcaagtgatggcaaatcccgaatgtgccttcacaggccagaactcgattactatctccagtacgaggtcattgtcagcacattgtttgttcctctatatgcttggctttgacctcatggtccaaggtggctggcctagcactctttatcacatttgcattccactagcagggataataagacgtgggtagagaatgccatacccccactttaaagatgtgtcccagcagctgctcatagcacttctgcttgtttcctactggctgtaacttagcctgtcatccaaagtgacatggttgtatacttagctgtatggatcagggaaaatgtaactttgatttttttagttgtgtgctcccctaaagtttgggctgctaataggaagaaggatttctgccgtaagcatccctccaaccccctgcatctatcgaaacatttgcttatccattccacaggtgatggctgggtccactgtgatcagtttctactttccttcttcctccttttctccttccctttctctttctctccctctggtcagctttatcgaggtctaataaaattcacgtattttaggtttataattggatgttttgacagctgtggttttttttcttttttttgagatggagcctcgctctgttgcctaggctgctggagtgcagtggtgcgatctcggctcactgcaacctccgcctcctgggttcaagcgattctcttgcctcagactcccgagtagctgggattacaggcacccaccaccatgtccagctaatttttatatttttaatagagatggggtttcaccatcttggtcagactggtcttgaactcctgacctggagatccaccctccttggcctcccaaggtgctgggattacaggcgtgagtaactgtgcccggcttgacagctgtgtttataggtgtgtaccagctccctaatatgtgatacagaacatttccgtcactctgcgaggttccccatgtccctttgtgtcagtctcctctccccacccttgcacttgacaactgctgatcttctttctgtctctagagttctgcccttttgtagaatttcatataaatggagtcctagaaactgtagactttagtctgtgtcttcttttacttagcgtagtggttttgaggtttgtgcatgctgttgcaaggatcaggagttcattgccttttcctgctgagtagtgttcccgtatggccgtaccacagtgtgtctgtctgtgcacccgttgacggacactggagttctttctaatttttgcccattacaaaataaattttctctaaaccttcatgtactaatcttattggggaaagcaaacatcctgttctcactgctgattttaaagggaagtcttttaacgttgcaccattgacttgtgattttaatctttactatgttaaggaaggtgccttgctcttagttttaaaatcataaatggttgtggaggtttatcaaatcctttttcctcccatctgagatatgtttttgcttctttgatctgttaatgtagtgaattttattagattttctagtattgagccaactgtatattcctgaaataaatccagattggtcatgatggatttttaaaagtgtatttcagaagtttgttggcatctaacgtgccaggccacactgcaggattaagtttgctaacatgtgatgtgccacgctgccagacgtggaagccaggtttctctttaatttggaaagtgctttctgaccattgtactgattcttcagttatgcccggatgtggaatcctctcagctgcgttgttttctctggtaatagtgatgtgatccttggtgtgaaagtattgtttattttcagtacttagttctttggacataaggaaacctctgtgttttgctaacctgttaagacacctgacgtgggcacaaaacgtgggctgtaaattaacgtatttgaatgaggtgaatgttgagtaattcacacaccaaatgtggcattactgctcatcgcgagagagttctacccattaattaggttgtaaacatatagtcagtagttttggtatactcagtgtggattttatgtgatatatggttgccttttaacccaattctagatttctacagttcgattttggtttcattcatcaagtgttataactcacatggggggggatgttccttgaatcatgttgcagaaacttgagttgtaaataatttcttctttctgaggctacgatgcttctggattttgagggctgtacatcccacaggtcttctcagtagaattctctattttgctcctctcccagaaattatctccatggcgctttgtataccgtgatgtcacattgctgatgcatatagaattatgatgttttaaaatttctcaaatcagattgtttataagtaaacgtgagtacagcaacattttcaatttcaatatagttcctttttagttatgcaaaatctctgagctccctcgtgtgcactgaactgctggtgttctgggcctgccttggaggcatgcggggtgtttgttaggtggacacggtgaagaccggggtccttagtaggggacctcaagcccctcctgggagccttctgtgggagagtgctgttgaggtttttaggaagaaccttttccttccgaattagcatgcatgttctggcgttcagatttctgaagtttggcaagcaagctgggaatacctctggtttttaaatttcttcagccctggtggtacccagtagtagcaaccatttttattattgttgagtattaactgatttgcagaaaagatactttgggaagagtttaaagtttgtactacttttaatgaattcccactctctaacaaagacgtgaacatcaagaatgttactagaactttagtagctaatgatatccagtgagtacttcttgtttgaaccatttcagattattctgtgttgtccttaaacacagccgcatccttagggcgtccttcctttattgccctttgctagataatatcaccacttaagcgacagctcacttgctggaatgcgagttgctgtcctgggacagagccccgctgtgtccgctaaaccagcccttccactgagctgactcttcgcctccactcagagtcccgttcaagtgggcacgttgttttcacctttcctgcgataactgcaagcaacacacctgcatttttgacacacaaagttgtaatggttgtgattcccgaagaacaccagcagacagacacccggtgggcacgtggggacacgaagactcagatgtctctgtcctcagcagcgcacagttgaagtgagggatgaagacagatgtgcgtgaaacccagagagatcatatacagttgtcaatgaaaccacagtttgtatcctgccgactgcattccagggtggctgaaagaattggagaagacagcccgaggaggggcagcgtatggggcagtccactctggagggtcatgcccaattgctggggccgcctcacgtctctgctctgtgatttcttctatttcctggcccggttgggccgcggatctctccctggtgcacctggagtctctgtggatctctttcctcaggggactctgcaacccagcctcacgccctgcagggggtcacagacctcagcctggtgggcgttcgggaccgagggctgagggccgagggttgaggtgaagtgcagtggcacagccatcccaggctgcaggcgaaggggctccccttcgagaacccacaggatggtagcagagcgaagttcagcctgcgggggcgtctgtactcggggaagctgtggaccaggcatggagccagcctgtttgccctccccgccctgatggctgctccggctggctaggcctcttctctgagattcttggcttagtacctctggcttttgccgcttgaatttggggacctgtcggctcttcctgtttcgcttcagtggacttccaccctagctctcgcctctggttgctgctctgagcgtgagtctagagggaccagcaaggtcctgagggagttgcgaggaatcgggccctgtccaggggcatggggagtctgagaggccccctcaatgttttgcagcagccaggtcttccccctgcctgccccagcagggtaagaagcagcacacaggagtgtatttcctctcggctgggccgctgctgtgagacagccccagtggacgggggtggaaaggaatctccttgaagagattcttacctgacttcttttctggctgagactgtctaaggcagcagtggaggcactgggtagtggttgggactgaggggtggtaggaactcccagcaaaccgggaaaagcatcagttgctcagagcttgctgggctgctgccgagtgccccgctgcccgtggacgcaccttcaagggaggtggcatgcttaatttttacccagacccctttaagtgtcaccctgtagactttgaaaatgcttatttggaaaaaaatgatatgaaatctgtcatataaatgtatatatatatgtgtatgtatacatatatacatatctaaataaaatctatctatctatctatctatctatctatctatctatctgcctacctacctacctacctacctacctacctacctacctaccagtctgagagcaaaagcttagaactggctcaatgcggttttttgaaaaaagaataaaaaaaaaggtacgattatttgatgcagggcttcagagtcccacagcatgtgtcctttggtgttggggatgggacctctttttcttataacaggctttcagtgatgtctatgtggcgagctcattgtggtgaaaatcacgcggcaagataatttcagggtaaccctcggcaataccatccgagtgtgctctcagccgcgagtgctttcctggcttgcctgctggtgaccaggatgaaaaacgaattttttttttttgagacggagtcttgctttgttgtccaggctggagtgcagtggtgtgatcttggctctcagcaacctctgcctcccgggttcaagccattctcctgcctcaggctcccgagtagctgggattacaggcgcccgccaccacgcccggctaattttgtatttttagtagagatggggtttctccatgttggtcaggctggtcttgaactcctgacctcaggtgatctgcctgcctcggcctcccaaagtgctgggattacaggcgtgagccactgcacccggccgagaaaattttttttttttttttctgagacagagtcttagtctgtcacccaggctggagtgcggtggcgcaatctcagctcactgccagctccacctcccgggttcgcgccattcttctgcctcagcctcctgtgtagctgggactacaggcgcctgccaccatgcccggctaattttttgtatttttagtagagacggggtttcaccgtgttagccgggatggtctcgatctcctgacctcgtgatccacctgcctcggcctcccgaagtgctgggattacaggcgtgagccaccgcgcccggctgagaaaatgttttaaagcctctgtggctttcagagggggacggtggggactcttaggcaccacagtacaaatcaggtgatttcggaaggagtttttaaaatgatactaaattgctttgggattagaactagtttttgccatttcaaaacaccagcataactcatatgaagtgattcaagacaaaagataaaaaggaatgaggcagtgaaaacaacagcaagcagcaaggaaagggaagcctgggcctggaggaggcctctgtcctttctgatggagacagtcatcctgtgagttggcttcatagcttgccagcatgaagaggagctcagggtctgtgcctgtcgcctctgctcagagcctttcatgagcaagttggtaaagcagcagattgatttgggtccgtgcagggtgtcctgagtagccatcccctgggctagcatccttagcttccagccctgcagccggccccggggaggagggcacggggtggccgctggaagagaagcctgcggtcggttggcgggtgggggacaggcggggcctctggggactgagctgagtgggtctctcaaggcggacacgcgagggccagcggtcccagaagttggggccaagggagcctctggggcatggccagggatgtcctgaacctaggggccaagcttccccctgccttgctggtttcccacaggctgttcctcaacctgtgggcgggcaggaatcagtggtccttctccatccttctgggggcatgaccttcccgtgtcccagacgttctctgtttatggaaccttgtttccattattgtaggtgttggggattttcctcctgagtctagacaaggctgatctgtggtagcattttgaggataggtttctgtctgctgtgttggtgggatggctgccccttttgcagtttcctggtgggtggtgggaggtcctggcaggtggggctcacattagcctctcagccacgtgcggggcgcctgggacctgcgacctgcgtttggcttagtccagggtggagccatcttggttcttggcttgccctcagcacagcagtgatgggagaaagggcagctgcaggaaattcaagcagttatttaccttttcttccctactgctacccaaaaaaatgtaaatcgtatatgttttcttactttctaaattaatagctatcgttggagggagataagcagccagaaggtgagtttagatccataattacatggagagcaaggagagcctgcccagaataaatgttggggaggggctgcacagctctgtgtggtttgtggcagtgatttaattggcgaggctggtgtgcatttaggataggttagctgcctgggcgccgctgtctacagtgggaatggtgggcctgaacacagcttgcaggcagcacatccctcagcaggaaagacgctcaggcctcctcttagtagcagagactctgcgctgatggcaggcgcgggagcactcaccatgggtttcatctggcagggcctctccatcccagatccttggaataggaaggcttggaaataggaaggcttttcagggagaaaagaaacagctctccacctacgagcaagtcactaaggaaaggctgctcgctccgtttctcagccacatgtacttcccagatagaccctgagctgtttcactggcccgtggctgtgtgtgtgtcccagatggaccctgaactgtgtgtgtgtgtgtgtgtgtatgtgtgtgtgtgctctaggtgcatgtgtgtgtgttcttttttgtgtatgtgcacttgtgcctctgtgtgtgtacatgggctctttcctgcgtgtgtatatgtgcgcatgtgcttttcatgtgtgcgcgtgtgctctctgtgcacatgagcttttctctgtgtgtgtagattggtgcacttacactcttctctgtgtacacgggcttttctctgtgtgcacgcttcgtatgtgtgtactcttctgtgtgcatgtgctcttctccacatgtgtgctcttctgtgtgtgtgtgctcttcacgtgtgtgcgctcttctccgtgcgtgtgctcttctttgtgtgtgtgtgcgtgtgttcttctccgtgtgtgcacacatgctcttttctctgcatagaaggctcctctcctcctccctcctcagctttcactaccctctcttcccgtcacctctctgcagtctcccttcaccaagtgcttctatcttccctgtccctttcaatggagttacttctgccccttcctctctgtgcatttttccactcagacaggtgggggccctgaggtcctgactggttgacgtttgaagtgccaggctgcagcattgcctggtagaggaaacagatgggagaggctgatcacaaacccaggcaggcacccatggcattcattatctgtccacacagacccccagaatgagcccaggtcctgccaatggcacaaaacctggagaagggaggaaggggagggctcacatgcagggcatcagggagcagctgcgccatcctcgcctccaccgtcctcgcctccaccatcctcgcctccaccatctgcgcctccaccatccacacctccatttagccacaaagagcttcccagtcctcctctgtgccggccgtgcaggactgagggcactgctgtaaagtgggtggaggaaacccttcccagggacccaccttgaactgggtgagagccacaggccagagccggggcagtgcggtggaggagctgctgctttgggtagggaggtggcagaggagcttgtctctgaggagatgcatgtgaactaagacttgggtggaacatcgtgggagccgtgggaagtttgggagacggggattccaggtggaaagagcagcagtgcaaaggccctgagacagccgcagagtggctgggcctggtgagagagcacccattgccggcgaggaggccagagagcagggagcggccaggcacacacctgaagccatgctcaggagtgcattgtctcgtcagggtcttggaaagccacgggggccggatggtgtgacctgacatttttagcagcaacctctgctgctcagcgggatgtggagcatgggggtgttagcaggaagaccagccaggagactgtcactgcggaccaggcacaaggtgatggtggtcaggcttgtggcagtggagtcgggggaaggggctggatgccacacgcatctggggtgtgctatagtggtgatggcgtgtggggtccgcaggtctccctgggattctctgaggggcggacctcaggagcagtgccctaaaagcctgtgcctttagcggcagagccaggctttgtgtgcagtgtcacacgcctccacgggacacccacttttcaccgttgcagcctgcttgccacgttaaaggtcatttttgttcaatgcttgagctggctgtcctttatttacatgtcagttggatgacagcggacatcaagccgagttaaatctgaagaatttggactgactgatagctttcttcagtcagtaagaaattggaattctccatttttcctcaaagtaatacaagcgtgctcttttaaagtacattactacccaggctggtgcggagcgtcccggagtctgggtgggcagaggccctctgtcctgacttggatgaggggaagaaggtaattgctgggtctttgggttgcctgtgaaagggcactcacttggcaggtgcttcagcactgtttgtttgctaactgaaggcttagccacctcctgccgtgcctgtttggtggtcctgatttgccccgtagtgcatagtgcattccatgtctctcccgaggctgtgctcaggcagaactcggtctatctcaggtacagttcagagatgcgggcctcatggaggctcctgctgtggaaccgagtcgaggccccggcctgcgcagatctctcccctgcagcagcctgtttcatggtccacagagcccgggagcttgttgtgccgagaggacttgggctcccctcggcatcctccctgggtgaagttgggtatgtcctatttgccaaattggttttatccagcacttaggctgctgaggaaagtactgcattcatgcttatgagtagatatagccttgagaaagtgtgtgtttgtgtgtgtgtgtgcgtgcatgtgtgagacaggccctctgaaagtgaggggccttgttaaatggtgggggtgctccactgcctaaattcttcctatacacatacacacacacacacacactcacacactcactcactcacacccagcactgcagtgcgactgccccctgctctgggcggtgcctgccttgactccctctgtccagggtgcgtgctcctggggcgctgcactgcttgttccctgggctgtagaggatgccgtgtggcgacagagctgggtccagtggctgctggctgccgcggtcctctggacacacgtggagggatgtcagtggcctcaggcaccccgggccttcttggttaggaggtgctgggcagagtttccccatttcttcctaactctgtgtggccagcttccgtggagtcaccgcctctgtgtcattccttcttccttctgttgctgctgctcctgttcttgtgtggcccctgtcccctctgccccctgctcctgacccttttgggggctcagaggcccctcagaggcttgctggtgagtggacctaagggctgttgagctggacccgtgccccgtgcctgccttcagggacccagcctgcctgtcttctagtcacacgccgtcccctgggcttccttcacgccctaggggctcggcagggctggggctgcgcgttggtgactcgtggtgcagcactgttggctgaggggttgccgccctgcttcttcatctccctctggccccacacggctcctctggccgctacttgcagctcggctaaatagcattcgcatcatttgctaagctttggtacatgagaaattcttaaatggcactgtgttgttgagtgggtttggtctttgatgttaaatattcagttctctctagaaagttgtcaactgaaaatggaaagcgtgtatgaatatatgtgcgcgaacatattcctcattccacccgcgtctctcaggtgcctgctgtgttaggtggtggctctgttactcacctgaacagccgtgtgcactgcatgctagcgtggggtggcggggggcctggactttagggctggtcatgccactctgggtaggctccttgggttgagagacttcacctgtcggtcccaggtccctcctttgtaggtcccgggttgatggtgattttggggatggagcctaccaagcccagtaagatttaggattgtaggcagggtaggaagggatcgactccccagggtgcaagtgtagttggctctgcggggctgagtttgtatggcagcgatgtaattcatccacctgtcggagcgtgtgttcctgaagtctacctcctgtgccttgtttgtatggacaggcctggacagagcagttgggcctggccttagctggcaggcagcccgaaggtcaggctggagccatcagccagtgacccagtggagaggagtgggaactagagggccacacagtagggagtggttggctcttccaaaaagagagtggggagggaacaggcggcagcagagtcttcacggagggagtggtgcttgaagtgaatcctgaaagccaggggagtcgagacccagggtgcgggagtggcaggctttccaggcagaggtaggagtacgggctgatcactcagggggatcgagacccagcgtgcgggcgtggcaggctttccaggcagcggtaggagtacgggctgatgactggcaggctcagttggggaagaatgctgtagctcagtgcagccacaatgtgggtgctggctggggagaccctggggcagggaccagactgaggggccaggggtactgcactgggggtggtgggggctctgtccgtgggaggtgaggagcatgcagaggtcttcagccaggtgtgcacatgtgcacgtgtatggtgtgggtgataggattgtgttgcaccttggtataatgaaaccctccttatgagtgaagatgggagcgagtaggtgggaataagaggtggtggagagagggtccactgaatatattgagagtattggagggaggaggccggaatgactcctgcatgcctggcctgggtgcctgaatgcctgctgagatttcgtaagtgatggaagatgtttaagtttgtcttcttgaatggtgataccttttcagaggtttaaagaaatctgtttactttatgagggaaatttagagcatccatccacccacctgtccatccactcatctgctcgcctgctcactcatccatgcctccctccctgaggaagtctccactgataggtcaggtgctactgcacggtggcccgcggggtgtggaggagcagagcgcttctgctgggagagccagctcagggacggactgagccaggggctgctgaagtgctgcacattgcttgtgggacaataaataattttttttaaaatcaagtttcaattgtcttaagggccgtgcgtggtggctcattcctgtaatcccagcactttgggaggctgaggtgggtggatcacttgaggtcaggagttcacaagcagcctggccaacgtggcgaaaccctgtgtgtaccaaaaaatacaaaaattagccaggcatggtagcgcatgcctgtagtcccagctacttggaaggctgaggtgggaggattgcttgaacctggaaggcagaggctgcagtgagctgagatggcaccactgcactctagcctgggcaacagagtaagaccctgtctcaaaaaaaaaaaaaaattgatatttgtttatatttgtatcttaatattaggagcaatgagaaaatacagtgtacattttaagtaatagaatgctttcattttaaagtttctgccatgtttactttttgctttaccacctgttccattttctttcagatttttgaaaggatcttgttcatatgggcgatccgccacccagccagtggatacgttcagggtataaatgatctcgtcactcctttctttgtggtcttcatttgtgaatacataggtaagatttcttgcaaacattaaacgtgaactttagtggacttgctgtgtgttactatgtataattataacaatattgaaaattgctactaagtgtaatgttattaatgataggtaatattagagaataatagttttctcatcaacaacagctttccaaaatgtctttaatctacatgctcaactactgaagacattaaattgcagttataatgatgaatatcttctttttaacaatatttgaagatagataatatatttggggagtgtagtttattctaaaggccatcacagtaatggctttaatggtttcagtcattcaatcgatcagtcattcagtcaatcagtctgtctgtctgtctatctgtttatctatctgtttattttgagacggagtgttgctctgctgcccaggctggagtatagtggcacgatatcggctaactgcaacctctgcctcccgggttcaagtgattctcctgcctcagcctcctgagtacttgggactacgggcatgcgccaccatgcccagctaatttttgtatttttagtagagacgggctttcaccatgttggccagggtggtctcgaactcctgacctcgtgatctgcccgccttcgcctcccaaagtgctgggattatagacgtgagctaccacgcccagtcagtggcttgaatttaaatggataagattaaggtgatagagtgtcagtcacatattttgcttacaagctgaaaatcaaatcttctttaattgcgtttctgtggcctttcatcacttttctacttttgctatactagtaacatttggtttcatgagagtattaattacttgtgaaataactggttgaacagtgttttaggttgggctgtgtttttatgctgtttctttttaagtactgcatatttttcctttatcacagtcaactgtaatgtaacttaatctgttttgaatatgtttttaagttaaaacctctgataataaaagtgaggatctgctttttaatgcgtctatggataaaacataaataggaaagaggggactttactgtttagtcacagcattttaatttaaacctggttttgtcttcctgcaagccttctggacttggtgctcgcctgttgttattacatggtgtttttagcctttccaggttgtggtcggcctcagattcccatccttgctgtgatctggagagatgagccttacccgaggacagatgaacagattatcctcagaagatgaggacatatccaagtagtgaattttactgcagccctctgacactttgtttccatttgtgatttcataggaggttgtctcattgctaagcaactaatgagagctgcctcggctcactccctaatcatctcttaagtaggggagaggctactcctgagggtgcttgcttttctgcctcttacccctcatttgacagataatgaaaatgctcttaatgatcctagaacagtaggacctctgtcagtagacttcagagttgttaattgaaaggagaagttcaactgagatgtgattagagaattgatattccatgttaaatagaccatttaattaatgtggtaaataagtttgttttaactactttaccgccaacttctgttgtaagacctaagcgattcttaatgcatttgcctgattatctgcaagacaggatgaaggggcatgaccacgatcttaattgtccagaagaaagaaagcctggagaaaatggaatttgtgtcctataagtggtgtcttcagatgagctcagagacactctccttgccttcctgcgtccccatccttcctgcatcgccgtcacacacgcaggcacatgcacacacacatgcacacatcagaacacaactacacattgggtatacggtgtcacttttgaacatctgtgtaaaacataccatttatttctgtcagtcaactattaagtggacatataaaaatgtttgggccaggcgctgtggctcacgcctgtaatccgagcacttaaggaggttgatgcagatgaatcacgaggtcaggagtttgagaccatcctggctaacatggtgaaaccccgtctctactaaaaatacaaaaaattagctgggcgtgctggcatgcacctgtagttccagctactcgggaggctgaggcaggagaatcgcttgagactgggaggcggaggttgcagtgagccgagatcgcgccactgcactccagcctgggtgacagaatgagactccatctcaaaaaaaaaaaaaaaaagaagttcggtcctggatttcacatgtgattattgcatttgtagtcctttttagatctagcttcctaggtttggggaatgttcattagtacagtccaagtccgcctttcattatgttgtaaagaagcgtttaacttgcgtggtgtgctgtccagattccttatggggctgaagttgagtcattcacgcagcccttcatggagcacctgccctggtgctgggtgtggtgcagagcgctgcggtggggagatgacttcggttcaacgcagccagtgttgacagagcatctcctggccctgtgctgtgggagtggggcaggagaacaaggaaagcctgatccctgtcctcttggagtttgtggttgtagcacggaagacagattttagaggagtaatttaaagtcttaattaaagtaattaacattcacattatcaagaggaagcctgggctgctgtagggacctgtccccttataggggtcaggggaggcctccagggtgaggtgatgttttagccatgtctcgcgggatgaggaggaggctagattgaggccgggcattcagagagggcagcagaagggccggcctggaatccaaggtgcagtgacaagtagtggcattgggaggaagggcagggcggcttgggctgcagtgctgagaaggagaagcttggggtcgagtcccaggggtgtgcgaaacccccagccactgtgctcaggttcttatctttgaacattcattctggcagctgcgtggatgagattggagggtttctggggaagctcatagaccagggacccgcagggtccagcaccggcagaggcacgggtgccctccagagaggctattctggtttgctgaactcttagtttgctgggtcttcaagccggtaaacctcagatgctctgcttagtgaagatcttcaagattgactgttccttcagagaacagagcctggtaatgggattctgtggtttcgacacctgagcacctgccagtccttgggcctcagcgttcaggttatcatgtgaccgctcatacacctttggtgcagctgcctgtggcactagcccgggtgtggctacctcctgagagctgcagctggcctggttctggggatgagcttgtgttgttacttggatattcctcttttctttgaagtacaggatagcatcccagttaatcaaaggtttaagaaatccccggggtgtgggatttctccaggggctttcaggcaacagcagacagatctgtgatgcctgagtgggagctgggctctttctggggatgtgtgttcgccatgtgtccagagcctgtaaagatccacagatcctggcctgccatatgctcccactggtttcacgggaggtggggaatcctggagtgtggcattggtcctgagtaggagcagctcttcgggagtggctcatcgttctggctgtcagtgggaggttccaactctgcacatgctggcactcagagccctctcagtgttacgttctttgacttggaaagaaggatgtggtgggcttcagattcccatccttgctgtaatctggagagatgagctttacccgaggacagatcatcccccgaggatgaggacatatgcatgtagtgaattgtattgcaacccctctgacactttgtttccagttatgatttcataggaggttgtctcattgctaagcaactaatgagagctgctgtggttgaggttgacacacaggacctggtctgaaggcagaccagtcgactaggtgaactgcttcccagcacagaggagaatgttcatcttcagcaggaggctggccaggatgtcagagtcagagaaacagtttgtagtgggggagcaatgctcaagctgtgtggaggtgtgctcagaggtgggttagggttcgatgggtctccatgggtgccaggacactgccggcctgagtcaggaatacatggtatgcatcccagcagtcctcgtggagctcaccactatttgagaagggcagtttggtcctgctgttgatggatgcagagtctgtaaatgcatgtttagggcatgctcttgcacacacacatgctgtgcacacaggcgtgcaggcacgtgcacgcggacatacataaccatacagagacacaaacccacttgcacactcctcactagtgctagcctcaacctctccaagcaaatggggaacaaatctgtaatcaacctttgtttgagtggcacccaccagtttcgctcaggccctggaggtgcctgtcattggagaaagaggtcaagcgatcttgcgtgacctcagaggcaggggcagccgtgtgcaaagcatgtgaagacagtgaagtccagtaaatacagccagttcgacatcaccgaagcttggggagaaaactctacaagtgaaaacgaagtgagagggtataatgtgatgggagagatcgatcatggagaagttctctatgccaggaaggtttcgcagctcataaatttcagaggttgaagccttagggagtggggaagaaactagaggcacatagtgatacatttgctgaagcttgaatgtgcccattccagatcagagccaagcgtgcgtgcttgttcttgcagattgcgtccttgacccatggggcgggcagagtgtggaggagactccagttagcacagccattggagacgacactcagctaggaacaggcggaagacacactttttagtctaatcttttagaattgagaggaaacagcaaggcacgtgctactttggacttagttcaggccatggaagaaggcaggtctaggatgagaataacatagggtccagggcatcttagagtttgtaacagcagaggagtgacacctggtctagagacactgaggggtacaggagcaggcccagaccagaggccggtggaggcaggagactcgctgacggaggactgggcctgagaggagggcctggtcctggatgtcaaataggctgctgtgagggcaccaaggtggcttggtgtgagcagaggggagcgtgaacgagaaggaaaaatccagtcacctcctagattcctggccctgtgaggggtgtggtgccgtttaccaggatgagacgtggagtagaaagagcgggttgaggaggcgggatggggttctgatttaggatgtgctgagtgtgctctgtcggcagtgattgagtagaagagtctgttgggatccgggccttggcaggagatctgcagtggaggttagtctggaaattgtcggcctggaaatggctgctgacagtcgcggctgtggatgtgtgtgtctggggagagtggagtgcagcgggtcacaggatccagtggctctctgatgtgtcaggggtctccgagctgtgactgtctgtgactcgaggagctggcaatggggctgtcccacagggaggtttatggcgctctcccatgccggagtctgggcgttgagagtccaggtggctcctgctgctgagggccgcctttgggatctgtgaaggatgcaatgcagctctggggcctgaccgctggggtccagatccagacgctgcccctgaagagctgcaggcggccttggtgcctcagtgatctctgcagtggacacgaaatggagatcgtaatggcaccagtcccttggttggtgtgaacactgagcgaggcaaaaacagcttagaaccaggtatggaacgcagtaagtgtccagtatgcgttgctcttgtgatcatcgttactgtcactttctttgttgctgcctgtggctttcctctgcttaaaatggtggccgcatctctgctctgtccctgtcctaggtttggagagagggagatggtgcagggtgcagggccgaggccaaagcacgcctcagctgagcctatgtgttttcggaagctttcctggaacccacacagcgatgtcctccatcagccacacccttgccacccaccagccacaggggacctggagaagatgtgggtggagacaggaggcaaggaagagggtctgtgtgtgtgtgcatgcaggctgccagaccagtgtgtgccccggggagaggtatggtggtgtggtaaggaaatggagaagaagtggtttcagaggtaagacaaaggccaggcctgaggtatcacagaaatcaagggaggggacaacttcaggaaggagggagtggtcagcagagctcatagggatggagactgaaaattggtcaaagcatttgatagtggggatcttgctagcgacctgccaaatctggctgaagaatagtggcaagcaaactgtcacatcagctccctgccctccctcagaaatgggggcctgaatgtttctgtgcttggggaagattgcactcagtggaccacagcctcttgcaactttattttaaataattttttatgatggaaagtttcaaacacaaagtcaacaaaattgtccgaagaacccgcgtgcccgtcatctgactccagcagtcaccgttctccttccttctgtcccccacccactcccaacctccatgcaactttacttactactgctgtttaaaaacagctttattgagattcagtttagaaaccataacgtttacccacttagagtgtaaagttgaaagatttttagaatatttagagtagtgtaaccatcagcacctttgtttttagaatattttcatcatccccaaaagaaatcctatactcattggcagtcactccccatccttcccttttctcttgtccactagccccaggcagcctctcatttgctttctgtgtctgtggatttgcttcttctggacatttcacgtgagtggaattacatggtgcgtggccctttgtgtctggcttcttccacttggcatcatgcttccaaggttcatccacgcagcgtgaatcagtacttccttcattccgtagccaggtaacgtctccgggtacggacgcagcacgttgtgtttctccactcatctgttggtgaacatttggattgttttcatttttcgactaatattgtttccatttttgactaatattttgactaacaggaataacgttgctatgagtattcatgtacaagtcttcgtgtagatatgtgtttccatttctgttggtatataactgggagaattactgggtcacatggttactctgtttaaccttttgaggacctgccggactgctttcccacgtggcggcaccattttccctgcccatagcattgtgggaggagcgtatgtttcctcttcctgcaggagtgtgtccacatcctggtcaacacttgtcatcatctttcactcttttttttttttttgtagactttactgaatcttatattaatttaaagagattgagttctgcctcttactctcaaactgtgataaaaactcagataagaagggatgttgactgtagaaatcatttgtaaagaggaataaattccccggtgctgctgttttccccatagcccagcaacttcagtgttgacagcctttgtgcccagtgccaaattccctgtcataagagggaacctttatggcaactgtttaacccccttaaaatggatgcacatgctgatgttttcttctaggcttaaagctgagtgttaggtatatatgtgtttgtttgtatgtatgtatgtatgtatgtatgtatgtatgtaatgaaggagagagacagagtgttgctctattgcctaggctaagtgcactaacgttatcatagttcatggcagctgcaacctcccaggcttaagtgatgctcctacctcagcctcccaagtagctgggactacaggcatgcaccaccacgcctgactaattttttattttttgtagaggcagagtcttgctatattgccctggttggtctcaaactcctggactcaaggaattcttcttccttggcctctcaaagtgctgggattacaggcacgagccactgtgcctagctcaaagctgggtattctcccattctaataatcatttagtcatgtcctatgacaattataccttaactttttagaagggatatatggaaaggtaaaatttccatatattccctaaaactcatggaggctgtgattctgtttcattcctgatgtgtgctctgttttcttttttcctgttgtgcctctcccaggtagattcgctgctcctcgaatctggggactgtgtcgcatgcgtgtgtcatgctttgcacagagaagcttcgtggattagagaaactctgttgaattggatccctacagaaagtttttgtgtttatagagcactttattagtatttgtttaaacactgaaacaatatataatttttatttattttttgaagttaacattatgttatttattcattttttttttttgagatggtgtctctgttgctcaggctggagtgcagtcgtgcgatatcggctcactgcaacctctgcctcctgggttcaagcgattctcctgtcttagcctcctgagtagctgggattacaggtgtgtgccaccatgcccggctaatttttgtatttttagtagagacagggttttaccatgttggccaggctggtctcgaactcctgacctcaagtgatccacccacctcggcctcccaaagtgctgggattacaggcatgagccactgtgcccggctactatgttgttattattttttaacttttattttaggttcaagggtacatgtacaggttttttatataggtaaattgtgagtcacaggggtttggtgtacagattatttagttacccaggtaataagcgtagtacccgagaggtagtttctcgattctgaccctcctcccgctctccaccctcaggcaggccctggtgtctattgtttgcttctttgggtccatgtgtactcaatatttagctcccacttataagtgagaacatgcagtatttggttttctgtgcctgtattggttcttttaggataatgacctccatctccgtccatgttgctacaaaggatgtgatcttgttcttttttatagctgaatagtattccatggtgtatatgtaccacattttctttatccagtccaccattgatggacatttaggttgtttccatattttttgctattgtaaatagtgctatgatgaacatacacgtgtatgtgtctttatggtacagtgattgatattcctttgggtgtatacccaataatgggattgctgggttgaacagtagttctgctttaagttattagagaaatcaccgaactgctttccatagtggctgaactatttacattctcactagcagtgtaaaagcattttcttttgtctacaacctccacagcatctgtttttttttttgactttttaataatagtctttctgactggtatgtgatggtatgcaaatatggtttgcaaatattttctcctgtaggttgtatgtttactctgttgatagtttcttttgctgtgcagaagctctttagtgtaatgaagtcccatttgttaatttttgtttttgttgcaattgcttttgacatcttggtcatgaaatctttgccagggtctgtgtctggagtggtatttccttacattatcttacaggatgtttacagttttaggttttacatgtaagtctttaatctatcttgagttgattttggtataacaaaggggtctagtttcaatcttctgtgtatggctaaccagttatcccagcaccatttattgaatagggagtcctttctccattgcttgtttttgtccactttgtcaaagatcagatggctgtaaatgtgtggctttatttctgggctctctcttctgttccattggtctgtgtgtctgtttttgttattgtgccatgttaccagtgccatgctgtttttgttagtgtagccttgaagtatagtttcaagtgtactcacaagtatattcataagcatgaatattgtaatgcctccagctttgttcttttttgctttggattgctttggctattcaggttcttttttgattccttgtgaattttaaaatagttttttttcctaattctgcaaaaaatgtcatttattggtagtttaataggaatagcactgagtttgtaaattgctttgggcagtgtggccattttaacaatagtgattcttcctatccatgagcatagaatggttttccatttgtatattcatctctgatttttttgagcagtgttttgtaattctcattgtagagatcttatatgttacctggttagctgtatttctaggtattttattctttttgtggctgttgtaaatgggattgcattcttgatttggctctcagcttggacattgttagtgtacagaaatactactgctttttgtacattgatttttgtattctaaaattttactgaagctatcagatctaggagcttttgggcagagactatggggttttctaggtatagaatcgtattgattgcaaacacttttatttcctctcttcctattgaatgccttttatttctttctgttgcctgattgctttggcaaggacttccagtactctattgaataggagttttgagagtgggcatccttgtcttgttctggttttcaaggggagtgcttccagcttttgtccattcagtgtgctgttgattgtgggtttgtcataattggctcttattattttgaagtatgttccttcagcgttacagagtaatgtaaaaacatagctttagaaacagtatagagatactggtaaatatagataagttatgaaggaagcaattaaaatacttggccatcccactgttgagaagacttattgaagcctatctcctcactgtgcagcctcccctttgattaagatcctttcttcccacacagccacactgggagggctggagaaggatctctctactttctctgctcccaagagaccagtggctatctgcatggggagagtcctgggctctacttcagttccttgggggtggcaccatggtatcacctctgtgtggcaagcagtgtgaatctgggcccttccccatctcttgccccgcccagggctgggcctcgaaggtagcctgggtctcttctctaggttgctagggtcgcagtgtctaggtctgggctgggaggaagaaggactcatccagcttggagcctgagctgtggttccagcccgtcctttgagccagggtgcggggcacttgcccgctcagcgctcactcaggggttactgtcctgtgtatggccaccaggcagccgccgtaccactgtgcataagcagctgttttctgtatttcctctaagtcttgttttctatgcattgtatttacatagtcgagtgcatattatctataacattttgtttcatgttttttttccacatttaaccttacaatgtaggcttttccttgtattaagaaatctttataaaaatcatttctaccttctgtacataatgctctattgagatcatgtagcataatttctgaaaccatccagtgttggtgaatcttttcttttagtttttctttcctttaggcatggtgtaatttttaagaaaagcctgtacttttcaaacagcgactgtcatattacttttaagtatgttaaatttgaagattttgaattaaggagcattgttccatcaccttgaattccacagtttaagcagacaattgtattttagcttaaacatttttagcagagcaagaaacaaagaagtatttgcccccctccccatctttgatgcctccgtgctatttaaatgtagaaacagtcttgactgagtcctttggactgatagctcggagtggctggatgtcttgactgagtactttggacggataactcggagtgactggatgttggttgtgctgcaggcgagcaataggaccacattttggaaaaggtgaagagtgttttacaatggattctcaccatcagtatgtttaatatctaattgacttgattttctatgtcattttctcttaaattactcttgaaagcaaatgtgcaatgggattagaataaatagtgcatttacttaagaacattaagaatatttattttgccgggtgcggtggctcacgcttataatcccagcactttgggaggccgaggtgggcatcaggagttcgagaccagcccgaccaacgtggtgaaaccccttctctactaaaaatacaaacattagctgggcatggtggcacatgcctgtaatcccagctacttgggaggctgaggcaggagaattgcttgaacccgggaggtggaggttgcagtgagccaagattgtgccattgcactccagcctgagcaacaagagtgaaactctatctcaaaaaaaaaacaaaaacaaaaacattatattcctgtttgtaagtcagattcttaaagtatagattgttcttaagcatgtggttacccagagaggacactctagcatatggctcctggagctggaggactgctagggttgtgatgagtgtgtggtggggatggcaggtaaaatccccacagccggtgggacacatgagaggatgaacgcagagaacatgctcacagctggattttagcagcatagtcattcttttgcttatttccattatcggagtattgatagagctttgagtgacagtgagggaaagaagagctggtgctagtttctcattgataagttgtagctttagaatgatttgttttagctttccattgttagcatttaaattttacttccctccaccttgttttttttgtgttgtctaaaccaaggctactgccaaatacatcctttgcctgacttccttgaatgttcctcatagcttaggtgcttttgtgctccacagttaatctcggaaacattgaaaggtaaaaaccaaagcatctgagcgtagcacattttctgtagcagttctagacccacgtgagacaagcagagagttccctggggttgctcgtgtgtggaatagcgaagtggaggtggctggctttgcagcccctgaactgactgtgcaggtgccacatctttgcattgcccacgactcatatatattcattttttctagttaaaaacatttcggaaataattagtgtaatggacttactgtttaaaagattggaaagtttaataacagtatggctttgccatcccagaagctgtcacttgaatgtttggctaatttttttctggccttttactctgtagattcttttccatagtagctattatattatgcatgcacatttcaatattgctttttgcttagtatctaaccattttccagtgtcattcaacagttttaaaaaatacgtgttttaaaagtagcaacatactactttcaataatggctagaaaaatgagacaaatcagcaagaaactagaagaataaacaacacagaaaaccaactagatctagtagatatccacagaacactgcacccaacagcagcaggatacatgttcctctcaagtgcttgtggagcattctctacaatagaccatatgctaggccataaaacaagccgtaatacttttgagaagatggagtttatacaaagtgtgttctttgaccacaatggcattaagttagaagccagtaacagaaggaaatttgaagaaaatgacaaatatgtagacattttagaacacaccctaaataaccagtgggtcaaagaagaaatcgtaagggaaattagaaattgctgtgagatgaagaaaatgaaaacacaatatatcagcacttacaggatgcagttaaagcagtgatccaagagaaatttatagttgtaatggactatattaaaaaagacctcaaatcattaactttccactttccgaaacttagaaaaagaagggtaaaataaagccaaaacaaacagaagggagaaaataatgaagactagaacagaaataagtgaaacagacttgtagctagactgaccagagagagagagaaaactcaagttactaaattcatgagaaattttagaaatacacagcattaaagtaatactatgaacgactctacaaaccaggcagtgtatatgaaacagagaaactcctagaaacacacaaattgccaaaattgactatgatggttaattttgtgctgacttggctgggctgtggtgccctgttgtttggtccaactccagtctatttgtagctgcagtgtagatgtattttagatgtgattaacatttaaatcggtggactttgagtaaagcaggttaccctccacaatgtaggtgggcctcctaatctaatcaggtgaaggccatgagcttgaagagtgaagtttcttgaagaagtaggaattcttctcaagactgcctcacgggaaatcctgaccgagttcctagcctgctagcctaccctacatatttcagacttgccagtccctacaattgtgtgagccaattccataaaataagtctctctttgagactgaattaattattaacaatttaaaattaacaatgaactaattttcatcaataatttaaataatgttaacttgttattaattagtattaattattgaaacaataatttcaaaaatccccacaaagaaaatcgtaggactagatgacttcacttgtgaattttatcaaaggtttaacaaagaattaacactctttcttcatagactctttcaaaaaatagaagaggagggagcacttttcacctcattctatgtggccgatattactctgagaccaaagtgagatgaagacataacaaggaaagaaaattacagaacaatattccttatcacaatggacttaaaaatcctcagcaaagtcctaacaaactaaatctagcaacgtattgaaaggattaggcattattacaagtggaatttatttgaggaatgctgggatggttcaacatttgaaagtcaatccgtgtaatacactgtattaacagaataaaggacaaaaactacatgatcatctcagctgatatggagaaagcatttgacaaaatccaacacccttttatgagaaaaacattcaacaaactaggaatagaagagaacttcctctctaataaaggcttccatgaaaattctgtgactaacatcatgcttagtttaaaagacaaagtttttctcctaagatcaggagtaagatatggatatctactttctccacttctattttagtactggttctagctaaggcagttaagcccaaaaatgaaacaaaagtcatccagaatggaaaaaaataaaactacctctatttgtagatgacaggatcttgtatgtagaaaatccccaaggaatccactagaaaactatgaaagcttataaaccaattcaggtttgtaggatgcaagatcaagattaaaaaatcggttacattttcatgcacttgcaatgaaatatttaaaaatggaactaggaaaatccacttacatcagaatgaataagatacttagacataaatttagcaagagaggtgcaacattcgcactctgaaaagtacaaaatattgttgaaataaattaaagaggatctaaataaatggaaaggcatcccatgtttatggattggaaaccttaatattgttaaggtggcattctttctcaaattgatgtaaagattcagtgcagtccctatcaaaagcctaaatggcttcttagcagaaattgtcgagcttatcttaaaattcatttgggaattaaaagaacccggaatagccgtaacagtcttgaaaaaaaaaaaaaacaaagattaggactcacgcattctggtatcagaatttattacaaagctacattaatcaagactgtgatgctgccatgtggatagacatgtagatcagtggagtagaattgagaggccaaagataaaccttcatatttatggtcaattgatttctgacaaaaatgccaagagaattcaatgaggaaatttatgttttccaaccagtagtcctgggacggttattagacattgaaatgcaaaaagatgaagttccactcctgcctctctgtagacacacacaaaaaagtgaatcatgacctaaatgtaagagctgaaatcataaaactcttaaaggaaaacatgaggaaatcttcatgaccttgggttaggccatggtttctgagatatgacaccaaaagcaaaagggacaaaggatagataaattggatttcatcaaaatgaaaactttggtgttacaaataatactctcaagaacatgaaaaaacattccccagaatgggagaagatgtttgcaaatcatatatctgaaaagagactcatatctagtatatacaaagaactcgtacaactcagtattaagacaaacctaattttaaaatgggcaaagtgtttgaatagatatttctccagagaaaatatacaaatgagcaataaataaaagatggcctacatcattaatcattagggaatacaaatcagaagccacagtgtggtaccgcttcacatccacaaggatggctactatcaaaaagatgaacaataacaacttaacagttacaaatgctggcaaggatgtggagaaattagaatgtgggggccgggggattgactgttaatgggtacagagtttcttctggggggaggcaaaatgttgtaaaattagattgtagtggtggttacccaacttagtgaatatatgaaaaaccactgcaaataatttaattatgtggtatgtgaattatatctcagttaaacaggttgaaaaagaaagtggaagctcattatcccgttgtaaggagatgtaattggcagcttcctatcgacaaacattgtgtggtttctgctttttcactgttgataatgcatgtggtggctccataaacaaatccttgattgtgttttaggttagtcttgtgatgcattcttagaagaggcatcactgaatcaatggctgtgagtgtttttaggtctggataacatttgctaggttgttttccagaaagaaatgaatacgtatattctcaccaccatgtgagagagtgccgtcttactctatctttggtattttctttaccttaattattaataggtctttgattggcttgacaggacaaacatctgtgtctgtgtgcttacagatgtacttcattcatggatagatgctttagtattcacacgcaaggctgcttccacatgggcacgagctcaaagatgctaagtgactcagtgaattgaggagccaggagcaattaatacactctccagtactgacatgtgagttttcaacctcaaggtaccttattcaactggcctgattagaaagtcagcaaagacaagggtgtgtgtgtgcgtgtgcgtgtgtgcatgcatgtatgtgcatgcatgcacatgtgtggtaaaacaacaattgaacaattggattggaatccgtggactgcaggcctcgtgcttagagtgtgctagtgtgggagaagcaagcatgtgcccaacggtcccctggacctggtgtgctgggaactttccacacagaactctgctcctcagcccctatgtgtgtgtggacccctttgggaggcagcagtagagagctcagtttgggccattttatggaaatgcagtgcctgagtcagcatcttgcaagtccctgatgtactttatgcagaggacgatgttagcattccttgtaaacaatgatgtggaacctgtatatcgtcataagctccccaagcagaaggtcagccctttctttggccttgagcctgtctttgggaccttgctgtccgttttcttgattcctggctccttctcactgtctcccccatcagaccacgccggcctgcagtctgctcctgtgttaccaacacactggttttggtgaagcattttgtatattgtattatagtatctgacatttattgagttttcactccaggccaagtgttatatgtgtgtggtggtggataggttgggttaggttttaaagtgaaattgtggggagtcaaaattaccctcatagtccctgaagtcagtaggacttgggaactctgatactcaacatccaagaattaacctgttttttttccttgcatttatttatttacttatttagacggagtctcgctctgtcacccaggctggagtgcaatggcgcgatcttggctcactgcaagctccacctcccaggttcatgccgttcttctgcctcagcctcctgagtagctgggactacgggcgcccaccaccacgcctggctaattttttttttttttgtatttttagtagagatggggtttcaccatgttagccaggatggtctcgatctcctgacctcgtgatccacctgcctcggcctcccaaagtgctgggattacaggtgtgagccaccgcgcccagcctttccttgattttaaatcctggcttccatttatttggagccaaagccagtatgtagtttaaatgatgtgggattatggggatgaataaggggctctccttccttcctgcctttctaccttacacaaattcacctaagctaaatttacagtttgattaactttaccgtatatctccctaattctcacagcagccttgtaaggtagacactgctgctcttagtttagaagaagggatatagagaggttaagtggcttgtaaggccccaccgtttcagttccagagttctagtccctcctgttctacctctggaccgcaggcagctttggaagtcgctgtctcagagcccgccatggaattacttggtcatgtggtttttatgcttgcagctgatagtgaaatcaaaggattcctttctccattatctggcttttcttaatgatacatagccagagttcttattcatttgaatctggtcctcaaggctgagatgttgggatttttatccttgttaatttggaccttttccttcagagaacaagttctatttctgttccactcaaatgcagtttcatgtttttcccaattcattttcttttttaaaaaatgagtttctcttcatttccagttttaaaattacagtcattgttgaagtggttctggctctaagaggaaataaaccaacaaatacataagaggtatcctcccacttttagccctcctaatataaatgccacataatttaatatccaggaacttgagtaattcaaaccagcacctttgaaaactcttaagactaaactcacccaagtcggccacagccagcagagggtgcctgctttgtgttaggagttcttgtggttgggaggcggcacctttgggaatgtcctgaagactgtggatcctcttctccccagacagacgcctggccccacacctcacttaaagtttcagaaatttcatggactctctttcctgggtctgattcttaatccctttaaagccatactgaggagcatggtcaagactgatctgacggaccttcatttttcgtgtagttttctccattcctggctgctgttgcatgttatgcataatttttattttgttcctagaaatgttaatggactttaaaagcttaatggcatttagttaggagatccttgtggtatattctgtgatctgttgttttctttgtatttccaattcagtgtcacaacctgggaaaaataaatttctgctcacagattgattcattgtcgaggaatgccttattctgatgttacgcggtttctttcctggctcatgcatgcccccatttgtgcgtttatagaaagtgtaagtcctgtgctagtcagagcaagactctgtcagtgaagacgatggtgactagtggcgggttcaccgtgtcagacactgcgctaagcaggtcattacatgatcacctggaattcttaaatgccctctggcgacaccaccatacatgactgttgtgactcccccaggttgcccgtcaaggccgtgctgtgaccgttctcccggccccagaactcatggtttctccaccagcttgtcacctcaaagagtaaaggccagagaaagacctgttgagaattcagatgtggtgttgattttttcttggtcatatatttgcaatatttgtccttcagcttttgcatttgtatccacgagtgacagtggtgtgtagggttttttggtggagtaccgttttcctcaggtttaggaataaatgttatgcttgcctcataaaaggaagtaggaagtttacttcatttcccatggccccctccccgtgtcttctcctccccatggttttccacccatcacggagccttgggtgggtggcaaggggcgatcgcggtggagatgactccttctcactggcagtgtggcattctctgaggatagggtttagtgcagtgtgcgttgtccttcttgctttttttttttttttttttttgagatggagtctcgccctgttgcccaggctgaagtgaagtggtgtgatcttggctcactgcaacctctgcctctcaggttcaagcaattctcctgcctcagcctcctgattagctgggattacaggcacctgccaccacgcctggctaatttttttatttttagtagagatgaggtttcaccatgttggttaggctagtcttgaactcctgaccttgtgatccgcctgccttggcctcccaaagtgctgggatgacaggcgtgagccactgtgcccggcctcctccttgctttttggcatcatttgggaggaagtgctgggagcaggtagcttgctggctgccattgtcttctgctacttgcatttcctccctctggaaattttacattttctgcctagcacccatctgccttccattcctatctttgagctgttaggatccatcagcagttctagcaggtggcattcttctcaggaccactttctccaaataaacaaaagttaatcatgatcacaaccacagcgtgtgctctgagcagagggcagaggacagtcaaggtgaggtgcaggtcctgggcctcaggtgggccttcccattaggtaagcagtgtcttccgatcctcagtagaaggagaggtttctccaggtccaggattttcagcatggcttggaattagtcgaagccatggagatgaattgaggtgtgtgaaagttctgctcttggacagggctttctcttggccaacccagtgggagggaaacgaggcagtctctgatggggtgagaggaagttcttcttcctctcctgagtctctgccctctctggcctcttccacacagggatgctatttaattctgaggacagagacagggagagaccactgggggggggttggccccctgtgccagggtggcactggccggcagcctctgcactcagatgcgtgtgttctctctctgcactgcccggggcgggtgttgactgcagccacgtggcccctgagcacgggaaatgtgaccagcaccactgaaggttcagttctgtttcattttcatttatttcaaattaagtagccacacgtggcttggttctggtcttgggaaacacagctttagtgtgagaggaagcagaggtggggacaggggtgtggggatgagccaggctgagttgaggctgtgtggccaggtggtctccagcgtttagccttttcacacttgagaaagctgcactcccactttgtggggtgtgggagtttatatttgatatgtgccttttaatattttcttttttctatttgcttttcttgccatctttatcttctcgaaaggaaaaacaaaatggcacaggcaaggctttttgacccagtgaatgggtgagtttgcagactttttatttctcatgatccaagtaaggatttgtagttttcatgatcaaaattaaattttctctttgcagataactaaggaatctactttaccttgaaattttaagtaccagggaaaaaggacatgagagttatgtgtttatcaaaagtggagacactcaagtgcgtagcagaaggcactgggctttggagtcctggaaacctcggttacattctcagccttcgtgctctggggtgtgtggtacgcgtgggcacgcaccctttctcagtgccgtaaactcgggccagtgggagtagtgagtatcttggagggttgttaggaaagttaaagactccagtgtgcagttggctgtcagcaaattgcagctcctttcacttgccagagagagcaggagtctctcaccatcccccaaatcgtctatactactcttggggaagactcttcttttttaggactcacttcataagacggcaaggactctgccattgcagtcccttggcagtagtgatggagtcctgagggtgaggcgcgtccatgctctagcccggggacacgtcacccacttccaggaagggtctgctctaagtctgtctcctctctggttcagtgcagggcaatgcgtgccgcccccgctcagcgttgcctcgagtgttggtgttacgctgctggagagggagcagctcatgtgaaatatggtctgcccacccttcgcctgtccaggggccctccctgggctcaggggccatcagcgtgtggtggccacagcgttttcacaaggccagcttgcctggtgaagggagagggtggggaggggaggtgagtctcctttagaaagctgtttgatatcatggttagaggtttggtggtttcagttaacttgattttctgttcaataggggcctgggtgtgctgggcttcctctgagtgtctgatcatgcaggttttcagggtgagtcatctgtgtgtcaggcacagctggtcactgatatgactccccaagcaatgaaggcatcagtaggtttcgaaagtggccttaagaaggtacaagtaatattacctctgatgtcagccaagcagagtagagtccaacattagcaccttctctcctgtagctcacattcagagggctgggacgaagcccctgtatttcagcaaattagaaactttggttgaacattcaggactctaagtgatatcctggagtacatgagaaaaaatgggaattcttgttaaaaagtgagtcaaaaaaattataatcctgaagttgcctctgggttactgagttcgcacagtgaattcagatgcacccccactcccccgcagcccctgtcacaagggccgtatgggcagtttgaaaatacagttagaaaccatgaagcttcagaaagttcttggaaaatgaccagtcattaaatggattcaaagctcgaagtttgggtgacatttctccctgtgattccgtctcgcccccctcctttccgagtctaggagtcttgcagcggtcacttccccaggcggctctgctgctgtgctatgggccgtctgtgggctggaaccagttagacttcctccctgtccttctatcccattctcttcctcaaagatgcccgtgtctctgtagcctttgctgtcgcgctgtctcctgggccctcctctgaactctgaacccatgtctctgtagcctttgctgttgtgctgtctcctggcccctcctctgaactctgaccccgtgtctctgtagcctttgctgtcgcgctgtctcctggcccctcctctgaactctgaacccatgactctgtagcctttgctgttgtgctgtctcctggcccctcctctgaactctgaagcgctgtgcttatgcaactgtttgctgtcacttgatcactgtcagcattggattattctgtcctcatcagcttttgagttaatgccaggctctgagtgcctcatcctcagcactgttccaccttagtggagaatttattaggtgccagagggtgccgggcatgtgctggtcaccttgacactcatggttctttccttgagttgtcccctcacctgtgatggctgtagggacttgttgcctttgcgctgtgattgggtgaggcctgggagcctcagtgtggtgggtcctcctggggccaggctcctcgcggttctgcacgccctcttcctggggccaggctcctcgcagttctgcacgccctcgtcctggggccaggctcctcgtggttctgcatgccctcgtggctccccgcacagcctccctgctggggagctttcaggattcctccagaagcaactcagaatatacaggcagtgccccaaacagtacatagcacatctctttaatgaactgtgcccgctggggcctggggccagggccggcattcccatcctcctttgatgatctccattaccaaacaattttggcggacagcctgacaagcggagcgtgagacagactcatggtaattatggatctttctgtcggattctggacaagggctgtcagttaaccgctcaggctctgcaatggagccctgaacaaaagaatcaggtgtgaacgggagcctcactctgcgaggacacacagcccagtagggcagaaagttattcttgagtatttaccaggctggcaaggagcagtatttaccctgctcttcgtaagccacactgacctagtctgcagcagttttaaagtttttaactcaaagtaaaaacaaaactactcaccaaaaagcaaactcacaaaaataaacgaatgagactagtcttggggactgaaaattgtttcaaaatctctaagtgtacagctgttcttgagattaatgttttcagctgacagtcatcatgcttggcttttttgtggggggcagtgacagatagggttcttctgtggtctcctgaggagggccgcagggatttgcattccggcacaggtatgctctgcgctttgcttttgttttgaagaaaggcataatctcgtgtccattttaggatgtttgaacatttcaaactattttataaggattgatgttttgtgatttttatcctgttcttcaaagaacaaggagaaaatcttatttttaaaaaatagaagaaaatgcattctagcctgcagttaccacatggacccaccgcatctgtggggaatccaggatatacagttctgcgccacataatgacgtttctgtcaacactggatggcgtataccacagaactgtgtgcgagctggagaattcctctcacctggtgacatcatggccattgtaatgtcttagcagcatgcattaaccacgtgtttgtgctgatgctggtgtcaacaaacctactgcactgccggtctgtaagaaatgcagttcataatacttgatcatgatagtaaatgactgtgttactggtttaagtgcttagtatactataatcgttattttagaatgtaatacttctaaaaaaaaagttatttaaaaaaaaagttaactgtaaaacagcctcaggctggtctttcaggaggtatccagaagaaggcatagttatcagaggagacgatagctccctgtgtgctgttgtccctgaagaccttccagtgggacaaggtgtggaggtggaattaatgtgatattgatgatcctgtgatatgaatgatcctgaccctgtgtaggcctaggctaatgtgtgtgtttgtatcttagcatttaacaaaaaagttgaaaaagtaaaaaaaaaaattaaagacagaaaaaagcttatagaataagaaaatgaagaaaaaataattttggtacagctgtacaatgtatctgagttttaaactaagtattattataaaaaagtcaagttaaaaagttaataaagtaaaaaaggtacattaactaaagttcatttattactgatgaaggaaattaataataataaatgtcgtgtggcctaagtgcacagtgctcgtgaagtctccagctgtgcactgtaatgtcccaggcctcgcagccactcagcactcactcactgactcacccagagcaacttccagtcctgcacgccccactcatggtaaatgccttagacaggtgtacagttttttgtcttcactactttatctgtagtgtaccttttctgtgtttagatatgtttcgatacacaaaaactgacctttgtgttcatttgcccgcagtattcactacagtaacacgctgcacaggtttgtggcccaggagcaacaggctataccatatagcctaggtgtgcagtaggcttcgctctaggtgtgtgtaagtgcactctgtgatgttaacgatgaaatagacgagtgatgcatttctcagaatgtgtccctgttaagcagtgcatggctgcatgatcacatcttaatggtatttttttttatctttatctggaaacattttgctgttttctctttcttgatattattttatcattattaatcagttatttctctcttttttttttttttgaggtggagtcttgctctgttgcccaggctggagtgcagtggcacaatctcagcttactgcatcttccacctcccgggttcaagcaattctcctgcctcagcctgcagggtagctgggattacaggcacctgccaccatgcctggctaatttttgtatttttagtagagatggggtttcaccatgttggccaggctggtctcgaactcccgacctgaggtgatccccctgcctcagcctcccaaaatgctgggattacaggcgtgagccaccacagctggccagttatttctcactatggtagaaatggactaaaataatagaatgggagaataagagatggcatcaagaatcatgtgatagtggaataaaccatatcttttatatgatccttgaattttcttactatgttacccatatgattgcattatcttccaaaaaggtgtgaaaacaatctggagacaccatttttgaagtctgtttttcttttagctttcattaagcacagagaatttagaattttttatttttcacttgtaatagcaatgagaggaaaattggcagaggaagacatttcaccattattaaatgaatcagaagatgaatgcagacagattgagagcagctctctagatgctaatgatgatggtgaaattgatcatatcagcgaattcgcagactgtgcaccttcagtggaagatagcttagatgaattttcttaaaatcaagcatcaacgagtgaatagtattctaaggatatgaagggaatatggtttctcatccaattagtcattcaaaaggatgggctttatcacacaatattttatgacaagaatgtggaccatccccttttgttaaacagataagtgacagtattctttcatcttttaagacgtttatggaccaaatttggtacacttagtaaatggataattgctaaaagcaatcaagagataattggaaggaaatagaggcagagatgaaaatacccattggcttggtcattgtaattgatgttcataaatctaaaaaggaaaatcttctcccattttggagcatagaagatgactgtcttcgacaaaattgtaagccatcaaaattatcaaagagactatgttttgacaatgaaaatatgggagaaatgactagaagtaacgaggagctaaaaccgattagagatgcatttgacatttagaatcaccgttgcgtttcaacaacatcagtgcaagaagaacccaaagcagtgacaagaggggacctatgagagaggaattggaaagctggcatcactgcttacagatgtgacccaggctcagtcatgacagttgatgagcagtcgtttgcattcaagggatattgcccattttagatccactatacaggcatactttggaaatattccagatttggttccagacaactgcaagaaagggagtactgcgagaaagtcacacaaattttttggtttcccagtccatataaaagttatgttttgtactatactgtcatctattaagtgtgcaatatatgtttcaaacagcagcatacataccataatttaaaatgcttccttgctaaaaaatgctgacacaaagacacaaagcatgtacatgctgttgggaaaatggcactgatggacttgctcgacggagggtcactacagaccttcagtttgtaaaaaatgcaggatctgtgaagcacaatagagcaaagcacaatacaacaacgtgcatgagtatatatatatacacacagtccacccttgaacagcatggaggttggggcaccagcacacatatatatgtatatacacagtccacccttgaacagcatggggactggggcactagaatatatatatatatatgtatgtatgtatatatatacacacacacagtctacccttgaacagcatggggactggggcactagaatatatatatatgtatgtgtatgtatacacacacacacacatgcacacacacagtccacccttgaacagcatggaggctagggcactagcacacatatatatgtatatacacagtccacccttgaacagcatggggaccggggcactagaatatatatatatatgtgtgtatgtatatacacacacacacagtccacccttgaacagcatggaggctggggcactagcacacatatatatgtatatacatagtccacccttgaacagcatggggactggggcactagcatacacacacacacacacacacacacacacacacacacacagtccacccttgaacagcatggggactgggacactagaatatatatatatgtatatatgtatacacacacacacacacacacacacacacagtccacccttgaacagcatggaagctggggcactagcacacatatatatgtatatacacagtctacccttgaacagcatggggactggggcactacaatatatatatatatagaatatatatacagaatatatatacagaatatatatacggaatatatatacacagaatatatatacggaatatacacggaatatatatacacggaatatatatacggaatatatatacacggaatatatatacggaatatatatacacggaatatatatacggaatatatatacacggaatatatatacggaatatatatacagggaatatatatacggaatatatatacagggaatatatatacggaatatatatacgcggaatatatatacggaatatatatacgcggaatatatatacggaatatatatacgcggaatatatatacggaatatatatacgcggattatatatgcggaatatatatacgcggaatgtatatacggaatatatatatgcggaatatatatatacggaatatgtatacggaatatatatagaatatatagaatatatatagaatatatatagaatatatagaataatagaatatatgtatagaatatgtatagaatatatgtgtatagaatatgtatagaatatatgtatatagaatatatgtatatgtatatgtatgtatgtatacacacacacacacacacacacacacacacacagtccacccttgaacagcatggggcctggggcaccagcatacatatatatatatatatattatatatatatatacacacagtccacccttgaacagcacggagcctggggcactagcatacgtatataaatacacagtccacccttgaatagcatgggggctgggggcaccagcatacatatatatacacacagtccacagtcttacaggactaggcaggctgcccggcatgtggttcgtattaggtatcagtgatggagccagctttggttttttttgttttaactttgtattgaggtgctttttcattctgagcagtaaataggaaaaaatcctgttctgtatttgggtgaaaagcttagctttataaagctatcttaatgacttcacaaggccccaagcttcaccactcctgttggtttctttggggaagtttcagtgacttccgtgggtaattagacatggctactctggtcacagcgtttcagctgcttagctatgccgctaacgtcacgtgtcgaagtttttacttcagtaataagaattgtatagtattcaagaaggattcaaaccgcgttaatattaaagagcttttcggatccagaaagtgcctgcgaatcccttctgagtgtaatttatacagcacatgtcaattaggaagagggctgatgtgcgctcggccaccagtccacggaggcccctccaagccggcttcaggaagtgcctcttcctgtagcagtcacgtcgccaggcctccccgagggatccttgctgagaaatcaggctttctattactttgctgttctaaatagacctgtgtcccaaatagaaaggaaaaatcaatttaattacttatgaaacttttccttaagggtgaatgaattaggaggaaaagatgaagtatctgtatttcagggcttgactaggagagaaattaatttcagtatgaagatgaggtgtgggccggttggtgaaagcagaacatgcttgcacacggaggtgcgtcacccaggaccgcagggtggagcagctttgtgcttctgggaccaaacgggaaatgagctggaggacccgtggcagcaggaaaatggcgttgaacaggagccagaggacttccgcaggtgtcagtgcaaaagaattatgaaggaggagagagctaattgcaattaatgtaattatgaagagagaaatgtcctccgaagggagctgcccgcctcacttttggcttatgctctcctcccagcctccccgcggcatccatctcggtgtaattaatgagcctcctctcccactcagaagccaggaggtggtggagttggactggaggctgcccagctgtcctagccgggggcagaaagcaaccttgtgttttttccgcacatgatagacctttgcaatatgtctgcttttgtaagaacagaatttaaaacccaaggcagacaaagaatttgtgttttagctggtgaggctttaaacgttcaaccttgaaggctgtaagcacagagtagcggcatgggctgctggtccgccaggactggagcatcggggactgtgcctggaaaggggaataaacccctcctctctcctacttgtgtattccgcctggtccatctgtctgtctcccatttaatgcgtataattcagtggtttttagtgtcttcacagaattgtgcaacaattgccacactcttgttccaagacatttcatctcaagatgaaaccctggtccctccagcagccacatgacctttcctcagcccctggtgaccactgatctgcttttcgtctgcatggatttgccctttctgacatttcatgttatatgttcacagcatcctacggcatgtggccttttttgattggcttctttcattgaccgtaatgtttttgaggttcgccggtattgtagcacgcgtcagtactccggtcctttttatggctgaataatattccatatagaccacgtcttgtttatccattcatcaatggatggacatttgggttgtttgcacttctggctattatgaacagtgctgctgtaagcatttagtatagtttctatgtgggcatgattttatttctcttgagatatacctaggagtggaattgctggttcatatgggaattttaccttttacctttgaagaactgttttccaaagtgcctgctccatttaccatcccatcagcaaaggaggagggttgtgtttctccacatccctgtcagcacttactattgtttgtgtttttattttagccatcctactgggtataaagtggtagcttgttgtgtttctgtttgtatttcctggatgattactaatgtgtttatttttgttttgttttttcttcatcggcaattacatttgatactgattggattcacttaaaaatttttaaactttaaatctattttacttgcattaaattctatgcattcctcttttttttgagacggagtcttgctccgtctcccaggctggagtgcagtggcgcaatcttggctcactgcaatctccgcctcccaggttcacgccattctcctgcctcagcctcccaagtagctgggactacaggcgcccgccaccatgcccggctaatttcttgtatttttagtagagatggggtttcaccgtgttagccaggatggtcttgatctcatgaccttgtaatctgcccaccttggcctcccaaagtgctgggattataggcgtgagccaccgtgcccagcctgtactccattttttaaaaaataaaacttttcattccatgctctttgatctattataacttgagtggaattggtctcacattttatacaatgaagatacttttattttatcgtgattactcttttgccttttttgttggttagaggaaaaaagaatccttaaagatgagtgtgaaaatttgatttattttttaattcacaaaagctgaaagttgaacatgtagatgatttttcttttaagatagataattaaatatgtatagattatctcaatttctgtcatcttgtgcctgagagattgaaggaaaatctggaaataagaggcaaccacttcaaactttgcaacttcatgcatttagcaactgagccacttccaaatctgtagtttggtcatgaccttagttcttaaaagtcagagtggaatcctcatcttctggtctccttggattttcagttcagtaccacaaacttttgaaaaactactggtgggtttttgaaatgccagattgtgtgccatgatctttgctcttaggcagtttaaatttcgggagggatacatggcaatttattgtattcattcactcattcattcagcgcttattgctgggggctgtagaaacagaggtgatgaaaattagaaggcctgtttgacggttgtggtggaggcggcagctgacgtttatttagcacgttgtttctgaagcttttaaagaactttccttgttattatgtcttactaattcatgaagatgatgctgttatcacccctgttttacaagagattgaataacttgatcaaggtctcagagctactgagggtctgagccaggatcctaacccaggctgcagctgtgctgacggcatttctcgttatggggaaaggtgtgaccaactagctgacatcagaagccccagggggttaaggctgtgtcctggggtctgcatttgtctcccagcctccgagtccttctgccctttcctctgtgggcctgtacaggagcagggttcccccctggttaccctctgtcagggcacacactttgctgatgcaatattacctgcctcgtgccttccttgggtttggtagtatgatccttctgtagaggcgggtcgaggcacaaagaaggaaataactcatccacggcccacagctcaaaataaatggcagtgagcttcatcctgctgactagtattttgtacccttttctttagaacttacttttctactcaatgctgcagaactgggaccccaagtactttagaataatttttatcagcggctgaaacaacagtgacattctgtgtaattctcactctggttggaagaagaggttttaggagccttgtgattctgcacagtattggctcttatcgtttctcccttaaaggtgtgtgtacacagctttccaaagggagggaatggagtgttgctaccagcttcctccgtgtaggttcgttttctcttccggacgggccagcataagcttgtgcaccgtaggagctgctggcctcatccagccggtgtgacagtacccgcttgggcctgtgtggctgaactgaaccacgttcccatccttggctgcacagaggatgctgtgtggaatagagctggccagcacacacaggcttctcccaccaggctgtaagaggttgcaggagaaaggtgcccctgacgagcagaggccttggtgctccctgctcccccttgttccttcaggaggctggtgagcctcagtgactctccttcttgtctaaagggtggcactgggctcacaagcaagtagaagcctgaggccggccagccagatggagagtagatagagctgtaagatccaagggcacaggtggccgcctcactgcctcatccacagaagcactgagtaggtgcacaaggagggcctctgggactgtgcttgcgtgagtcccacggctgtgcgggcactgggctcctgttgatgactgagtttcccaggcagttttcattttgaggtgagtctgtttcattcattcagtcacagcatcctcagctgctgttgcagcaagtctgtgctacctggaatgagcctggggccccttcctctaggttggtattcagaccagcgtgcttgactgcattaggaagtgcattctgagcaaacctctagaggtttctttgcaacctgataacacctcctcctacttgtatgttggcattttatgtctccagtaggttttagggagagatttaagctgctccgtctttctgggatgtttgtagtacagtccagttgtataatttcagtggcctgaatattgagccgtggccttctccaggaggagcaagtcttcatcataggatttgaggccgaggggtctttagagactgccaggcccagcctccccaggccacaccgttatgtggatgaggtgatagagctgtgtgctgcctctctgaagagtgctgtgaatcggtagaaagaaatgctaataggtccccagtttgaatggggaaaacatttgctgtatcagctgatggaccctaaatcacccactttctgtgggttttgttgtttggacatggttcttgggttcttctcagtcgctctgtctggacccagatgtgtgaagtcgaatggctaagggtggttgaagtcagggtcatccgagtagagccatttgttcttagttaaaaaggcccaggccacatggggctcagtgacttagccctgcgcattaaaggtggacggttggacgtttgagacccttcagtcctccaccgtcatctaacaggtggggcaataagggcctagaacctgctgaacctgctggtgggacagaggcaggtctatagctgccccctccaggccaccaccatcttcgttgcgctatttcaaggcctcgtggaagccatgggctgctgctcccgcttgtctgtgttgtgttcgtctgtgttgcacgtcctagtttctttcatacattccctctggcccttgcaagtgtgatctctccctcctgtctccctccctttctccctccctcttcctccctcacgctgttgccaggagtgggaggtgggcagagacgcctgcccaaggaacctggccagagatatcatgaggactgcctggctctccatatcaacctgttcagtagtctgcctgttctttctgaggattctgtggccacctttccattctgttgctaactttggggacctgtttgtttagctctttctcatcaagagagaatcagaaaaattgccagggcttttagaatcctgccctcacctgataaactcgccttttaatgccagctgtgaatgagagaaggacgctctttgtacacttgcataaatgaggtgctctgagctacgttgggttgtctaggaaacatgcctttggagggcggcaaggacggagggctgggatattagaggcgaacaggagagatttgcaaaacaaagcaaataaaaacaaacctgcatatcttcaaataaaacattttagctgaaagagagaaaacaagaaatcaaagccccttaagcaggaaagattttcattttcattttcagtcttaaattgacaagtaagatggcatgcagacctttttcccctttgttctacgccagagcaagacttcgttaaagaaacagtattagagtttcccaccaactcttgactgctcaccatttaagagtcatttttatacagggtcatgcctttgtagtcaagagcctacattcttggtaatgccctttgagattttcccacatgctgggtgcccatgggggtagagtctcctccaccaaaaccttggttgcagtcatgagctttgctcatccccccacggtgggtttctcactccgggtgtgtattggtcgataaccctttgagtctctggagttggtctctctgtgttccgtggcaatggtttgtgctcagcttggtttgggaaatctttgatgcagcacagaagctgtcttccctctttggtctttgtccccgtggggcagaagctgcaatttctcaagaagaaagaaatgatagttgctgaaacggagcctgctcctattgttaagaggccccgtgagacaggtaaagaccgtgcctttctccacagaatcaatttcatcttgtaagcacggccaaacagaaacatgctaccgaagtcagaaaatcagaaaatcagaaaatcaccggagaggcccgtcacacacatttaccttatgcagactgaacactatgtgccgggggtgagagccacacaggtagatcagcctgcttccaggcacgggagttctgtctgcctttcgctgaggagcagaagccctgtgggaagcaggagtggagcgccacttctgagtgagggtcactcatttcatctgatgttgggaagaaatgacagtctgacccaatgagggagcacaaatttgggctcctaaaagagtctttgttcaagagactgattgtgtcgcattttgcttctcttccatttttgagtcctgtcttcacacctgaccctcaaagaagacgcaacatcaaggtccacccgaatacctggaaccaccatgagcatgacaacagccggtcacactcgtgtggttcagggagtcagaggctgtgagtgccagagggaacctcgggatcatctgagtcatcctccccattctcagggaaacctatgccagagaaagaagttggttttccgagggccccatctgtgatggagctgagcctgaccccgtcccccatgtctgctctgatgctcccctccagccctgcctcctgccacaatgtttgtgtggggccttgaagagggcatggcctgctttaaatgttctcatgtagatctggggtatgtctggcagttattcctactcgtttggtgatagagcaaatggaggcttcagatggaagcgtctgaatggatctcttgttagcaaatttatatcatttcatccatctgccgaccaggtatctctgcacgcagggaacttttattcttttggtggggagagagaaatactaagttggatattggcaagcactaagaagcactaagaagaaagaactgagaaaggaaaagaaagtgttgcagtctttaatgctggctcagcaaggcctcactgagccggtcagcagtgatgggagtggtgagcaccatgcgcaagggcaggcaagtgagtgcggagacttccagggggccctgaggcctgagccgaggctgctggggctggagcaggctgagcaggggagggctgtgctcagtgtcatctgagcagcaatgacccccatggggcctggaggccagtggagggacattggttaacgtgggttaacatggccttttttgaaaagggtcgccttgggaacgtactgagactaggttgtagggagaagctgggtggactccaggagaccagttaggtcattgtgctaagccaagttggagtgatcggtggtggcttggagcaagagggtggtaatagtggctggatttgactctggtttgaaagttgagctgatgaaagggtttgctcatgaatcagaggaacgattgagagggtagttgaagatggctccaaggtttatgcctcactggcagggagggtagagttgccattcctgagtggctggtaggagaggttctgggtttggaaggatggcaggagcttagtcttggatgggtgccgtttgtgtggcctgttgcacatcctaatcattcaacactcttagtcaaaaccccacgggtctttacgttgtcctcccaggcagtcgttgatttctgcccccgttttgaggtccttgtgtccactgtggaatgctggactgtcctttagggccgatggctggatggaggctttagggcccactggttcccactttcctgcctgaggtcagagccagctgtcatctcggagcttcatgttcttcctttccagtgtggacatggcgatgtctcatcaggaagttgcaaggaacaacaggaggatggtggtggtagctttcctagattgaggtattcacggtagatgtgcgcgaatgacgggtgagtgtggaggagaatctgaagaggtagagagagcgccttttacgaacccttgcgtctccgggatggatgtgtgcatggataaccggggacaatacaaaaccaaacacaccccacacctctgcagttctgttatttttctccagtttaccagtgtagttttaattctgttccttttctctagagaagttccttataaataatctccctctcacattccttgtaagtgttcgggatatgtgtttgtcctgaaatacgtgtgtgagtctgcatccatccgtagaagtgtgtatgcataggcgcatgtttgtggacagaaacagcccagcacttccggagctttcagctgtccctgtacgtggcattgggcctacctaacctttgcttctttgccgtagactctccatctgcaaaatagagacaatccttgcagcttttcttctctctgggaggttaatgattgagtgtatgtatagtgctgggaagcctttgaagtaaaatcacaaagtacatgtgtattatttttgtagctctaatggtatttatatttaaatcattattattacaataataatacactggtttgccaataaaacacaaaccacttcagaagaacgttctaaaatggtagcattttctgaggccgggcagcagtgtctaattttgggccttcacagtcagtttcgcgattcatgtgttatgcattttcaaagaataatcaagagcatgcaggattgcccggggcagtgagtactgaaaatgtacagttgggccagttgtgctaagagagtgatgggacatctgcacggacatggctgtatttcacgccagttaggggctgtcactgcagccggcgccatcttggagccctcggagcttgacttggtgataatgcgtcatcagagctgagcaccttgtgtcagctgtccagttacagcgaggtgtaaagtggacgagtgtctcagtgatgactgatgggttttttctttcagatccatgcaaaattcataaacctgatttataaccagtggaatttgtgctgccggaagcagaaggctcaaatgcggagctttgttttgtaggaaatgtctttctttaaggtgtcctgatgctttcatccctgagcacatccaggtgatgacaccagaggctctgcatgaggggagacgaggaagcaggtgtacctggtctcctttcatcttgcaggaaatcccatttagcttattggagttggaccaatgatcacattaagagcagaagtcacagagcaggctgtttgttacgagttttgtaaataagatgtatcctgctgagccccacagcacagggcacgtggatgtccacagggggacagattgtggccaggcacccttggcaagcaagttcttactgaggtcagaagtgactggcctgccctgtgtgtggttgacactttgcagccatcatatccctcacagcatgtccacatctttgaaagcattttcctcccaggctccgggacagcaagccttcctggccttggcattcctgtggaccctgtccctcctcaccatggccttggcattcctgtggaccctgtccctcctcaccatcattttcggcttctgtgtgtgccgcttgtcctcctctgcctgggctgttggttctctcgagctttcttcttgaccttctcccctttcatcctgcgttctccactcttgcatgctagtgtcttcattgaactgtgtacttaaaggtccacaagtggcttttagcaggtttaggagcctcctgacatgataccaaatgttatatctctgtacgtttttctggataaaggaagcatcgtttttatcagttttgggtgtgggtgttggcctgcaaggttaagatgtcgtgctctgaaatgtcagctttctagcccagatctgtgtcctgagctccactcccttgtatccacctgcctccttgccagctccttgaagatgctggtaccacagagtccagtgctggaggcagaggcagcatgctgtcccacacctgctgccttggccatattctttggtcagtacatctgcccagtctgctgaaacctgagggcccctggattctctctctcaaccccttagcattgttggtaccagagctgactctgtccctggtcaccctctcctgtcctccacgtcaggaccaccccgttgtctcctgcctctggccaccctcttgccacattgcttggatggcctttcaccaggtctgatccgagggtggtctcatctttgtcttagcagccgaggtctgtgaccttgaccacctggtgaagtgtttgctgtaaagtcactcttttttccttgcttcccatactgcactctctggaaggaagtcactgtgtgcagcccacactgaacgggtgggggtcatacttcacttccttgaggggagagcatgttcagaaattatttggaatttttttgcatgagagacttttctgttttccacatttaatttatccaattatttatatcaatatgaattttaaaatacttcatatttcgagttgcagtcaatattacattatatgttttattgctcagattgattcacctttgccattggatggtctttctgttggcccctgggttccatgacacactctcatctgtgtgtgtgtgtggccatttctccaaggagccctagttccttttattggtggattgtattaaaaccaagatctgtatgcctggtatgttccttgtcaattatcttttaaagaaattatttaaaaaatgcctttcatatttaccttcatttttataatttcctgtttttttttcatttatttttgtaggtctgtatctacttggccttaaacatgatttcttttgcctgaagaactttaacactttttgtagctttagtttgtctgaaaaaacatttcactttgtttttgaaacatatttttactgggtacagaatcctgggttaccagttttattcccagtcctttaacactgtcattctattgtctttttgtcctgcataatttcggattggaagtcttttgtcattattatctttggtccatggcttaggatttgatagaattctgtcaaagttagccaaatctaatattaacattgactgagtatttacctctatcaggtgctttgttcagcttagctgtgcatgtgtgtgattctcccaacacccttaagagggaggcagggagggaggtggcatttttccatgtataggtaaggaagctgagagttgatcaggttaactgatttgttgaaggccacttaactaggaggtagcagagctgtgatggtctgatgccagagacagtctgcatcttaaccactttattgaattcatcctcttcagaaggtcgaggatcaggtcacggtcacactagtgtagttaaaatgctgttaccacagtagcaagtccacagggcccataggcactagagtcagacaggtccacagtagcaagtccacagggcccataggcactagagtcagacaggccccagccccagtcccgctctgcttcttgcaggctgcgtgactttgaacatgtcctttgccttgctcagtttgtgttttacctcttaaataggtgagagctgctgtttgctttagatcaggattaagaaacgtgatgcgtgtatgtgagtactgcggtcaacactgggaagtgtttcttggttggggtgtgctcattcctatctgttgaatgaacgaattggattttgtgcaggtcagatacgttgatttccttgttcaaggcggagagttgtgggcatagcacacactcgagcatcttgcctcacatttcaacccctctcattggccccctctcctgggctcatctttccaaagcacagccctcatgacgtcactatgtctgtggctccatgctctgggtggagagcaggagctgaggacgccgagctgagtgatgtggaggatgggacaaaacagccaccgaacgtggctgagtaccagcgtgtgttcagctgattcgtttgggctggagtgaaatgggtcatctacccattagggatctaattggaaataatactgtgcaatttaatacagtgatttcttaacatttttttagcccaaattagcaaaatgcttcaaaatgttacaggcaagtgaagtggaaataattgaatcccaggaaaggataaatggattgtattggaatatttcaaggaggaatttctgatcagcttaggaagcgaaggggttatccttgtgatattttattgaaccacaaaatgttatttataacccatgtcaggagcaattaaactgattgatgattaaggaagtttaatagttgaataataagacgcggcttttgagagctgttttttctcattctggaagcgtatttcgtgagtctagtaacagtgttaaggacaggccattgctatgctgtggggtcattatgtggtggtaatgttcagcgtagtgttacgtggtatgttacttataaaaaattaaaaattaaaataccaattatgtttgtttgatttgttattgaagtggtttgttaattttgatttacccaaagcagggttaattactacatattgatatatttgattaaaagtacgctaacgatgaataagaaaggccaaacaaaataaattattttccactcaccctgaatagtttcagaattttagcagtctttcatgtttatgtaaaaaggcagcttcacactggaaggatttgccgtgattggcagcttcttaggcatatgtatcagcagaggccgtatttgcattttgaaaacaacctatgctactcaccttgacacgttttcgtttgtgtgtgtgtggtagtatttgtctttatgagccatttcttatgttcgggaagattaataaattaaaattctttcttttagaaataagcagacatgttacaaagtaggaaacacaaatgactaataagctgaaaaaaccgtctaacttcacaggtaatgaaaatgcaaattgaaccaataatgcagttctatttttgtctatcaaatcatcacaaattaaaaaagataatactcagtgctcttcaggtgaggtgaagttgacactcttccagtcttttgctgtgaaacaaccattctggaaagcagtttgctggccactgaacagcccagtgcctccctgtcccgaggacatagaaggtgatgtgtgtgaaggctgagcacggggctccctgtggaggcaaatgtttgcatgagttgaggcttgaaccagcccagatgcccaccgatagaggaagtttaaagccattgggtacattgatttctgtgtcgccctaaacatgatttcataaaaacctttttcagtatgtgaaaatgatcagggtataaataaaaacaataggacataaaacttcatatttagtctcaattctggtttattgaaaatgtgtgtgtgtgtgtgaatgttagggggctgaattgcttccccagaattcatctgttgaagtcctaacccctaataccacagaagatgtttggagatagggtctttaaagaggtaataaagataaagtgaggccattagggtgtgccctaaccccatggaactgatgtcctaataagaagaagagatgtggggccaggcacagtggctcacgcctgtaatcccagctctttgggaggctgaggtgggcacatcactaggtcaggagatcgagaccgtcctggctaacacggtgaaaccctgtctccactaatggatgatttaattttcttttttaagcttttctgtattctccaaattacttacaagtatcatgtaataaagcattattgggaggtttccttctttgtccgtatagagagacttagaagaagcagagagaagccacttccttttcaggggtcaacctggtcagctctgagttgaaggcgttgtgctgggatgtgtagtgccctgtcaagcccgaaagttgagtgcgtctcgtgtggtgtgtgcagaagcctgtgggcctgtggtccgccgtctgtggggcgcgttcccctcagcgtggcagtggtggtacacacaggccactgtgagatggccgaggggtgtgagtgaggagacactaggggctttaggtgaggcacttcctctgtctttcagatggaggcttagattctaaaccagcacagactgttgagcacagactttccgggatttacatgttttttgtgttgctggttaggctggggccagatccggcctgaactaagttccagaagggtgtgtgggagtcgggcaggtaagaaacaaggaacccagggaaaggctggggtgcagccagccctggcagcgctgggcagaggccatggcaggtccctgaaggctcgcctgtggaggccttgctctgaagacagtggggagcctcgagacctttctgttagagagggacgcggtctccaccttccagccagctgatgtacccattgcaggcaccaggtgtgatgggccaggggaccccatgaaagcacccctcttcacctgggcatacagctgtttggaaataaaacaaaagtctgcagagggaggtttgagtagtgctgtattagtctgttcccacactctgtaaagaatactacctgagactaggtcattataaaggaaagaggtttaactgactcacagttctgcaggcttaacaggaagcatggctggaaggccttaggaaacttacaatcatggtggaaggcgaagggaaagcaggcatcttcttcacaaggcagcaggagagagtgagtgccagcaggggaaatgtcggatgcttataagaccagcacatctcgtgagaactcactgtcacaagaatagcatgggggagactgccccccgattcaatcacctccctccctgaacacgtggggattacaattggagatgagacttgggtgggggcacagaaccaaaccgtatcaagtgccttgactaccagtcagcagatgggttggaactggctcgggatcccagaatgaggacagcgtgggccagctaagctgagtggggccttccagcgccagagacgccatgctgggcaggcgagaggtgaggctgtgcctgggctgcttatgtgaggaagcggatcacacctcttgcagccacccagcacccagtttgcctcctcgaggggagggacggccatcaaacagtgtgcatggaacacgtttctaacaatagtggacagatccatttgcagatgatggagggtggactggagctggggcatcagaggcaggaggcataggatagccccctgaactggtgatggcagaacccccacagagcaccctgcatctcctgcatttctcgggggttgggggagtgatggggtaggcctgggggctcctggaggagggtgctgcctggatggggtttctgcaggtcggggagcagttacagtgttgagtgtggctctcatcagggagccctgagggcttggcccaaggattgaccgtttcttttatatttctacatggcaccctgctctggcggttgtgacctcctgggagtttcgtagaaccagggaggtttattgatcaggtccattcagtcctctatttggttccctttggggctggaggtacaagctggctgcctgttctgagtggctgtgcaaaccttgtgacccccagccccttcacgtctccctgtggctggggtcccagggcagcctgtatcctctctgcaccgtggctgctcaaccatcagtcgttacattgggatgggacagggggctcggcatatgcatgtggagaggccgccaccttgtccacctgggtgtccgtctcaccgttggagagctgggagtcctggccagttccacctgttcaatgtgtgatgcagagttaattctccagcccatcttcactcagccagcctccgtgtctacttggcacaaggattagctcttcatgcataagcgttttgtagcagggcgtctctagccctgtgcccagcgtcgggacttttcccccagctgctggaacagttttctgtgttccaaaggagacagcaggctttgcttcttttaaaaagttgctgttcgacctttgccttacccgtagacttactggattggagggaattagcatttctttctagaaaggagaatcactctgtttactttgaatgtgctcctgcctaggcctgcggttcctgaaacagagcagcagccttctcattgtctgagtaccttcatgaaatgcatggagacacaagatgttttcacgacacaatacaccatgctcattcttcccgctgcttgtgaagcgggaagctctccttctaattcagtataaaatgaaacgggcattggctgtcgctcactgaggtggcttcagttatgagaatgtgtgctcccggccgtctctcctgacagctcagccagacagagcgtttcttgttggttttcgctttcctggatgaggaactgtggggctttaggatcttgccctgtgttttccgttctacccaacaaaaaactaaaaccaaagcaacccctaaactacgtgactgatggatgatgagtttgtgaggagtctgtggtatggggctggtgtgagggtggcacaagagaaggacacacacactttgggtcttgcctggactcagccatggagctagacatgcagtgttgtgaacagtgggtcctgacaccgacccgcaggttggttggcggggccaggtgcaggtggtgtcaggacacagggtgtgggtgtggctgccgcagcgggcagcattgccacctccctatgagccttggccctctgcctctgtgctgtgacttttgtggtccctggtttgagaggcctgctgggagtcaggctgtttccttgctgccacactggagacagacagaccccaggagggaaaggtccatttcctggtcccttgtgccggtggcctctctgtcccctcccctgtccttcggctcggttctggtgcccaggattgccatggacctctgattcactctgattctgcttggtcagagccggccaagcccagccgcgcctcctggctttctgggcagcctggcacccgtcagttcactcttgtcgggaggttttcctatgacttactgtcagcctggacttggcttttccagactccacgttttctaatgacctgccatcggcatttgcttttttgacatttacttggcttcttggccctcgaaactgactgggttcacttagcctttttagcactgccttcagacacctctgaaagtctcctttagctttgtccacaggctccttttgaattcttctggcccaaacctgcatcagctaagagccctggttccttgtagcagaggatggtgtcaaagactaacatctcgttagttagcaggggaatcacacagtgggactgactgctagtgatggagcaggcaaaagggcctgagtctcttctgttacctccaatttaactaagtgcttcttacctgcctccaacaggaatgttgttattagtgcgtttttcacggtctttggtactggcctgttatatagtgccatatcagacattatgtaggaggtacagtgttggactcatcttttttttttttgagacggagtttttgctctgttgcccaggctggactgcagcggcacgatatgggctcactgcaacctccgactcctgggttcaagcgattcttctgcatcagcctcctgagtagctgggattacaggcacccaccaccacgcccagctaatttttgtgtttttattagagacgggttttcgccatgttggccaggctggtcttgaactcctgacctcaaatgatctgccggcctcagtcccccaaagtgctgggattacaggtgtgaggcatcacgcctggcctcttggcgtcttttggccctttggcagtgtccccaaccaggcagtctgctctgccactaccacacaggcatagctgaggacaaaagatacccagtccaggccaggcgcggcgtggtggctcatgcctgtaatcccagcatttttggaggccgaggcgggtggatcacgaggtcaggagattgagaccatcctggctaacacggtgaaacgctgtctcgactaaaaaatacaaaaaattagccaggcgtggtggcgggtgcctgtagtcccagctacttgggaggctgaggcaggagaatggcgtgaacccaggaggcggagcttgcagtgagccagtgagccgagactgtgccactacactccagcctgggagacagagcgagacaccatctcaaaaaaaaaaaaaaaaaaaaaaagatacccagtccgtagctaagaggacacatctcagagacaagaaaaaaaaaaaacaaaacccgtgcccaggactccttcatggaagatacaaacacagatctttgaagcctcattttgaggcttaaactcttcattttcttggtaattagtgtcagtcaatttactttttatcctaggcagctttcatattgaactctaatttctagactgcttttgagtaaacagagatattcattgtaccataatattaagacaatcttgttttgtaaaaaatcagtcaagaactttggaaaatatggcaaatgatgtcaagaatcatccaccttccttatgtatttgtcctcagattcaatttgagtaattgctgtagattcacacctaagttctgccgcagccagctcaaagacaccagcaccttagctcatagtgcatttccgtgtaattttgtattcacgttacatttagcttttcaagcgactccagacatttctgagaccatccttagagcttgtatccacatgaaacaaatacagaaacttcagcaaatgttcatgtggttttagtgaagtttccagatttccgtatggcttgcaacatttcatgcttgcggccttggttttgcattttgtaattcccatgtgaacatggcgaagaagcttaaagtcatttcttcaggtaatttgtttgatggagaccaggatttgaacccagactttccattcagtagccgttttcttcactccaggacgggggcacggatggctctgtcagggtttgaaagggaccccaagagcagcacagaggaactcggtcagtggtctgagtgcggcacaattgatggcgtcaccagcgtcagagaggcatgtgagagccctggggaatttgctagcagagagtattgtgtgggtttgagtgtgagtgtgtctgagtgtgtattttgacagatttatccagattgtgtgagttggattgtttggtttcctgcatgttttcaaaaagtcactgcaggttcctgcagatttcgtcagtggcaggtggttgaacgtacacttcacaggcctcttgcaagtcagcagggctgactgtggccggccctctggtcctggggggagtgtgctgtctgggaggagatgcgggtgtctctaggatcccagcggaggacagctggcttctgcccaggatcggtgctcgccacctcactgcccctcctgctctgcgtggctttaactgagaaccacatgaatcaaagacggatttaaggaacagtcacaactgtgtggaaaacagctaaactttaccagacaataaagaatgtgaattagatctcactgtaatgagaagtttttaccttgccagtgagcagagctgaaaagaaggtcaaggtgctgataagggattggtgaggtggatgatcttaggccctgctggctgtagaataaacttccaacatgtctttcacatattttaccaatatctctcaataaaatgttctactctttcacctgccaatttcacttgagatgtttgtcttaaggaaatctctctgtgtggatcacataccttatagagagaagaggcttactggggcattctttgtaacagtaagatgtttgaaacgatgccagcgtcccacagtaagggtgcggccgtgtagacgaggggattgcagttctgtagataattatgcagcatcctgagggatggcttcaaagagcatgttataaaatgggagatccctgttacaaacgtcagattctacagggcagaaatgcaactgtagtcatgtaacagctgaacaaaacctatgtagaaacaaattgggataaaattagaccaagagatatcctggctgtgttttacataacgtatctgtggctaatttccctctttatttagtattgtgagttcctaaaattttttttgtgacgatgactttaaaagaatcagtgcctgggccgggtgcagtggctcatgcctgtaatcccagcactttgggaggctgaggttggtggatcacaaggtcaggagatcgagaccattcctggctaacatggtgtaaccccgtctctactaaaaatacaaaaaaaaaaaaattagctgggcgtggtggtgggcgcctgtagtcccagctgcttgggaggctgaggcaggagaatggcatgaacttgggaggtggagcttgcagtgagccaagaaggagcgccaccgcactatagcccgggtgacagagcaagactccgtctcaaaaaaaaaaaaaaaaaatcagtgcctgatcaccttaccccatggtgtcttggacatgccctatagaccctgcctgggccacgcagtgctcatcacactgcctgccctgggtcccgcagtgctcatcacactgcctgccctgggtcccgcagtgcccaaggctggaaaggcccagggagccttcagagagctctcaggcctccacgattgtgtggtgttctgctttctcccggccaagtgtattggctctgaatggagcaggcccttgttcctgtgccttccccagctcccagcgagcactacacatattgttcaggaaagtagaaaccttggcaagtataaaacccaagagacaggccatcttggaagcctgagaaggctcttcctttcttttcatccttgaatcaatggtgcacagggcaatttgcaggcataaggtgggatccttctccgggcccaggtgccactccgggcaggacatggggtctttgggctgagcaggctcttctgcattctggggccgtgcacctcccctcccggcctccaagctgtatattggggaggacacagtgtggctggtgccgtgggcaagcttctccagcctttgcctcagcagtggggaggcaggcgcaggagcagggcatgggcccacagggacacctgttatctgaaggctctcgggagctggctggccactgttccttctatgtgctctgatcttgggtccagcaggagcgatgcacgttttcatggggtgctgagatgttcacttgtgataacagagcaccaggacttgagtgtgggcaacacagctgcctgttagtgtgagggccgggctcctgcccctccttggctgccagcggcgtctgtttgattttctggcaggtgcacagtaattggctgtgcacttgttggagccttggtttcatgctgctctgtgtaggaaggctgggccatccgaaacacattctttgtgtgaagcctactttagggtaggcatggagaacaagcagggctgtttgcaaatgatataggtatctgtcacttaggaagaagtttatttgtggggctgttctgcagtcatgccttttgagtaccttctgggcatgtggaggcccctctggcgctcccccacctacagatgacctgcagagcatgcggcctctgccagccaggaaggcctgagaagctggaagggaaggaccctctttgttaaagggaggcccgtatattcttttcagtggatcatgtttctttttgttgagaaattgaagtgccatacaattgattaaattttttcaagcagaagtatactgaaaaacatcccgaaaggaagcagtcttagtttgccttggctttgtgctataatatacatggaccgtctgtccaattttggttttgatacagtagcctcatatccttctgtgattatatccatccagtttggatagttacaatgtaagcagttttttacctgatttgtgtggtccattttctggatgtaatagagagggaggagtgttttgaaatgtatcggttctggatggatgggccagcaggggcactgagggctgaggggtcgagttgccaacccgattcctggcaaggccatgcctgttgagtgaccacagccagcctttcacgtgggctcgttagaattgcgacaggggccacagccacgctgggcactggtgagctgcacgcccgttcttgctctgagcggtggggttcccagctgggatgtaagcagcacccacacaggagcagaactttggggccgagcgtcagagtgatttatcgaagaccaaggattgatgaggaaagggacttaggcttctgtaagtggctccaaccaaagtcaccttgctggagcggtcagtgaacgctggattgtcagagcagcaagctcttccagttagcactttgggatgctagctgcctcatctgaacagcagaggaacctgcattgtgtttttcagtgggtgtatttcttgatttttcgttgtgttattaacagtaaagtgcaaggacaccttctccacaccagcgtgccattttgccatctgacctgtgggggcggggtgccccgcccattctcatttgttacggggccttgtcttgttgccgactcccctgccagacggtgagccatggatgtgcagggcctgggactgtttttctcctggattccgacggcccccgtctcggtaccggctgcactgtctgggctcggcagagctctgtgggttttaaagccttcggcgtgctttgtcagattgttttgcagaatgcattcgtcatctccggagcagcaaatggagaactgtgttttgagtggtccttgtgcttcagagggtctgtttcttgttacttgtgtcagtgggggaatcttggccagttttattggtgagcttggtgaatcttactgaatttatttagtaactaatacacacaggcagagccttgagcaggggtgacatctcggcagcaggcacgacgtctgcctcatcccgtccctgtggccggtggcctggtgtggggtttcgtgatggtgcagtcattggttctccggcagtgtgtttgctacctggaggggcagctgtggtgggcccacatcttcctcctgtgcctcagcagtgctgggccagcaggccccaggtggcagcatctccacccgcctgtgcccacctcgtttccacagcgctggcttcatcacgtccctccctgacacctgcccaggtgcggtgggctggctcctcacacctcccgcagccatggcactctcctggggccctgtgctgagggtaccactctaacaaacagctgtcttctagcgcttcccgtccctctacagggaagtctctggggcctccgcatcacgctccccacaagctcttcctcctctttccgtctgtgaactttctgccttccttcccatcacctgcgctctatccgatcctgccgccctccaggcttggttggaatgccagtggccctgtgctcatgctttccagcccggtcgggctccgtgccttctgccccatcaccctgttcattctccacctggcaggttccagctcacacagcacggctgtgtgagctgcgtccctctgtaacagacggtcgaaagcatcgggagagcccatgagtctgtgagtcagaggagcacatgggcacggcctctcttccaggcactaacatgttctttgtttcgtcctcgcttttctccccgtcccacagtttctcacacatagaagtgtttgatatttgttaatagaagaaatcactgtttcaacaaacagcttttctatgaaccacaactcctactcacagcattattgaaacattaaagatccactcaagccacaagaatactatgagattggaatttttgctttttgcaaaagtgacctcatcaaaacgaggacggcaaaagatacagaaggtttctttcactttttaccgcagtatctatcccacagttgatattttcccaagtgttgcctgcagactttttccacatggaatttggtaccaagttctttgtacaaaaagtaggccagctgcttcacagacactgtcctgttcccaggccccgaggcctcctgctttgggttttggggttggagactcctgactgcgggtctgcttgcgggtggtgggatgggaaacagctatgctgttggtgagaagagtgtgtcggttctcatcatttgggatcactcttggggctggcagttgatcgctggagctggtctgatgctgccacctcgtctagccatgctgagggcgttgtccttgtcctgtgataattgtctgccaacgtctcgccctcccaccgtatgcccgcacttgtgggctgcaggcggatggcccaagcttacagccgtggagcagagtcgggaactgtgactgtggttcagtctgtgtaaccttgattgagttgaacgttatccatataagaattaaacattcccgcactagagccatttgatcataacgttagttgtttttgctgaaccaaagagtttggcgaatttatagtcttgagttgttatgccactctcaccaaggcaggacttttttctccatcctggaacccaaatgtacttaatgaagtgttcaaatctctctcaccaaagtactggagtttccaatttaaaactcccaagttgggaaatgcaaaagattagatccatagagcaattccatcttgcttataaaacagaacatttttgattaccagttaagctcctaattaagtgaagaggcttattgcagggtttgtgcagtgtgggtgatgaatgtggtggtaacggcaatagctccctccttggcactccccgtcggggctggctcttaccgacagcgtttgtgctataggtgactgctctccataccttgctaccagtgtcctggaattctttgaaatgaaaggagctgtttacattggagggattttcccctttccccagtaccaagctcttccatgtagtttaatatgagagagaacttaacccgcatcaagcctttttgttttcgagaaccccctggtaattacaagctacgattccattgcaccccctggtaattacaagctatgattccagtgcaccccctggtaattacaagctatgattccattgcaccccctggtaattacaagctacgattccagtgcaccccctggtaattacaaactatgattccagagcaccccctggtaattacaagctacgattccagtcctctactccagttccagaggctgatgtcgtctcacagaggtggggtggggggccgtgagggaaatgagccccttaggagacccagagcttgggtggccttgtggtgacgggctcttttgctgaatgacaggagaggcacccacgcactgcgtggcatggctgcggggttgttgtatttctggagttagacctgcctggagttggagctgcacaagggaggctccggcatggatgctccttactgagtcagaggcctccatgctgtgcggggtcctgctgtgaacccgatgaaaagcatgtagactaatcaggcagagccctggttcatggccaggctctgccacttcctagcgcaggacctgggtgtgttacctgcagcctccttacctgcgcagcgtggcatggaccccacagggggcttttggatggagtgggatcatgcgtggacgtgtgcgcccccacgcagaaagtcctgctgtggaaacacactagtgctttgtcagttggtgggcaggcgtcctcactgcgtggccggcggtcctgagtgggcaggcgtcctcactgcgtggccggcggtcctgagtgggagggcgtcctcactgcgtggccggcggtcctgagtgggcgggcgtcctcactgcgtggccggcggtcctgagtgggcaggcgtcctcactgcgtagccggcggtcctgagtgggcagccttcatcaccaggaccatctggatttttagcccatccatcccactgtttctttaatcttctgaccctttttgttttctggatgtggaaagaggggccaagaatttctgctctttgtttccctaaaacagcttttcgcatattgcagagtagcaattatgtctccatgtggttttctcctgaccaagctaaatatcctccatttcaaaaacttagctttgtttacctacccaccattcatccacccgtctacccatatccatctgtccactcgtccatctctccatccacgtggactggtggagtctcaggctggacgtggtgactgtgcagtgctatccccaccttgtagcaccggccctgcccactggatgccagcagcaccccccaccctaatcattctgacccccaaatgccctgaaagtttctcaaaacattcacaaggggagtaccaccacccgtgggatcttctgctctaggggtatttatctgaggaagagacaggccttatttaaactgttctaagtggcttaaacattgtttttttctgttgcagaaataactgctcattgtgaaaattgacattcccttttactctctgcccttctgcagaaaatagtgcaaatttcccgccccactccccccaccttgcaggagtgttcagacattcctgtgtgtggcatccctggatgatgcccctctgtgtagatttctgtagatgcagtgctagacttttccatgtaaatggagctgttgataaaggggggcttattttacaaattggttgttttccttaatactatagcagggcagcattttcaaagaaggttagttaaatcatcccccaaagcctttctgtggtctaagaaggcaagcgagatggtttttaactcagtgtctgtttttatgtgccatgacttcacattttgttgtggtccacttgggcctgctgatcttctgccctgggctgtgggagcctcttctgcctcctccaggttcccttggggttagcctgtgcactcgccatcccaccaccttgcgggctctttggggtcaggactgacacatttctcaacttggtgtccccagagtataggggacggggctgccccttgtagggaggtgtggtgactgatgtaggggaagaaagggccaaatgcagtcccagaacactgtgatacatgctggtgttaatgtttataattaaatgagaaaagtaaaagatacaatcatatttcagatggaaacgcgctggtttaagtttcattatttttaattatgtgtttgcaaaaatgtcactgtagaaagtccccacagtggcccatctctgtcatggctcccaggctgtcaaggtccttcctggctgggaggaagctgaggttgtatacatctcccctcgccctccccacagcccagggatgcctgtgaattacccacctcctggaatccagctgctttgaggcagcttgggcatgtcttcatgacccaggaagaaatctctaagcccagatctcccaaggccccggggcctgagagccgccccctgcctgacccccacccccagggccacagccatggctgtcatttcattaggccccaccctccgttgattggcatctggttctgcttcctgtctctgctttcacctgtgtattgatcattttttcctttcaatcgcgtttcttcctttgaaccctgggattgcttggaattaccatgtctgtgttttcctttctcatttgtgatcttacctgaaaaatctttttttcgattggtgtcagtgctgtcatctctgctgtcctatggagtgacacatgttttgggagataaacctgtcctccttgttgtggcttgcccggctgtgagcatcccaatgctggtcaatgcaggccccagccatggggcttcccaggtcgtgcctcgttccagtttgctcccttctcgttctccctccttgcctcatgggtggcagcatgcctggcggacagtgtgtaccgttgagtgggaaggtcttgggttaaaatctgtcatgggtgttggccatctccgagtcttgattcagagaccattctctccccacagtggactctggttttgtatatcagcatctaacagatagaagccagggaaaacctgctgatcttgcctgcagttccgcctgggccatacacccagggacagggctcctctgggtggccttggaccttcccaggctatctccccaggggccagacacaccagcccgtgggtattttctgcagcttgtcctggccctcaccccgctgtcacagcctggagtccagagtgccctgtgccactctgtgtgcctttgccaaagtgggggatgctttctctggcgggggatatttatctcattctaacaataagggtaattccaattctcctggcgtttagaagacaaatcaccacgggggctctctgagttaaatgccattacttcattaccttgaagagtaacaaatggcccattgtgagaaatgacacctagaataggccactgacatttcctcagataaaataacaagccagctaaacagaccaagagagcgaggctcctgcctggctcacgcggcgcctggctctgcgagtcggagctgccacagcccagctgcatctgtgcactcaggcagaggctgtcaaggtctgggaggccttagttccctgtttactcttattatctctgaggaaatgtctccatgcttggaaggcccttgaaagaggatacgtcgatgggaaacttctcagaggaagcctgctgatgattgctgctgattcagttccctgagaagaggaaataaaatcagacccactctaggccagcagaacgttgagttgattctgcccaaactgttttcccagggaggaagtgatgccagggggaggccacttaccctcctgtctatttgcttggcttttgctgccggtccttccagtaggaaaggcgttacgagggggctggacttggagtcgaggcaggcctgtcctgctcactcccaccattgcctcacaaagcacactgatcagcgcgtggaggcttagtttctgcatctgtgaaccggcagaaataacacctcccaccttgggctgccgtgggaaattgggagacagggcctttccctgggagtccctgtgggggcttcatcagagggtgtgctcaggtcaacccgggctcctgcgccagcagagttttgagaccagacaccttgccacttgctggagggagagcctgcagcccggcagggagccggtgggtggacagaaccaccaggagagtgctggtgtcatgggcacacccggctgggaggagggtcaggggacagagccatggccagccagcagcacttgtcatcctagccccgcattcgaggaatggggaactgggacctgccttttagggtgaaaacatgggccaagagagtgagggcctggttgcacccggtatgctgtggacaatggtgtccttcacaagcccgggtcccaggaggaacccatccatttccccatgccactgggtgactccgacacctaacattgatgtttccaatctttaaagtcgcttgttttcccctttaattcatgagcatcttgagggcgtcaggtctctcactcatgtctgtgcctggtgcctggtgtatagggacagatcccgcccacgggaccggctctctgtgtccacattaccccttggtggagacagcccagggtctaccagccgaggcatgcagagacgcggcgtggcctggccgtaggggtgcggctcagtcgtgaagaggagtgaggcattgacacgggctgccgcatggatgactctggagaacattgtgctcagtgagaaggagccagtcacagagggccgcagagcctgattccagcagtgtgaaatgtccagaataggcaactccatagagacagaggcaggttcgtggttgccaggcgtggggtggggagtggggagcggctgctgaagggtccagggtttctttccgtggtgatgcaaaggctctggaactagcggtgacgcttgtgaccctactcaagaccactctgtcgcacacgctaaagagtggattttatggcggatgaattatctctccgtttacaaaacccagaaccaaatcaaagcaatacccatggagtgactgagggtccacccccagcaccccagagagaggagtgatgtgcgaactggctggaatccgcccaccctcccacgttcccgcaggtcccgccatgttggatgtgtccagggctgttgcctccctgtccaggccctcgagcgcccagctgctcactcctgctggagggtcagacacggaggcgctcttgcccttttatcctgctggttctggggtgaaccaagaaccgtgggaggtggcgtgtcacctcgtctcttccagtcacacacttcagtgtgagttagcaattgtgcagggctgcgactggggaagcagcgcgatgggataggactgtacacgacacgaatgtgaggtgggcctctgggtcctcagggagcacttagggacctgggttctgggaccagtaggtggggctgcatctggcacccccctccccatgtgtaccaggctgctcggcatagccacggccctgcccctctttaccccgctgttgtccggggctcaagggtggtgacagcagagtggtgacagctgaaatgagcacgcacattcacagtgcgcaggagagggcctggcgcgtcagcagaccccggtcaacaccagcggcagcatcatccgtatcaggattgtgatgtttatctgcttcaacctttctacatatattctgggttgaaatgtttcttttcttaaagaacgttttccttgcgaagatgccatgcaaataaaactaaagtaaaaaaaaattaaaaatagggaagataatttttaaaacatttatgagtattttgctggatgacaacagttttgtaaggatctaaaattagtttgttcaaatatctgataagccatttcaattaggcatctgttttgcattttaaaaacttttagattgtgttttctcattcggttttttgtactttaagaaggaaattatttagagcgccattgtctgttctatctttgacgcacatctgtggtacggctttctggggttttgatcatagcatggaagtatttacccagtgcagttttggaaactctaactttggaaagaggtttttagaggaattattgccaaatgaatatgtaaatatatcagaagcagagttttcaaaatcttaggaaaaaactttcagatctgttaggattaagtaatatattctattttctctcttattagaatgtgaaatgcctgagaagcaatagtttataatgtattaattatgttaattaattggagaagattcagaatattaattatctgcaactaattaggtgttaagattgagaagcattaagtgatgaggtggaaggctgcatgagtcatttagctagactgatgagagtgggtggagggagctggatgcaggctcagctctgttcctccgtgggccccctcgtgggtcgaggtcccgtgtggctaagtctccttgtcttttgcatgctcggcgccgcccagaggcagaggaggtggacacggtggacgtctccggcgtgcccgcagaggtgctgtgcaacatcgaggccgacacctactggtgcatgagcaagctgctggatggcattcaggtgagcgcccgcgcccacgggacacagcccacgcccacagcccctgcggtgaagagagcctgaggccttaggctgctcctgagtctcagtgtggccatgcagtccctcctgaagcctcacttttctacatctggaatagcacagacccctccgggttgacgaggggtgagacacagtgtatgtgcccctcgttctgggcacggtcacgtgtcctgctgagggcccagtgggaaggcgaggtgcagagtctgatcccctgctgcctgcagactgtagccaccaccaccaaatagggcacaggctcacggtagctatgtgtgtgtggctagctgtgctaagagggatcctccttaaagggcctcagatcgggggccacagctcctggcctctgacaccaggctgtgagccctcgcctgcagtattggtggccagggctccaggtgcgtggggcgctgcagctgtgcctgctcccagagagcaacacgagctggtgggagtcccctgcaccacagtggggaccctgcgggtctctgcatcagctagggttagtggctgagatttctgtagaaaagccacaggtctcccagtgacggccaatcctatggcatggtgtaggggcagattcccacacagtacctgggaaggaccttgttggtaggtgagtcaggaatgaggactggagccagctgatactacagaggaacagctgagggggatggatgggccctggagtgggtgtgggcgtcttagtttatttgaggccagtacatcctttctagacactcgcttcctgtgaggtgctgtgctccacacccgggcatagtggcgagtaagggtgaggcctgctccggaagctcactcggggtggagggtagacgggtgagtatggcatgaggggacagaaggcactcgaccccaaagacccaaaggtgggaagaagtagattacaggggacagtgaattttgctgacagagcaggacttgtcagatagaggagggtcaaagcccagagcgcggtttgggtcggtaatcgttttctgagggaccaaacaccaagatcatcacgggtgttcgcatgtagatggctctctgctgagagctggggcctcccgggagggtctgcatgttctgccagcatccctgttatcccagctcaaaggggggccctcatctgagagacacagagatggggttgtcacttgacatctgcattgcctagcagggcttggcttttcctgagccattgcggtaaaggttgttcctgataccactaagtgaagaggtctcagctcatctacttgattcagaatcatcagaatatggcttttatagcctgtggtctaaggtttagactccaagtttaatttgaatatattagctaaaaggttccgttgaggaaagacgtgtggtttttgctgttacttttcatgatgtaggaatgaaaaaggagaaagtagaagcctgttgtgcggttggagaatggaaacctcgtatctattggctggtccagactcctcgtgacttactttgttccttgcaaagaaaaatgtgcccactagagatatattttggcccaagcaccaatttgtcatttcccctcctttactaatattttcatacattttattctttctgctagatctttcggctttttgcccccttagaaaaaggattgaatcataatgtaaaactttataaatttcaaatgtcgcttctctgatggtgagtgatgggacttgtgccatttaaatacaagattatctgccctctatttgtaaataaaatctgctgtacaatgaaatcgatgctggctttttcatttttcacctgagatttgtggtctgatgcaatggtttattggcagggccgatgagtgtgagggatcatgctttcctggcgcgtgtgtttatagcacatcaccgtcccgtggcagccgttgatcttctctcacgtgccacgatggattccacatgatcctcccaggagcaagagttgagggatgtcagttcccaccatccaggggacttggcagctcagctgtgattcctgtagataaggccgtccgagcagagctcctctagcgactagtgtttacaagcactgccgctgttttaagttcagagaagtatgaggctatgtactcacttaaaaccacggcaacacgcagaccggcgtgtcagctcccggacgacctggccgcttctgcctcttagctccttttcctactcttggtcttactgtctccatttcattcttttggaactgctcgaaccatcttccttaagcaccctcttcaccacatcatcgccctgattgaaacccttggggaagctctctcttggttttctgaagtgcaggctctcagcccggcctccaccagttgttcccagcgttctttcaagggcgtgtttgttcatcggctctgtggcagccgtccacgccgttgctgcagaggctttattggagccgctgagccagaactgtgtgctgggggctcttcctcaccaggaagagggtcttcaagggcctcctagccccacagtttctgtgattggtaggcagtccccatgggaatgaatgtgaggaactaacattgtcttcgccgtgacggtgcttcttggcgtgggcattcccgggacaggttggagctcggttacacccagcacacaaggctgagactaagagagatgaagcccattgcccaggtgacgtggcttgtattaaaacccacgttgacggctctgggatctttcctagctgaaatacatagaagtgagtcccatttgcagggaagttctagagggcagaaaccacatctattttttttacctttggatgtcctggatggtcataactatgtttttggctcactttggagcctcaatttgagattccgtattctacttgttttcagtaattagttaactttgtcattttggccgagatgtatgaagcacctgccttctctctgcaggtgctcagagaggcggaagactttggggtgagtcagcatcacccctctgtccccaagaagctcagagcctggtgggatggagcagggggagtggacagctgatggaggcgaggacagaatgctgggagaggaggctcttagcccccagtaagatggcaaactaggaaaaagaacaaaccacttttctcccgacaaatccctggaaacgttaggtgattggtctgttctcgcactgcttaaagaagtgcctgagactgggtaatttatagagaaagaggtttaattagctcacagttccacaagctgtacaggaatcatagctgaggaggcttcaggaaactttcaattatggcagaaagtgaagtggaagctggtgtgtcgtacagggctggaggtggagggaggggttgggggaggtgccacacacttttaaacaaccagatctcatgacccagcgacgcagcgctagcagggatggtgctaacccattagaaaccgcccccaggatccggtcacctccagccaggccacgcctccagcacaggggattacaattcaacatgagatttgggtggggacacagatccaaaccgtattagcggtattgaccaaagattgtttaacacgcattgtgggactccttaacagcaaagagaggtcctccaggagcgaacagcgctgactccactggctggagggaattgtcaggccagctcatggctaggagtgcaggctctcctgccctggcgaggtgtgatcacagaagccagtcctgctcagggagatcaggtgctgcccagagcagggacacgggctctgccattgacatgcccaggcctgtgtgccttgggactctgcactacaaacattattgaagagcttgaagagcttttgtttgtgtgggttaattctcttgataactgccatgttggaaattcaaatagagaaaattaaaaatatttagtaatttatttaacaacaacaatgaaaatcccattacatattattataagtaacatttttatgatagattactatttttcgaaacaaaaatgtttagtgagaagaaaggcattgttttacatttttgtaaatctccttaatgtctaacttaatagaagaattcttgtatctacttctacattcaatttgttgtggtattttttgttttagctgaagaatgtgaagaaaatccagcattacatagatacatagttggaaaaggaagcgtgttttttgtttgtttgtttgtttgttttttggagatgaagtctcctccaggctggagggcagtggtgcgatctcagttcactgcaacctccgcctcccaggttcaagcgattctccgcctcagcctcccgagtagctggaattacaggcacacgccaccatgcccgggtaatttttgtatttttgttagagacagggtttcactgtgttggccaggctggtctcaaactcctgacctcaagtgatctgcccgcctcagcctcccaaagtgctgcgattacaggtatgagccaccgcgcccggccaggaagtgttttaatagccttttcaggtaattttggattcttttttcattcatactatactattactcaacaaatggtagtttcttaaagggtagttgtgatatgaaatctgaaacctcatcagtgaatgttttacactcagttacattaaagttggtggcctatcttgcactttgataggatcttttacccatatattggctctgtaacatcattcattggcgatttggaaaatattggctgactgaggtgtgcagatcttttaaatgttgataagtttcatcgtatgatcaaatttgttagtatattaccaccgtctcataagaagcagctgtcaggcccagggtggcagataaaagtcttccaaaattcagatttttaatttaaaagctcagatattatcattggcaacaaacacagttccttgtttcttttgaagtgacaggccaacttcattcatttttgagaaaatatcttccagagacccgcgtttgaataactgatttgtctgctagtccttctttcatgtaaacgtgatgtttcttgaagaaagtgttcggttcagctcacagctgaagccagcgcaccaagtgctctccttgacgacgcttctgtttctggatttgcccctcaggctttccgtgttcttccacgtgttggtcagggctgagcctgagcgcagtgttaatagtaagatgagtgacctttcctgccgtatccagggcgtcctgaagtgaaacagccttttgctttcacaccatgagcgtgtggtattgggaacacagtgacggttgagtgtggtgagggcactgccctgcctgctgcccgcatgcccgcaattttacccaccactgcctgtgtactgccagcacaaatgtcagcaccgtgaggaaggtgaatcatgccttcatgttactatgacagcagtttcaatataacagaccccttgaaaggtctagggacccccaggagttggctggctaccgtctgagaacttctgcccaggagggatgatctcctgccacaggcctgtggcattcccatgggaagaggcatctgcagatgacctcacagcagacgaagtacaaaccaagcagagaaggagtgcgccgggaataaatgttagcgattgctctcgttaggaggatttgtacccagagacctgagacactagaacagcgatttgaaaggaaccagacaatgtgtaactttaaaatattaaggagaatgaaacagtttaaaataaagactctgaagaaagaactcacagatttatttatatttatttatttgagatggagtctcgctctgttgcacaggtcggagtacagtggtgtgatactggctcactgcaacctccatctcccgggttcaagtgattctcctgtctcagcctcctgagtggctaggactacaggtgcccaccaccacacccagctaatttttgtatttttagtagagacggggtttcaccatgttggccaggatggtctcgatctcttgaccttgtgatccccctgccttggcctcccaaagtgctgggattacccaggtgtgagccactgtgcccggctagaaatcacagattttaaatggaaccaaacagaacttctagcatcgaaattagagtcactgaaatttaaaactcattagacaaaagagaagagagagttagttagaattgaatgtagtgctgagaaaattaccaactgggcaacacagagagatactgaaaatatggcagattaagacatgaaagatagaatttaaaaaatagaactagaaagagaaaatgtactagaggaaagccaatatttgtaaagctgtggctgggaatttttcagcattgatgagatgttgttactaatatctaataaatctccagaaagatgagttgaaactaattacctatggagacatgagagtgaagccactgaataagaaagagaagagaaagtctcataggaaagaagaaaggccagaaaaaagtagaataatgtgtctcatgttctgaagaaaaatagctctccaatgagattagatttaaaaacagaatccagctatatgctacttacaagacaccgaaaccacaaggagacaggtagaaaggaaatgcaacagaagaatattaaccaaagtaatagttaggtagctctgtagcccatatgtagctgtgtaatagccgtggagctattaaatgagatagatttttaaggcagaaagcattcctagagacaaagagtatcactgccagtggatacatttaccagggaagagttaatcttgaatgcatgaccttgaccctgtatttctgcacatgtacataagtatgatgggagaggggtggtggttgtcaatgcctgacatggtcctgagtgcttcgttgtaatattagttcattttccctcacagcaaccataaggcacttccaattttgtggctagttagttgcagcattggggtttagacccacacagtccagtaccagctttcctgcctctcagtgattagtaggtgatacggttaggctttgtgtccccacccaaatctcaccttgaattgtaatctccataatcccccacatgtcaaggcagagaccaggtggagctgattggatcatgggggcggtctcccccattctgttctcttgatagtgagtgagttctcttgagatctgactgttttataaggggctcttcccccactttgctcagtacttctcctccctgctgccctgcaaagaacgtgcctcttcctctttgtcttccaccatgattctgagtttcctgaggcctccccagccatgctgaactgtgagtcagttaaacctcttgtctttatgagttgcccagtctcgggcagttctttatagcagtatgaaagtggactaatacagtagatcgagcagataagaattaggaagatctgggaggacgtgtactgcacagtttgggcaaatggacatacctagacccccatatccagcacacagagaatattcattcttttccagtgtgcacagaagatctgtaagaatggcaataccagcagttactagggagccagatagaccaaggtctgggtgggggattagcagattgagaagagcattctagactaagctgggactccatggtgtgggatcactcagagtgcttagggagcaggagtgtgggctggagcttgaggctgggaagctgggttgatgtttgacagctctggaaagtctgtccttgtggcctgcaccaggtacttgggcctgatcactcatctctggtggattgatgcccttcctgctaagtgtttaagagacagtcttttttttttttttttgagatggagtcttactctgtcaccaggctggagtgcagtggcatgatcttggcacactgcaacctctgcctcccgggttcaagcaattctcctgcctcagcttcccgagtagctgggactacaggcacccgcctccacgcccggctaatttttatatttttagtagagacggggtttcaccatgttggccaggatggtgttgatctcctggcctcatgatccacccgcctcggcctcccaaagtgctgggattacaggcgtgagccactgcgcccggccaagagacagtctttttagtcaggggcatttggtgttgggggaaaaggcaaaacagctacatttccagatgtgctggtcttaggggagatggtctgtccagcgagtaatgcctggaaagccactgctggcctaccggtcgtgtgaacaacgaatcgatgtcattggcactgccctgagggacgtctaagcttgtggagggatgtgggatgtatttggatgaaggaggggattcaggagcctaaactaggtggtggcgggacaggcattggcgggcaggtgcaagagcactgagggcagctgtagaccttgttggccatgcagagcaagtgcccagtgtggagcggtggcagcggtggggcgccctcctgcctcattagggctgcttagaaatgtctggggtgcttttcagtggttgctgtcactgggagatgccgctgcgtggacagctccgcctgggaagaacctttgtggcaccgcagtaagaagcattatgtaggaatgctgcacttgtagtcatcgggtctgggctcaacattttccacctgcgtgaccgtgttagtgactccagttggatgggttcatcttgagagtgaatgaggttgtgagacaagtcctgtattttgtggtgcaatgggtggcttggatctggcacggcagaccatctggtcagaggtttccacagtgcaggagggtgcccaggctggcttgtgggcagacagctgtgaggtggggcaggggtgggtttccctcaaggtgggacaccactaagtgcaggagtgatgaccttgagcctcccatttaagcgtcatggggactaatcctcaatgttgaggacagaatttctgtgttttcttcctgagttgtgtggtagctttgattgtaagtacttttaaaaattcagataagtttaatttggagaaataatttctttcttgtctttatttttcactttctttcctgattgggctttctgcccatttgcctgagtttcactctgtgtgtgtcttgttctctgggtgatgtgagttgggtgggtgtgcacaggttgaccgtgtgtgggtttccggggttctggctttctggagtaacctgggatgtgaggttggagggagggtcctttgtggctcccccaaccagctggcagagtagctggtgccagaatgagaagaccaggttttttttttttttatattttattttttttctaccaagtgcactatgaaggttccagccagatacttaattaaaaaaaaaataatttggtgggctgtttctttcagtggtttcatggatgtgtccttttaatgctatttggtattagtagctatgtttcggggatgatttttagtgtagatcacagaaacacacctgggccgattccagctgagggaacacttctttaagaaggattgctttaacacagcatgttggcttcggggcctgaagataactggctttgagtgtgtgctttctgggcagtggaagctgctgacctagtgctatttcagcccctccctctctctgggggtttaaacttggtatccagtgagaagttccaggctgggctgggcacggtggctcatgcctgtaatcccagcactttgggaggccgaagtgggtggatcacctgaggtcaggagttcaagaccagcctggccaacatggtaaaaccctgtctctattaaaaatacaaaaattagccgggcatggtggcgcgcgcctgtaatcccatctacttgggaggctgaggcaggagaattgcttgaacctgggagacagaggttgcagtgagccgagatcgagccactgccctccagccggggcgacagaaccagactccatctcaaaaaaaaaaaaaaaaaaaaaaaaaaaaaaaaaaaaaaaagagaagttccaggctggatgaggccctctcaggcttttaggggattattcttgcacttttgccagtcttttcatttcactaacagcactcatgccaaggttgtcggttcgctattacttcttgaattacagcttccatatttgcctaccctgaagtcatactgctactcttaggttcactactgaacaggacaatttctttgagtagaaaagaaccattgccttttataattagtcatttacatttcctttccttggggaagaattattgaattccaagaactgtttggtggcatggaggtaataggaatattggggaaagtgactaaattatctcagaacttgtcagagaaaaggccagaaacgcagtggcgtcatgactcctttagagaaaggtcaggaaacggccaggcccatgactcggggtggagtggactctgcctgtgagcaggtattgcccttcaggtggggctggcgtgagttgaccattgatgttaataccagggaggcgacagggtagttgggggaagccctgtcctgcacactaagctggggagatgtgtggcttcttacagtgcttgctcccagagggggccagccaaaggcagttgaggggggagcctccgccatgagttcaggagcctctgccatgagctcaggcagctggaacttagaatggactaagccccggggatgttgttatctgaaagagaataacaaaggaaggactggtctgatgcccaggaagttggcagagagaaagcgcactccagctgagctctgatttggcatttgttgtatacgtcaagaagcagagtcttcacctggacggggcagtggagcgcttggtggaggcctggggtgggggaatgaatgcctggagcgccgagtccgtttagatgtgtcaaatccacacctgccccagatgccggctcaactgtgcccctgtggggaagaatctcagatacatgatttcagagccccagtcaataaaattgaggactcctgccaagattttagaaaggtttattaaacagaaaagaatgtgttagtcactgggctctgacagaaggttcattaagaatgaatcattgagcagcaagcaatttaaaaatgaaaattaaaaaattcaatttacagtagctttgaaaaccctaagaatccgtgtcgttgcctgaatgaatagttgattccttttaattactaagtaatactccaccgtgtgaatctatcacagtttatccatcctcctgttggtggcagccgaggctgtttctggtcttgggctgttgtgaataacatttctgtgaacactcatgtccacatcttcttctagtggcctgttaagttctggctgttccacgtcagaatgcgatttctccaacactgcgttccccacagggtcttcatttattccgattctgatagcaatcctttgtcaagacagatattttgagaatgtttgcttctgtggcttgtcacttcatttcattaacaatgtcttctatgagccaacagtttcaactttgataaaatcgaatttatcattttttttcttttgtggtaatagttttctgtgtcctgcctacctccacaatgccaacatatacccatgttatgattgataattttagttttttggttttaggtctacaacctagcttgacttaatttctgtatatggtgtaaggaagatgtcaggcttcattttttcctctacagatatcctggtgaacataatgccatttgttgaaaacagttttgtcctatttcacttttgctgaaaattagatgattgtataggtgtgtgtctgtttcgggacacactgttttgtcccattgacgtacaaatggatcttaatccagttcacactgtcttcattactgcagattttcatgggttgggtaaggccagtcctctttgttcttttaaaaaattaagtatttttggtcctttgcatttttatataaagtttgcttttgccacttcctacaaaaaaaaaaaaagcctgttgagattttgaatgagaatatgtggaattgtatgtcagtttccctcatactgacaatattagcaatattgagtcttcttacccgtgagcgtagtgtatttcttaatttatttagatattctttaatttatcctcacaaacattttgcagtttttggtatagggttttgctcatactttgtcaaatttgtttctgaatattttgtttttttctgacgttccttcaaatggcatagctttgttggtattttttgctactgatttgtagtaaatcaattttggattgatatgctaggggtatatacaaatacagttgatttttgcaagcggacagctttccagggactgctgtagcataacaaatgactcccaaaccctctgactggaggcagccatgcctttgtgctctcgggctctgtgggtcaggatctctgtcagggcatggtgtggacggctgatttgcgcaccatgatgtctggaatctcaggtggtggctggaagcatctagactcccgttcatttaagagcctggcgccctgggcctacgtgactctaagagtaggactttgggttggatcgcccactcctggcctctccacgcgctgattgtcctcgtggcatggtggccttgggatagtcagacctcttgctggatggtacaaggctcccagtgagactctgtcctcaaacaaggtggaagctgcatttttcatgactgagcctcagaagtcacacactgtactcagaagtcatgccccctgtacgcttttggtggaagcagtcacaagtctattctaattcaaagagggagaaattagtctccatctctcgatgccggagtggcattggtcacctcctgaaagagcatgtgggacaggagagaatgtggccacttttggaaaataccctacttgtatctagtaatcttgctagagtcacttattattgctaggagcttgttagtagatgccttaggattttctgtacacgatgatgttatcagcaaataaagagactcttctttctttgcaagacaaatggtttttataggtataccttggagatattgcatgtttgattccaaaccaccacaataaagcaactatcctaataaaactagccacacaagttttttgctttctcaatgcatataaaagttatattatactttaatttattaacatacaatagcattgtatctaaaaagtgtacataccggaattcaaaactactttattgctagaaaatgcgaatgatcatctgagccttcagcaagttgtaatctttttcccagcggagggtgttttctcgtcttgacagctgcagactgatcagggtggtggttgccgaagttggggtggctgtggcaatttgttaaattaagacagcaatttgaagtttgccatgtcagtggagtcttcttttcctgaaagagttccctgtagcttgcagagctactcgatggcattttatccacagtaggacttctttcaaaaccccggtcagttctcccaagccctgccactgctttatcaactaggcttatggagtgttctgaatcctttgttgtcatttcaacaatgttcacagcatcttcatcaggaatagcttctgtctcaagaaaccactttcttggagtccagtcattctgggaaaagaaaagaaaaaaaaaaagaaaccacttttttttcctcatttgtgagaagcaccttctcatccatttaaattttcctgtgagattgcagtaattcaagcacattttcagactgtttctaattctgttgtctatttccaccatatctgtagttacttcctccactgaagtattgaacccctcaaagtcattcacgaatgttagaatcaacttctaacttgcagttaatgttggttttttgacctcttcccatgaatcacaaatgttcttaatggcatctagaaaagcaggtcctttccacagggttttcagtgggctttgcccagttcatcagagaaatcacttctatggcagctatagccttatcaagtatatttctcaaataatgacttgaaagttgaaataactccttgatccatggtctgcagaacgaatatggcatcagcaggcatgaacacaactttcatcttcctgcatgtctccatcagagctcttgggggaccaggtgcattgtccatgagcaggaatattttgaacaaaatctttctttctgagcagtaggtctcaacagtgggcttcaaatacttggtaaaccctgctgtaaacaaatgtgctgtcatccaggttttgttgttccatttatagagcacaggcagagtactgagcatgcttcttaagggtcctaggattttcagaatggtaaatgagccttggctttaacttaaagtcaccagctgctttagcctctaacaagagagtcagctggtccttcgaagctttgaagtgaggcattgactcctcctctctagccatgaaagttgtagatggtgtcttcttccagtagaaggctgtttcatctacatggaaaatctgttgtttagagtagccaccttcgtcagttatcttggctagatcttctggagaacttgctacagcttctccatcagcacttgctgcctcaccttgtacttttatgctatggagacggcttctttccttaaacctgatgaactgacctctgctagcttccaccctttcttctgtaacttcctcacttctctcagccttcatagaattaaagagaattagggtcttgctctggattaggctttggcttaggagaatgtgtagctgtttggatcttctatccagaccgctgaaactttgtccacatcagcaagaagcctgttttgccttcttaacattcgtgtgttcactggagtaacacttttaatttccttcaagaacttttcctttgcattcacaacctggctgtttggcaaaaaaaaaaggcctacttttggcttgtctcagctttttgcatgccttcctcaccaagcgtaatctttctggcttttgatttaaagtgagagaatgtgcgactctttctttatttgaacacttgacttaacccattgtagggttcttacttggcctaatatcaatcttgttgtgtctcagaaaataggaaggcccgaggagagggagagagatggggaactgccggtcagcggggcagttggaacacacacaaaacatttattaagtttgctgtcttaaatggcatggtttgtggtaccctaaaacaattatgatagtaacatcaaagatcactcatcacagatccccataaaagatcataatgaaaaagtttgaaatattaagagaattgccaaaatgtgacagagtcacacacacacacacacacacacacacacaataaataaatatatatatattattttttattttttgacagagtctcactgtgttgcccgggctggagtgcagtgatgcgatctcagctcactgcaacctctgtctcccaggcttaagtgattctcccaccgcagtctcctgagaagctggaactgtaggtgcttgccaccacacctggataatttttatatttttgggtagagatggggttttgccatgttttccagactggtcttgaactcctgggctcaagcgagctgcccatgttggcctcccaaagtgctgggattacagatgtgcgccaccgcgcccggccgcaaaatgtaagttttatttaaaatgaactcttatagatagtttattcttgcaacttgctttcttaactttttagtgtatgtttagaccacatatatattcatctaatctgtccaacctaattatttatacggttggggtttaggttgccattttcctatttactttcatcttttcttatttgttcttttttccctaccttctttggatgaattgattatttttttcaattaatggagtttggtttttttagagcagttttagctttccagaaaaattgagcaggaggttagagaggccccatgtgctcctcagcgtcctccttcagccccagcctccctgtgattagtatctcacatcactgacttcagtgtggcatatgtgttacaattgaggagccaatatcgatacattattgtcaactaaagtccacagtttacaccagttgtaggccgtgggttttgaaaggtgtgcagtgacatgagtccaccaagaaagtgtcgcacagtgtcgtcccctgccctgaacaccctcgtgccccgcctgttcatccccttccacccaacccctgggctttttactgtctccatagtttcacctttgccagaatgtgacttagttgaaatcctgcagttggaaccttttcatcccactgctcctgctgcggtggcttctctccccgttggcttgctggctgtctccctcccgcgccggcgttcgtgacggctctgctcctcgccgtgtgcgtctggaagtgaccatggatggcctcctcctgctggtgtgccgctttactctgctggttggcccgtgtctgaagacaagggacagtcacgtttccagtggtttacagaggcactggttcctctggcctggctgggttgggagccttcagccttaaaccactgtttgatggctgacacatcatggaaggtgcggaattagggggaggttgggtttgcactctatatgggcattgtcttaggttcttttagacacagtaactcagtaccgcctgtgcccttgtgatggagcccttcctctctccatttcacagatgggaacacagaagatcagagaaatgaacctggcaggtaggaaagcagggggtttggttaaacaaggctgcatagaatctgacacgtttgtgctctgagggtgctttctgagaacatgctgccgagccccgtccttggccctgcccttccctcctcttggcagagactgtagtgaagacgtcaaggggatccgtttaaccagtgcctctcagctgggagggatagcgaatgtgatagatggcacaatcaagattcagaatgggttcagctgcctgcagtgccagccgggaaccaatcaaatgaatgagctaataggaacaaatggcaagtcctacgttcaggtgcatgagccgagcagtcagctcagcagaaggcagtgtggacagttggggttcactttgtcttccgtgggaagcgcgtgtagtcactttgcctggattacggcagttgcctcgtgaatgatacccctccatcctcatttggctcattccattgtttctacatcatctttccgtggtgcaaatctcttacctgcagtggcctccatttgcatttcattacctgcatttgagagcattgcctgggtctcaccgctgactccgacgtggccttccagcctcggaacggtctcctcttgcctcagccgcagcttgctcgctgccctccagctgccctggcctccatttcatttctgggatgtgacatgctccctcgggccgccggggctctgctgcatggtgcctgaaccctctctctcatctctgctcagacctcacaccctccaagtggtcttccaggaccagccctggttctgtgctatgatggtgtggccacccaggtcctcgttagcagtcaatgtgcacttgcctggcgagtgatgaacattggctcagctgtcagactgtcatccctgtgaacagaagggtcctgtctgcctgtccacttttctccctgtctgtgtcaggggatcccaagacgaccccacagagccacactcgtggctgtgattcttcacagtgcaaggatgcagaggagactccatcaaggggtaaagtccagaggaagcggtataagcttccaagccccctcctggcggagtcacacaggacacgctggatccctccagtgcggggctgggacgacccgtccgaaacgttgcctgctggggaagcacattagagactcagcaccgaggatgttactggggactgggcatgcggacactctctgcttggcatgtgcccaaatgcagcctcccaggaggagagcaggtgcccagggtgaaccaccctgcacagtgtaggcccgccgagtcatccagatcagtcagggaatcgtgggaactctcctgaaacccacattctaggcaccggccggggaccggccttgcaagcaggactctccggggatagcattcccaggcctgcgtgtttgactccttcgcacacatcgatactcaggacttgattttctggcacgtaggaggctttcagagttgaacagatgaaagaactagtatctgatgtggttctgccttctgctggactgatgcattaatggctttaatgtattaatggctgacagtggagtgcagctgtgacaggaggcttcctagctctgtccttgcgtggtcagagcccagcttctgtgttcagggctggtggccaggggcccccgagaggacgtggaagggagtcttttaagagttgaaggaaatggaagtctctcaggccattgcttgcagaaaagacttcccgaggtgtttcagaggcaggtcaaggcctgggcgtggaaggcacatttggtttcaatgtggggaagacactatgttacggtgaaattagcctggaaagaagaggctggactttgtggggaggtggatccctggtccaggtggaagagcactttgtcagagaggcaggagggagtctaacttctccgtgagctggcaggtttgactctgggtacttccaggtgagctgataggaatttatatttcgactcttctctaaaatgctccctaagaaaattttattctacttttcttccaaaaagtgcagaaagtgttatttgttatcgggaagagtgtgatgttgtaatggcaacaggtgtaaggcaagctgagcgtatttttaaaaatttatattcacagacttcaccttctgtgaaacatttcacaacagatcgttgtcttcagcccttcctctcttccctctgatgcatatgttttataaattatatccttttttaaagataccagatctcaattggaaaggacatgcatacttactttttatgaagggaataatgttaatattattactaatgacatttttataagtgtagaggattcttgcttagttcctgttttgctgcccaggtacgtgttcaccagcacaggtgatctgggtgccaggtgtgggaggcggggtgctgggctggggtgtcccgagggcaaatctggtttctgggccttaagcagacagagcctgtgatctacccaggggccttggtgcagcctgcgggcagctgctgggagggcctgggcggtcagtgcctccctgggacaggctgctgcgagggccatgggacattcttttctccctcctttcctcagccacctggctctggattccttggccacggtgtctgcctccttagagtgcccttgaaggcttcctggccccagagcggggccttctgcaggctgggctcacctcccgagccaggagccaggagggcccagaccgacccccctgtgtcttagccttggcgcctcgccctcggggggtggggccgggcgtccctgctacagccttctgaaggctggccttctccgcccctagcctgaagccagaatgccgaggccatagctgtcagtctttgcaggtctttcaaaatgcaaacattttctctttcaaaatgcagaccttttcgttattggctctcaggtgtcattctttttttttaattgtttggatttctgagaatccgtcttccctacctgggttttgaacaaattgagaaataaaacaaaactgtgccagatggaggcaaagaataacttttatttctgctaaatgagagcctaaaatcctgtcttagtgggagagccaccgaatggctgactgatcccaggacccatcaggctcacccaccccatcagagccagtgttgagggccgggccctgcccacctgctgtggagcctctgagaagtgcaaggggctgaacccaccttcgtctctccccgttttggcctccatggggcgagcatttctgcggctagagcaagtccaggagaggcagcagctgcgctccaagctgactccaggtctgtctgttattcacataaccatcagggacctggacagccagggacgtggcctctcttggagtggaagagatcgcagtccctcaggacagaccaatggggtggttagaatgtgctccccatggctccggaatttgtcggaataggacattcattaaataatcttaggacctctgtgtactggaggctgccacaccactctcaggtttacttctcacccttaattctgtgcagctatattgttcaaccgggctcatcagaattcctccacgaggttaaattacatgatgtaaacttgcaacacacagtgtgccctaaattttaacatcagtgtgctcctgttatccaatctctggggagaaattaagtcttaaaggctaaccattgcaagttcaggaccaaagatgatgacagtcaaaggaattcaagtctggagccaaaatttcttactcctgttaaatttcaaatatacgaaagctcacaatttgtccttagctgttgctgcggctccctctcagccggacaggtgcctgggtctcactgacaccatcgcagctccttcagggcctaaaagtcctgcccattaaacaccgtattttggacagccaaattcaggaggcctccaagcttctccctgaatcagcccacgacatctaggaaacatatcatccccaggcccgggagcagtcactccagagatcctctccccggagcccatccctcctgctacacaaggtcaccggagggccttggcgtcattctaagtgaaggtggcaaacggagttttcgtggttctgccctcagagatgtgacagtttggaatccagagcctgtcacttgaaatccacctgggagaaatccctcagcaagccggcaggtctgactcggctcattttccatttctagggaaagaaaaatccttagggcctcgtaggcattttttgtgttctgtgccacagtggctgccatgcctgctcttgttaggagatgtcatgtgtgctctgcgtgtgtgcacgcactttgtgtgtgtgtgtgtgtgtgagagagaaacgtagagagtgctggctgcgtgtgttcacatttgactttccagacttgggaatgctgctggcccgaaggcagtcgctcagctccacgtttgtcttacctggggtcacctcctgggttctggagctgggggttctgtgagtgctgtttccacgtcactggggcctcccgagggctgacacccttgctgtgtgccctgtcacccttcctccacctgcggattctgtgaactctgtggccgcgtcccctcacagcacagggaggcctgcctggttgaccacctcgaggaacctctctgtactggaggctgccacaccactctctggtttacttctcacccttaattctgtgcttgaaccgttttccagtcctgagcctatggaaaaggagtatcagtatcaagcccagatcagtctttcgacttccctcctgggctctgaatgccgggtgccacgtggacagctgcccgtgtagacctgccccgctgccacgcaaagcagcacctccctcctgccaggtggtgcctgcagacccctgccccctcaggcgcacaggcagcagatcatcccccactgtcggaaaggctgccctgatgctgcctgctacgagccagcacctgcctggtggcccgagcccacttggtgagctgcagttgcctgtgcccagcacctcctgtttggaccaagactgcattacctgtgcccttactgaggccagtggcctgcctggcttcccctagctgagactcatggggccatccccagtgtcactccctgagggcagagctgccacaggcagtcatctcccagtgctggccgggccagaggccctgtgtgctcactaaagagttggaagcgtaggccagaacccacaggagccccaggcacagtgcccgttgtttcgctgcctcccgattctcctttctccacgggtggttcatggattagcaaccttagttccacctgcaaccctggttccccttgccatgtaaggccacacatccacaggttacagggagtggaaccttggcatctttggggctggttattattctgccttccacattcactgctgttgggtatagatttaagtctgttaaccacgagtctggttgaaaccctccttctgaaaatgcccccgaccaccggctgaggcccaaagggcagcctccatagggaatgcccttcccttgttgatgggagctgcctcttcatgttcctgctgtgggatgaggcagcaccccctagtgtcatgtgtgtgctcccttaggtggtgacagcaggagtaatggacctgtcactgccccggtacctgctgtgtcttgaaatctcttccacattccacttgtttgtttccctgagtcctagaaggcagtgttattactctcatgttattggtaatgaaacggaagcccagagaggttatgttacttgccaaggtcacacagctcctgagtcctagagctggggccccattcctgggctgtttgacttgaaactgcccaggcccccttccctttgatgctatgcagaccttcctatgttagtgtctgaacttcacctgagttcacccaactatatctctgagagtaaagtcacatgtccactgttttcacccatgcagtgactgtgtcattagcatttggactgtggccacgatgatggtgctgtcagcaccgggcacctttgccgttggttcccggcagggctgagtgcttagggtccaggtggccagcgaggtggtcagttcccacagacggttctggtcaatgagctatgcccatggatgcctgtttttcaatttagatgtaagtgtcttacatttacaaatagaaatgtaccattcagtgttccctgagatgcacgtgcttatcacctgacatcgggaaatactggcctttcccttctcaaaatagcagtcagcggcgctgtgctgtgcagggtgcatccacttgtgtgtttctcgagataaaatctctgtttgtgaattcgtcctattataaagctgttcactttatcccagctgcctttttcccttttggaaagtttgttttattttatatgcatatgattcacattattcttttttccttaggacaactacacctttgcccaacctgggattcaaatgaaagtgaaaatgttagaagaactcgtgagccggattgatggtaagccagcttcccgcgcagcccctctctgtgggcggggggaggtggccctcagccctcggtgggacagggagctgtcctcatccgccggcagcatcctggcctgctcaggatccctcatgggcatccttctgagacagctgctggtgcgtgagctgctcttatttcttcttattaaggggatatcatcagaattcagtacattcactttgcaggacagtagtgagtgtgcacccaaagcaggcagtgctcactccttattaagcctggtgattgtcataatctaggtgacggatggttgtttatggtggtccttcggtactctgttccctgcctctgtgcatcatttttctatcaaggatgctagaataatttctccatggaatctaactaattactgagtctggaaataacatctttaatattatagaaaaattatagtatgtgctcaggcaattttagattgtgctttcatgtttaagtgggggctttgaaatactttttgccttcatctttaaaataatcccccctgcgatgtgctgactgtcatattacaatagcagagtttaattaaatggaagctgagagataatgcttgcccgttccaggcatattctcctgatagtttgttaaattaatgaacagagcattaactaagtgatgccaagcagaaccgggcatgtatttgtgataccagctggtcagtgatgaggtgtggaaaagagacatgctctttcacaaagagtcccatgcgcgcttggcaaattatttcacagaatgtggagacaaattgcactttgttggaaacttagccctggccacgtgccttgcagggccctgcccgctgagcgttgccggtcactgtgccttttcccctccctgcgcctttagcacagaaggccgtaacagcagtcttcacgggaagggcgctcggtttgggaaactgctgagtgatattctaaaatggactcctacaaattacaaactccattttgttccttgattgaatctgatttttaactctgtgtctcatggtgattacctaatttccatattatgaagttgtctgcagttcttctgataatactttcagtgttacgtttagctgcttttcaacccatcatctgttaaaaataccgtttttgcctccgtcagtgcgttcatgtgcgctcaccgcacgctccaccgcgcggtcttgtttgggtgcggctgggttcttttccctgccagcactttcacaagcattccccagcctcactgagttctctgaagtatgatttgcagtagatgtgaattacacgttcctctgaagtatgatttgcagtagatgtgaattacacgttctgagcaggttcctccttttccgcttgtgtcccttggaaggcgtatttcgtgttttcgtggaggttagaaagttgtggttagtgctcgtttgttccggtgctgcagtttgggaaatacttgaattgattttctctggtgctgtggttcagaaagaagcacattgcggattcgctggatgattgtttaagagagcagcagcgataaccaaaggaaccccaacgaaatctgtactttttagtaaatcatatttttattttcagcgcagtctctgagtaggccattttcatatggcaattttttgtttaaaggatcagtgcttcacaacagagaaagatgtgtgttgccgttgagaggttaaactgtctaacttgttcctgttcttctaatgaaaccttaaggaatttctatcatggcctcataataagaatacccaggctgctaaagcagtaaatagacagaatttctcgcgtttgagctctcagactggtgggcgccatcatccctgagcaaacttgggagaagcatctgcaggtctcggccacgtgaagctccccctcacctgtttcatcacttgcctcctagagaaaggatttgtgggttggaactttttgcagggattgtaaagattttattaagggcagaggatattctaggaagaaaaaattgcttaaagaaaaaaaaagcttctcaggccgggcgcggtggctcacgcctgtaatcccagcaccttgggaggccgaggcaggcggatcacgaggtcaggagatcgagaccatcctggttaacatggtgaaaccctgtctctactaaaaatacaaaatattagccgggcgtggtggcaggcgcctggagtcccagctgcttgggaggctgagtcagaagactggcgtgaacccgggaggcggagctcgcagtgagccgagatcgtgccactgcactccagcctgggtgacagagcgagactccatctcaaaaacaaaaaccaagcctctccctcttttctgcgttttaggagaaggacagcatttatttcagaaaattttgataattcagtgaaggaaaacatcttcatggactcgttgattaagaatggagaggttttgagggcattgcccagatgggaatagttcagaaaagagccgaattgctctgcaaagtcaagcggaagtttcagcagtggtggcgcgaggataagggctcatcaggagcgagcagagagctggaggagggggaggtcttggggatggagggaagcctggtgaggggtgagagggcagatcggaagaggggctgcatcactcttgttttcttgtggtaaggagttgtgaaagaatctctcaaaagcacttctgagtagtttcttcctatcttgagtagtactgtgacccttctttgtcatccctaaacctttagtaaaagtctgccgtggagacacgaaggtgctgagaatgaagagagagggctgtgtctgtaatggaagccgcgtggaaaggaggatgggcggcagccttcgagggtgtgtgctgggcagggagtaaagcgacaggcaagcccgcagatggggaactccctgggaagccccctgtatccttcgggacagacattgtatgagttcccacagaatcagagagggtgactggagccactgaatttggagtgaaagaaaaaggtgagagtaggaggaacgtgcgttttcagtcgtggcaggctagataatttcaaccacatttcccactggataagacctttttgtttttttaaattaagccaacaaagcaaaaagaaaaaaaaaaaaggaaagaaaaataaatgtcttaaaagcattgaattgctatctacaaaataaggacttcctgggccagagtgaagctaggacctggctaggtatgcccagctctaaagccaccagtgttctgggtgtgtgtttcctgatgcagaagaaaaatcatcccaaagctggttgtggtttgggcgcctcatgtagtgcctgcatccaacccgattagtcaggatagggatctgagaaatgcccatacagtttgtgagacccagaatagtgacacgtgagggcaaagtggacgtgatactccctcataaaatctaggttccaacctgagaggatcagggttgtttgaacctcagttatgatgattctatactggagttccccagaatgctagtgagaagcaaaacaaaatcttgtctggaggaagttacaactgaaattgtatttttttctttctttcttttttttttttttttttaataactccaaacacctttttcaaataaagtgacccacacacatgaacccgggaggcggaggttgcagtgagccgagatcgcgccattgtactcccgcccgggcaacaagagtgaaactctatctcaaaaaagaaaaaaaaaaaaaaaaaaagttgggtgatgtttttgtgaccagaaatatgccattgaaacttacctcttgtttctgtcaatcaccctgtggtaaaattggtttcattatatgtcgttttgcttcaggtcagcttctgagaacctgtggatgattgtaagtgggtatttggtggctagtgctgccgagctccacaggcaccagcctagaaaggacttcagagataagagcataaatctggagttttaacccaaatttaattcttttatataatcttttggaatattttaagggcttggcatttttcttcaggaagaataatttttctgaaaaattctcgaaacaaggctcatggctaagtggaattaaataactaaaagttaaatataagtcttaaagtttattttgttttatgttagaatagggcatgtgtccagcaactccacaaaaaatagaattaggatgtcgcctaatctgtattatcctgccttgtgttacttaaaatttaataagcatttgtaggctcaaagagggtatgctgttctttctaaaattatctagctaatgtgttctcaatatttctattaattgtcaatctgttccctacttagcaaaggattttgtatataaaatcaacagttcgcaccaattatttagtaatttactgctgtaataataaatgtacctttactctccaactgatagaatttcagcgtataaagcacacgatgagatttccactccgtattacatcgagaacgcttacacctacttgaaattccacatttttgcagtgaatcctaatgacgtcccctgtacattttgtttttacatctgtcacgtctgatgttaacctctgaaatcacatgatccctgtttgtccccaagatagaatggccagaggagtgggcttcagccctagcctttccaaaggctggagtcagagcccctctgtgtgaattctggggccagccccacctggtactcagtgtcatgcatcttttgtgacatagatgacgtctgtataaatgagatatttgctacattttttgattaaaaaaaccatagagaacttttttcagtattttaaaagaatatttgaaacctcagcagatgtgtccatttgattatgtccattcttgattttttcagatttaagagtagatcataaacaactgcatttcagatcagagaattgtcccattgggggtgacactggcactaaaagggaggctcttggattgtttctggtgccacagtggtggtgccagggcaccgttggatgaggggagtgggaagagctgtttcctggggccccggttctggtgggctccaccctcacgttgttctgaggggacttaaggctgggaggccctcatgggtcaggaggagctgctggcaaaacctgatagttgctaagctgatctgaacttagcttgcaaggagcagcagcccagaggccttcccagcaacagcatcgaagctgtcgccagggccgcctaggggatgtaggatgggccacagccatgtgccttctgagttttctcctgcaaactgtgcctttgcctctctttagtaaaaaatggaaacaactgcatctctctaccttctaaccccacggaacctccaagggctaggggcgccaaactgagcaaataaaaatagagaacgtctagttaaacttcaatttcatataaacagtgaacaattttttaatataagtatgccctgagcagtgtttggcacacactgaaattcagagttcactgattcttctgtatttatctggtaatcctccaggggtgagttctgagtggggtgaagtggaattcagacccaggcttgagctctaggttaccctttgctccccgaggttacagatgacaagaatgtggccttaaatgtaatgtgttatttgaaattaaagtatacgcacacacaccctacacacacatgcctgtacacacataccctacgcacacatgcctgtacacacgcaccctacgcacacatgcctgtacacacgcaccctacgcacacatgcctgtacacacacacccgccagatacatatacacacaccctacacacacatgcctgtatacacacaccctacgcacacatgcctgtatacacacaccctacgcacacatgcctctatacacacacccaccagatacatatacacacacctacagatgcacccctgtatacacacacacccctacacacatgcctgtatacacacaccctacacacatgcctgtatacacacactctacacacacatgcctgtacacacacaccgtacacacacatgcctatacacacacaccctacacacacatgcctgtacacaccctacgcacacatgcctgtacgcacacaccctacgcacacatgcctgtatacacacacccaccagatacatatacacacaccctacacacgcatgcctgtatacacacaccctacgcacgcatgcctgtatacacacaccctacgcacgcatgcctgtatacacaccctacgcacacatgcctgtatacacacaccctacgcacgcatgcctgtatacacacacctacagatgcacccctatatacacacacccctacacacatgcctgtatacacacacaccctcatatacacacaccccttcacagatgcctatacacacatctgctatatacacatacacactcctatacacacacccctgcacacatgcctatatatatactcctcatacatacacacacccctacacacacccctatatacacgcatctgccatatacacatatacacacactcctatacacacacccctgcacacaatcctcatacatacacaacccctcatacacacacccctatatacatgcgtctgccacatacacatatacatacactcctatatacacacacccctgcacacaacccttatacatacacacatgcctgtatacacacccagccctacacatacccctatatacacactcctgccatatacacatacacaccctgcacacatgcctatacacacacactacttcacatatgcctatacacacacctgccatatacacaggcaggctcctgtacacacacccctgcacatgtgcctgtatacacagatacccctcatgcatacacacctgccatatacacatacacacctctgtatacacactcagatgcctatatacacacacacctacacacatgcctatatacacacatacccctcatacatacacacacctgccatatacacatacacacacctacatacacatctctatatacacactcagatgcctatatacacacacactcctacacaaatgcctgtacacacacctgccatgtatagatacacccacactactgtacatacacacacccctgtataagtgcctatatacacacacccctatatatacatacctgccatatacacatacacctacatacatatccctatatacacatacccttacatctgtacacacctgtcatatatgcatacacatacatgcctttatacacacacatccctatacatatagacaggcctatacacacccaccatatacacacacctgccacatacatatacatgcatgcctgtatacatacacacctttgtattcacacactcttacacacgtgtctatacacaaacacatgcctgtatatacacataccactatacacacgtgcctatacacacctgctatatatccacacccctcatatatacacacatgcctatacacagaaacaccactatacacacaccccctacacacatgcctatacacatatacactcactcctgtatacagataccccctacacacatgcctatacacctacacccctcatatatacacacacctccacacatgtctgtacacacatacccctatgcacgcaccaatacacatatatacacatacccctataacacacacccttatacacacatgcctatacacccaccatatacacacgcatacctacacacacctagacatacctacctgcctgcctgtaacacacaccttcccatattcacacataccctcctacacacatatgcatataaacatacacgcaaacctatacacacacacacctctgtatactcacatacccccctacaaacatgcctgtacacacacacacacacccacacacacacccatatacatatacacatacacacctacacagatacacctacatgcctatatacacacatcctcatatacatgtacactcccgtatacacacacacacctacacacatatccaatatacacacacagccttatatacacactctccatatacacaccccccatacacatacacagctacacacagatgcctatacagacacccccatatacacacacacctcctacacacatctatacacagacacacacccatatgcacacacacacacccttatatatacacacccctacacatgcctatacacacacctacacacagtcccgtatacacaggtgcctatacatgcacaaacacacccctatacacatgcctttacacacacacacatgtatttagacacacccactttagatatgtttaatctcattggcatggtcactgtgtttgaggctatttatgtttccatattcttggggaatgtgttgttgctggtcgcacatttccgtcgcttgatgtgtcagaggagggtcaccctgtctcctccaggagaggttattgttggtggccaaggacttcgattgagctataaataaacttttctcatttgacttttcacagtgcaggcatcgcagtgaggctgcttacccagtgattgctttgaagtgaagctgcccttcattagttttggtcaatttctggcccatttctgccatcttattattctctgaaaggctggcttaggacttcttgactgatctggtgaatgtattcacaatcgggtggaggttgaccgccctgtagttggctggatcttggcggtgaccccgggtggtgagaccttaggctgtgagcctgcgtccacagcacatcttctgtggccgtctcaggccacccaggccggatggcggccacccaggatggtggccccgttgatctgaccctgtaggagctgctgacttctgcctttcagctccttaatcagctttgcgttttctccccccgctctagtggcggttgcaccccagaccctccagtcctcgttctccagccctaggccatgtgacaccacagccaggactctcaggcctctgccttggcgcttcctttgttcctgactgttcctttgtctaaaaccctttcttgcccttctgccgccttccctgacaggctgcttttcatttgtgcccaaccacaccagttcttggtgctgctcagaggtaggaggaagtattgctgggttgagccaagggtgagtagcatgaaacaagtgtcacacaggagcttgggcttcagagagcttggagctggggacaataacgcataagcaggaaacagccagatgccagcccaagaaggactctgtgccatgtgctcgatggtgcggtacacctgctgggaggggtctgcaggtggccccttcttcaggccagagacaaaaaggcgctatcagaatcccagaaaaatgtcactgtcacattgacctcgacccaggggtcccaaagctcctgggtccctgaagagttttcttctgtgatgttcctcctggtttggggccatcatgagtacttctgaattgggttggtagtgtgccacagctggctcgctgtgcctagggcactgggcaggcacagaacatgtgtcctgcacctctgcagagcgtctccagcagggtggcctgggaaccacgcagatgaaaaggcagctgcttccgacagtgactgataagtgtcacagagctacaggtgcattgtaagagcacatgggagaggcagaggagcccttgggaaggctttcctgccccagagataaaatggcttgtgtttgcttggacccataataacataccacaggctggtggcttaaagcacagtttactttatcatggttttggatgccacaagtccaagatgatggttctagctgctttggtttctggtgagggctgtcccctagggttgggttgcaaaaggctgccttcttgctcacatgtagatatagcccttcctgggtgggtgcctgtgggggtagcggtggtggggaggggtggcagtgggagagagagcaagcaggagctctctgccatctcttatagggacactaatcctgtgggatcagggtcccaccctcacaatcgcatttaatcttaatcacttccttagaagccccatctccagatacagccacactgtgtgttagggcttcaacatagcaattttggggaaacactaacattcagcttggaagtgtggggtttagaccaagatacagttcatggaagaaatgatcatcattatcattcattagcaggaagcatgactcttgtcttgggcaggtggagcagaagaatcaagtttcaaatatttcacattttccaaatcaaaataatgccatgagggaaggaagaggggactcttcatttctctttgaaatcgagtctttgaagctttataatcaagggcaccaaaaaacaccagcaaatttggattttgtccattgaaatggccgttaaggacttactccagaatgctggttcatgatagatggctattgacgaaatgagatccttccaatgtttgttatgtttgttctgtgtggagctctcagtgtgctgtgggttgaggatgtgagcatcttggggtcaggtgcccttttctcagccctctccattcattttctagcctggagggagcagatgcagatagctgtgggtgtggccttgataactggcacttgccaactctccccaggtgtagagttccctcatagagttggcctggagaccctgcctgggacctgaaccaggacagggccttctcacacctcccttggatccacatttcaggaccagtctttgtggaggctgatttgtaaggcagcctctgtgtccagtgtatctgcccacctgctgtgcagagcatcctaaccctgacctggtccgtatctgcaggaaggataggacaacgatgggctgcagcaaggggcaaggctgcatctggaaggcagcctgtccctgcccagggtgcttcctgatgatctcagggcggccagtgctggccccttggagtgaggcctgggtacaggcattgagagaggcaggagagccttctgtcccttcttccaggtagagcaaacaagctggtgcctgtaaactggtagaaacctcaggaacaggctgacctcccaccgggaagttagaaggaaattagttccctatgttttggtggctgagtgacagcgaaaatgccaggccaggagcaacaatgggagattttggtttggggactagtttgtgggttagaggaggaaaggacttattagaaataattctcgaacatttctggcttattctaatctactcttcagctctgtggagtaacagcttggagtttggaagctggcagaattgggttgactttctggctgtgttgtatactggaggattggctttgtgaggaatgtccccactctagcccttgtttccccatgcatgacgggtcatgggagtaaagtacttacaggagtgcctggcacacttaagtctcatgcagtgttagtacccattattgtcattatcatcaccatcagcatcatcatcaccatcatcatgattgtcatcaccagcatcataaacaccatcatcaccaccatcatgtcatcatcaccatcattatgtcatcaccaccatcatcatcaccatcaccatcatcatttcatcaccatcaccatcatttccatcatcaccatcattgtgtcatcaccaccatcatcatcaccatcaccatcatttctgtcatcaccatcgtcatcactatcaccatcatttcatcaccatcatcaccaccatcatcttcaccatcaccatcatcatcattgccatcatcaccatcattacgtcatcaccagcatcatcatcaccatcaccatcattctgtcatcaccatcatcattactatcaccatcatttcatcaccgtcatcattaccatcatcaccatcatcatcactatcaccagcatcatttcatcaccatcaccaccaccatcatcatcactatcaccatcatttcctcaccatcatcaccatcaacaaactgtacagcaggatgggtccatggtggggctgagtgttggaagtttagtctgaaggcctctgcttctcccacgttggaccttgttgagctgccaagggccctgtccatgcctgctcctgaggcagcctcttctgtccagcccccagggaggttggttggagtggaagacactggctgagtctgagtcaggggcaccgaggtgacagtggccattgttattagtcatatcttacactttcacctataaggaagaaaatgccaacaaaacgcggtactggagaatggttccacctgtgtgggaaacggctttatgtacctgaacattttccctttcctgtgtttttaattcaggttaaatgtgattttaatcaaatttctctgaaagttgtcttgactacctcgtaaggttaaaattgacttattcttttaagatagaattcagttacagctaggaaactagattcagctttattaccaccctggtggaaatatttttattacccctacaaagtaagcagccgagaagcagaggataaatcagcagcgcagccaggccggggaacaggcagcgtggctccctccccctggctctcgtcctcattaggctccagaagggcagagctgagcgtttgaaatgatagtgatatttcatctgagacgtaaggacatgacaattggcaaggcacatgcgtaattgctgttatgtgcgacctaaggtgtgtgtggactttctgggaggcgtgctgtgtgtgctggcaagggctgcattcctgtgctcctggtttcctggttcaggcagagtcttggtccccttctgcttagcaggtcttcacagttgaacatggctgtttattctgtgacccaggtgactctgcttatcattgtctgttggaatcattttggtgaacctgtctgcagcctgggttccaggctaccccaggcaggaatttgctctcttgttggatggatgtcctgagtttcttaagtcaagctgatttaatgtgctttccattgaaactctaaatggatattttgttgcatttttgggaagagggatgcatatagaacaacaacaacaacaacaaatcaaagaaatagaagtttcatgtaaacccaaaaataatatattaggaatatacacctgggttctagttcagcctcggtccctgactctggccttgggctgctgcggggaatgatgataatagcagctagcattgattcagtgcctgcagtgtactgggcactgttctcagctctttatctgtatcattgtgctgacttttcataacagccccatcaactgcataaatgggccccatccccgtactcagagtcctgcctatcactgatctcagcttccccgcaggctggatgatctccaggttgcttccagcgctgcccatcctgggttggtgcacaggagagagccctcccagttcctccctacctacttgggcagccttggggtgtcctgtgggctcaggggacttgcctgtctctgctccagggtttccttgggagccgcagcctgcagctgtgcctgtggtcgggccctctacctccactccccgcgcttcctcctgggactcctgaccagcatcttgtgccttatggtgccccgcccacctcatgaccctgagaactgggagattagaaggtcgaatgtgcccttttgaagtgaggagtggtcgttgcttcttttttggcttcgaccacatgcctacattttcatcccgatgttccccataaccaatgcccagtttctagagcggcctcagcaaatgttggggaactaagggataaagtgtttaatggagcagcctgcacgttagggctccagcagcctgtgtggcttcacattgcttcaacatagctcatgggtgacactcccctgcttaaagaggatgtttggagtggggatttaaagcagtttctctgttgttacttttgtctccagatgtttatgattttctttgggttttcttcttagcttttgttttccccgaggatctcaaatcctcatcctactgccctttaattcatagaatagaaaatctgcatgtgtggaaaagctctgtaattttaccagtgcagcctatgctgctgctacatcccctgtaaaagtgacagaatacaatgttacgtatctagtataaatgatgaggatgcttgctgactcccttgcttacatctgagatttgtcttgcctcaaagtaaatcctttcccaccccgctctgccttggtggccttgtccccaccccgcccccagctgattctgcacacccttccctgtacactcacctgtgggcccctcgggttgactggcctctcccagcaatcgaccatcgtgctgggaggagaggctgtgtttcctctttggaagagccttgatctggagcgacaatcttcacatttattttccaccaccccaaagttgttaaggtggtcaaaggaggtgatgcctgccagggtgctttgaaatgtttggttccgctgtgaaaagctggcaaaagtctgaacagaagattccatgagtcagagggtcctggggctcacatccccccagccctcctgcccctgagccattaaaacccagactagcccagcactggtgcgttcttctctgtccccgtcctgaacctgccaggctttccctgaggtccccaggcaccaggggattattgtcaggcccctcactgtcgtcctgggccctcggaatcatgcctctgtgcccagagtggtgctttggaagaggggtatggccttgtcactggggtccttcatggccctcacctgtttctctactctgtttctttctaagccctgctgccttcccggctcttcctgcattccttccaatttcagctcattttaaggtattcctcctgaacaagtagagagagattcattttcttaaaactgagggacagctttcatcccacttttggactgtggccttcaggtaggaccacacttcagccccctgcaggacaaaaggagtagcttattctttcagagctcgtgctgatgtgtagttggctcatgaccgcggaggacattctgccctacgttagaagacgggacattaacagttgttccgagagctcatccttccaggcctgtacttagcacagaatcataaaaaacttgctgttcggagcagagggtcctctgagatcctctggccacccccacccagtctgtcgtatggcttttggaaagccatcgtgctccagttacagccgagctggggtggaccgggagagggctccctgcatctggccctccagcctcccgccccgtgcgcgagtggagctggacatagcacttgctgtggagctgctgggcactgcctcttccactgcatctgtcccagtcgcttccttcccaggatctttgaggtgctgggagtgggaacagccaaattgcggttagcatttttctttttagctgctcaagtgtggagtgtgtttaccaccaggaagtggtggtgaccatgctgtgtgtaatgaaatgcaaacacgtgaggcctccctggctcatgatccagccacttttctccttgtgatgatatctttgtgactctccacaccgagactgatgtttggggtttattgctaaactgagaatagttaattaaattgtaagtagagacatacaaataaagtgattctccttgaccttagcaagaaagagctgtcgtggtttcgaatataggccgtcagactggttttgaagtgattcccaaagtcgttgctgatcatggttacaagtagctagagagactgtgtcttttctcttcttcattttaaggaaccagtgtccctcttaaaatcaggctaggaggccgcattgcaggtggaaacgcattgcctttccgggccagggcttgctggggatgaggacagtttattttgatggggtcattttcctttccacaccataagccattggtcctgaaataaaaggcattggtcccagcattggagggcacatcccgtctttctactcctctctaccccctcgtctctctagaccctggactgtgagtaccttctgggtcaacccttcagggtaagggacattcccactcttctcagacccacagtcacctaggcctccctctgcagtcagaggtctgtgtcgctgcacacggccagtcctcccactctgctgtgcctggatctccccatccagagaccctcggtttgaccctctgccgagcggaagctctggtgatctgggggtgggcgctggacccaggcagtggggcgtgtggggatgtgcagggatggctgtggggtctagctgctgattacagaccacactcctgtgtccccgccatgcccctctttggggatgcacagtgctgccagtctctgatgggggctcatcaggtgcatccgggctacccctggctttctgcagcggtggcccgggcttttgctttctcaggcccctgtgaggaccactcctccatctgcttcccaggtcctcccatctggctttctcccctccttgtgtgcattgagtgttgactcttctgtggtttttgtgaggtgctgggacggggagaggtgaatacaggtgtccagagccctctgatgactcccatagccgcaggcctcagtctgcgctgccccagactagacccagggccccatcagtccccgctggacatgccgtgagtgtgcttttgtattgaggtggctcccgctcgcagccatgtcagggcccgggggtaggggcagctccctccagtgctcagcgctcactgctcgttaagcctactgtccctatgccccaccaagcagccccatccttcacctcacttacttctcacggcagcttgttaggtccgaactaacagtatctccgcctgaccaacagggatgctgaggctgagaggggactcttgtccgagtcacgcaggtgaaacttggagtcaggattggagcttgggtctgtcgtctctggacctgttgcctgctgcccctcagccagggctccagcgcggcctgtgtgtggggtgggtgtggtgggggggactgctccagtctctagctgttgccatgtgggggcctcccccagccatattctgccagggagcctcttgatgtccttgggacacgcccagctaccaacagagcctccctctcccttctgagctgcctgggtgactgagggccccaaggggcttatgttcactggccctgtcctccctggcacctgtgcacacacctgcacagagcagaaggaatttggacccataggttcacctcttgtaactcgtgtacatggcccaggtgttcctgatgccccacctgcgggacaaactggacgcagcagggtgttttgggggcacagagccaccgtcggagtcacacatcgcacacacccagcaagtgatagtgtgtgaccggacatggtgctgaaggtggcctatgtcagccatgggcttggtgattttgagagccaggatgcggttcctggcgcaggtgcctgggggcgcctagaggagtgcgagactcccgagggtccctctgcctaagctgcctggggagggcggctcgctttatttaattcacacgctcaaagcatttcaggaacaatgaatgccttcggccctctgtttaaatgactgaattatagaggtgtgagggggccacgcccaccccgttttacacttggcgcctcccttctaatttcgaggaaacctgcaattcagctggaatctgtaattttctacttgatcttgctctagctgttctcccatcatagctctgtgagcacagagagctccagaaggaattgtttcttgtcttgcgaccacacacatataattgttctggttgaacacgttttactgtgcggtgtccatgcgggctgctcccggacagcagcagccaggaagccagggcccagcatccaagaggcagacctgcaggatgagagatccaacatccctggccaccagccgcctcgtggtggtctcagccaggaggagaagggagcctccatcctcgaagcagcctggcgtctggagcatttcggggtcttggccttacgctgccctatgtagcctggagccaggccagccgaggagcctgggcttctcctcatgtccatctgtctcttcctctttaatccctggggaatgcagcctctgcttatctgccactcaggcccctgcagccccctacctggtctccttggcgtccactggccctccacactccacgtgcccccctgggatggcagagccactaaggatggaagtaggggttcctgaagagtcagcagcatgcacttccctggttctgtcccggcacgcttcctgtgagtccagccctccagtcatgccagggtgcctggttgttaagattgtagaagcttttacagtgggcactggcgccctgaactcctgagtgcaccccctttgtttcagccctgggaactttggtgggcaaaagttcccaggaagcccctgtcacacttggtgacctgtcaggcagcctggcagggtagcccagaccctgctgtgggtgccatcatcctggcgggcacgtgcttggtcttcatcccccacctccccgctacatgagtggttacctacagctggctggccctcccccaaggaaccctcatgtggcccagggaagctgccttcatgatactcactgttaagtgttttgaatacagtccttgccccagtcagcttgctcaggtgtccctggagaacgagcccctccattggctcatcctgaggactgggctgggaagggcagtatgtgcttgtaggacaccgagctctttgcccgatagtgtcagtgggaggttccagaactctgccgtcccgaagctcttccacttaggatccaggagcccaccaagctcctgtcctttgtccgctgcacgagtccttcctgtgtctgccctgctgtcctctcaggtggagccggtctcacattgctgcgcttccagtcacagccgtattcgtttcagaagctgctgccgcggatgtcatcgtgtctctgcctgcctgggtggcatgcggagggggctaccggcctgcctcctgcagagctgctgcgtggctgttgtgctcctcagagtcctgggccaggttcttgccctctggggcccggcgagcctcccactgctctcaggtttgacgcacctgtcccagtgtccgctgatggttttgtctgacgcgctcaggcctgcgatggtcgccgatggcggctttttctaactctagttttcctccatttgttagttggttttctggccgtgaggaaaagcttttcttctcctgtttattgggacttggggattctcactttattaccagttacaagtctttcctgtcattaatggtgttgatgctctacatttcccaagcttggtgcgggagaccttttaaggattttttccatgggaagaaggcagtaatagagttgctctagagtggaaaattgcattttgtatgaaagtcacatgggcgcatgggagggctaaggagacggtccatgcagggagataggagaagacaggagggccacacatgaccaggtagtaagcccaaggctgcggtctccgggctcaggtgaggggtcgccttcttctctgagatggggttgggagatgtgggagctgccctccctgagtgttgggggaacctggagctgggcgttgggcaggcgccatgatggggttggcggcagaatgctggcgaggaggtgggctctgggcacacccagcggcttctgagacacacatgcgctctgccctccctcggatcctgtgtgccatgggaatgccaggtggggagggagtgaggtggggacactcaggctttgtgtgacccatcagaaaacggaggaaattgtgatttgctcccagtctaaggcgttacgagaagtgagaatttttcagggatctgtggttacatttcagtgctagaaaagtgaaaagaactcatttctgtcagaatggggtaaggggcctcttagttctttgtatgtaatggtgatgaataaaacttcccttgaaatttatcctttgataaaggaatctcatttttaaacaccttccatctattatttaaaaggtttggagctcagtgcccaagtaactttgtcctgctctcttggtagccgcgaacgtccctttaatacgttccattcctgcatgctgcctgtggacacctctgcagtggtggggctgcttatggatatggaggtggagcagaagtagtttgtaatgggcagtcacattcccaggaagctctggtgtggacaggtgccccagagattgctcaggcacctcgttctgggcactgaggcctgtgccaggcgtgggggcccagagcgacctgactctggccgttcctgcttcccctgcgtcagtgtggctgctggcacttctgttcttcctatccatggaaggggcgcccatggaggggcggagttttccctgtgtttcgtctgcagcggagtttctgcgtgttctgctggatgcgtgtggatctgtgccgttggtctgttctgggcgcacatgcaagcccatcacgtctcattctagtttttgtccttgatttgttgtttcagtgacatcagtcactgcatgaagagtacaggtgcccccattttaatgcaatctgaggagacagacattggctagactgcttttaatttaagcctcctcttctctgcctgccgttcggctcggctgtcctgcctcttggaaccagtccgtctgtccgtcccactctctcccctgcttgggctgacgacacacattcatgtgagtcagtcactgttggtggctgtttagtgaatggccacttgggccacgtcgctgagcaccatgaggcattaagaacatcaggcttaggctctaaagatgcgtgagctgggacactggcttggtagcactcccccaccaccgtgtctcctgctcaccggtcgtcatcgccatgaggagtgggtcctggtggtgggcggggccaaggctgctgaaaatggaggcgactgggatcctgggtgggacgagtggaaacacgggatcctcagggccctcgcctgtcactcacatttttctggaggaattcagtatgtggcatacttaagcagttctcctttccttcccctcatcctcctcctgtcttagccagacgttcctgtcagcatagcactcactgtggggtcctgacagcccccgtgctccttggagtcagttactcagcaagtcttatccagcccctgtagtgttggaggctctggtgcaggagacagtgagcaaggccagccacagcccctcttcactcccgcgcctcccagctggcctggcgcccacatccagcacagggagggagcacggagcctgcgtttgttcactttccgagtggcctcccagtgcgctgggtggagcgggcagcacccctccactgtccagcggtcccagcacctgctcgtgcctcctactccctcccagcctggtggcttccggatcaggacatgaacaccctcacacttcagcaagcatctgtgaaacgtccactgtgtgctgggacctgagtggacagtgatgagctagacaaggtccttcttagggaactcttctctgatgagatggcagattgggaggacagacgggagccgtcactggctgtagtttctgtgacagcgagcgtgaaggactgagttgaagaagtgtccagagaaagctgtgcagaggttgggacatcggtgctgagtctcgtataggtgtttgggggcagaggaagcagtgtgggtgtgcagggagggaggatggggcagcagaatcagcagtgggggctgtgggcaggcaggggtagtgatatggggcatgtgggatagagacgttgtgggcagtggtgtgagcagtcgggggtgtgcagggaaggacgtggtttggaaagtgcttttcccggaaggtatgctaggatgatccatcctacccatccatccctcactggctgacccatttaaccctccatccttcccctctgccttaaccctccatccttcgcttctcccttaaccctccatcctctcctctctcttaactcttcatcctcccctctcccttaaccctccatccttcccctctcccttaaccctccatcctctcctctcccttaactctccatcctcccctctcccttaaccctccatcatgccctctcccttaaccctccatcctcccctctcccttagccctccatcctcccctctcccttaaccctccatccttccccgctgccttgatccatccccccacccatgtctcagccatcagtccatccatcgatccatccatccattcatggaaaacttttactgggtcttgctctttgggcctagggatggaaaggaatggaaagatttcatgtcgtcatgagcttgcattcttatgggaggaacagccttgcaaaccaccaaggccactaatgtgctgcccctgcctcacacaacctacaggtcacccagtcagctgaccagcagccggtggtgggaggctctgggatcagggtcacagctcagactctcagtggcaggattctcagccatacagtgcgtcgggagagagggactctatccggggaagctctgcgtcttcaacctcgctgtagacttgggttgcatcagcaatttcttactgcagatgggatgactcgtttatctgagtaatttgtgctgttttcactgggagtttcttatttctctgtttccttctccatttaaaacaagggtcctgcctgttggtgtggcactgtctgtcaaccagagctttcttgttcctctcctgattctctgccatgcctgggtttccaagctggagtttgggggaatcctgagccatctcctccttgccttgctgcaaaggagagtgcagtgcagtcggtggctttccttctgccaagacaaatgcagtgaatgaatgtggtggacaggccctaggtgactgccatgggtcatcacctgccttggtgtcatcccctctcctggagttcagttagagtctgaacttaattctaatcgatggaacatgggattgtaggatatcaatcctgtaattatataattacaggattatataataatcctgtaattattatataagactcccccttagcaagcaggagctagagatttccctttgcttctgaagtaaggggctggccagagaagcccacatggcaggggcttataggcagcctccagcccacagctggctcagtcctgtagctgccaaggagtgaatcctgcctgcaacctgaatgaaccaggacacaggttcttccccagtcaggcctcctgatgaggatgcaggcctgatggcagctttgtgaagccctgagcagggaacctagcagaactccacctgtagcctggagccctgagcagggaacctagcagaactccacctgtagcctggagccctgagcagggaacctagcagaaccctacctgtagcctggagccctgagcagggaacctagcagaaccccacctgtagcctggagccctgagcagggaacctagcagaaccccacctgtagcctggagccctgagcagggaacctagcagaactccacctgtatcctggagccctgagcagggaacctagcagaactccacctgtagcctggagccctgagcagggaacctagcagaacctcacctgtcgcctggagccctgagcagggaacctagcagaacctcacctgtcacctgtcacctgagcagggaacctagcagaaccccacctgtcacctggagtcctgagcagggaaccaggcagaacctcacctcgagcctggagccctgagcagggaacctagcagaacctcacctgtcgcctggagctctgagcagggactctagcagaaccccacctgtagcctgggcccatagagactgtgacccatacagactcataaatatatgttgttttaagctgctaagtttatggtaattggttacagagcaacagaaaactaataaaatgaacaaaggacaaataatcccacagagtccctgtctccctcccgccccagtgctggggttcagggcctgctcctctcacttcaatgcagctctgacgttcctgggtcaggaactgccacccgcttgccaccccgcccactgttggcaggcactgctggctgtggcagtgtagacagggctgagtggcttacagtgagggtctcagaagggtcccaccaccccttccactccacaggctgggcattttccctcaaatagagaaaagaatacaatcaggattaataaaaaatcacagccccacagttcatttacacttgatcagggaaatgagcaccaaatgttggacatttttcctgtttccggtcaacattgatgttaatgatctccaaacaaagatgctttcaggtttggtgacagcctgtacacccagtgctctagttcatgttttcagggagctgactcactctgctgcttgaatcaactgaaagctggaaaaaaatatgtgaaacaatggtttttaagatacaggacataaggcagccgggccatccctgggagggaggaaaagtacagggtgagctccatgattgcatgaaagcattgcctggagagagtctctggagcatggtgtcaggaggcacctgcaggtctccctgagtttagacagaacagggagtctggggaagccacggcatctgggggttcttagggctgaggctgggagaggagaaagcaactcagaaccaaagttctggtgacagagcgagactctgtctcaaaaaaaaaaaaaccaaaacaaacaaacaaaaacaccaaagctctgcacgggttcctttcaggtattaagctgaatactgatcaatgcacggatgtgaggttggggaagaaccgcttgaaatgatgacagagaacaagcctcagagcccttacagggtggaaactgtgtctgttctccaaagcaagaacggaaaactttagaagtccccggcatcaggtaggggacttagaagggttttccttcagtagtggtagtatagaaacctgaacgaaatactactctggccccaaagcttaaaaacaggatcccacacaattaatctgttcccaaatgacttaattgcatcccagcaaaaattcaaagatatttataggaataaaaaaatatcaggtttccaacaagataaaagtgacaatatctagctttcaaaggcattgtcagccatgcacagaaatggaaaagatcgcagataatgagaacaaaagtcaatcataactgacccagaaatggtacagatgttagactcgttagttaggcagagtcattaaagcaggtattataactgtatttcatatgttaaaaatctggagaaatagataaagacatggaagtagagacatggaagttataaaaatgatccacattgaacttacagagaggaaagaccatgtcttaaatgaaaagcatactgtgtgggattatcagcagattagactttgtacaagaaaagattcatgaacctgccaacacagcaatagaaactattcaaaatgaaagagaaaaaaatgaacagagtcagtgaactgtgggacaatttaagtagctttatatacctgtaatctgtggtcccctaaagggaggaaacagaaaaaatattggaagaaataatactcagttaaaaaaaatcatatggaacctataaacctgtagaattgagaatgtgaatgaatgccaaccgagcagaaaacatgaagaaaaccagaacaaggcatgtcataatccaattgcccaaaactactaatataaagaaaacatcagaagcatccagaggagaagagacaccctgcattacaaaggtaagcatgacaacagcagtctcattggaagcatcaagcctggagacaagggagcagcctgtttggactattcaaagaacagcaaaccagagaaacctgttaaccagcaaaagtatctttcagagatggaggtgaaatacgtgctgtttcagacatataaaagctaaaggaattcgacaccaggagaccgggatacctgcatgacaagcaataggtaaacttgcaggtggaaggaatatggtcctagatgaccgtgtggacctgcacaaagattgaggagtgcccaaagtggcaagtctaggaatgcattgaaacacgttttcttgttattgaaatatcttcaaaaacaaccaaatggttaaagcagaaacaataacagtgtactgtgggttttctaacacatgccgcggtgcgatgaagatgacaggagcgtaggcgtcggcagggagagatggaagtacatcgtggtaaggccctcacgctgtgctgcctgtgaagccgggtaatcgtatctggagggaaactgtggtaaggcagggacacataccatcacccttacagtcaccgctaacataaccagacagagctatggctaataagctaacagaggagataaagtagattatataaaatactcaattaatataaaagaaggccaaaaaaaggaaaagtggaacaaagaacagatgggacagttgggccacactaatagtagtatggcaggttctaactcagccatatcagtaggtgtgttcaatgcaaatgatctagacactttaattaaaaggcagatcgtgttagattggattaaaatcaacacccaactgtgtccttcactcgagggttctttgggctgagggtgggagaggagaaagcaactccgagagaaccaaagctctgcaggggttcctttcaggtactaggctgaatatagtttccatactttagggcatggttgctcaaacccatagtcccagcactttgggagactgacacaggaggattacttgggcctgggagtttggaaccagcctgggcaacatggtgagaccccgtctcttaaaaaaaaattagctgggcatagtgtagtggcagacgtgtgcctgtgggcctagccacgcgggaggctgagttgggaggattgcttgggcccaggaagtcaaggctgcagtgagccatgatcacgctgcagcctgggtgacagagcaacaccctgtcccctgtctcaaaagaaaaaaaagagaaaagcccacaaatatgaagaagcaaatagtttaaaaataaaatggtgggaaaagatatttcatgctaacaccaatctaaagaaaacggtaatgtctatattaatggcaaacagtagatttcagaatagagaatattatcaagtatcaagaggatcatttcatatgatagagtgggtcagttaatcaattggacataattttaagtgtttatgcgtccaataagactgtatcaaaatacacagcaaaatcagataaaaatgcaacaagaaatggacagagacacagtcactgaaggagattttgagctcctctcttcaggaagtgttagaacaagtagaaaatcaggttataagaagcttgaaaacactgtcaacaaacttgacttaattgatttttatagaaaattccaagagtgcacattctttttaattttgcacatggaacatttaccaagatagaccatattttgggccattaaaaaagtttcaataaatcttaagggattcaagaaatatgaagtattttttgttttctcttagcacaatggaattaaattagcaatctttagcaagatacctgggaaatcctcaaatatttctaaatgaattaacccacttttaagtaacccatgtatcatagaagaaacaaaagggaaatgagaaggtattttgaagtgaatgacaataaaatccaacacttcaaaatttgtgggatgcaaaagagcagtacttagaaacgtatagtacttcccttagagggaaacctatagcactaagcagtacttagaggtcaacgtatagtactgagtgtgtgagaagaggctgtatttacagggaaacatatagtactgagtgtgtgcgaagaggctgtgcttagagggaaacgtatagtatagagtgcgtggcaatatggccatgcttagagggaatcatatagtactgagtgtgtcagacgaggctgtgctaagagggaattggatagtaccgagtgtgtgagaagaggctgtgcttagagggaaacgtatagtgctgagtgtgtgagaagatggcagtgcttagagggaaacgtatagtgttgtagagaagtgcagactggtatccatcatgagcataaatgtaaggatcctgaacagattttagtaaatcaaatccaacagtacacatcccgatgatgtagggtttatcctagaatgtgaggttgattttcagtcaatgtaattcttattattaacatatttaaaaagaagaacaaacccataaaaatcacatctatatatgcagaaaaatcatttgacacaatccaatatccactctcaatggaaactctcagtaaacaagaacagaaaggaacttttgaagctggataaagagcatgttcgatgtttaaacccatagctgacataataggaaagggagggtgtcaatggaaagctttccccccaaatcggaaacctgggacagtgttccttcttttcacttctgtccggtgtgtatacgggagattctggtggcagaaagacaaaaacgtacattcatttattcgtacatacatagaaatgtaagtggcatctagaccaaaaaggaagaagtaaaactctctgcttttgcagacaacatgatcatcttttttgaaagtctgatggcatttacaaaaaagctacaagaaagaacaagagtttagcaagggttcaggatacaggatctacatacaaaaataaactttatttttgtatattaacagtgagaaatgagaaattgaaattgaatgagcaatacaatttataatagcatgaaaatgtgaaatatttagggaaaacactatgataaaatatgtaataggcctgtacactgaaaactacaaaacaatgctgagagaaatgaaagatgacctaatcatgttcagagatcagaagactcaagagtattaaatgtcagctctcaccaaactgatcatacattctactcaattgcaatcaagatcccacatgcttttctatagaaattgacaagctgatttttaaattcatatggaaatacaaactccctagaatggctaaaacaacacagaaaaagatgaacaaagttgaaggactttgttcacttttttctttttttgtgtgttcacattagctgatttcaagaattataaagcttcagtaatcaagacagcatgttgttgccattgagataagaaaagagatcagtggaatagaagagagtgctgagaaatggaaccgtgcatatgtgcaatgatttccaaaaaggtacaaaagaaattcagtggcaaagcatatatttgttatgcgtataatcgttacatatgttgagcaaatgaagaagttccaattgaaaattcacatcagaggaaggagtttgaattcatattttgtgccatgttaaaaagttacctcaaaatgaatcagagacctatgttttgttttttaaatttatttttatttatttaactttttatttctataggtttttggggaacaggtggtatttggtgacatgagtaagttctttagtggtgattggtgagattttggtgtacccatctcccgagcagtatatactgaacccatttcggggtcctttatccttcacccccttcccacccttttcccctgagtccccaaagtccactgtgtcattcttatgcctttgaatcctcatggcttagcctggttggggtgggagactagtcttctaagtgaagttaactcagagacctatgtttgaaacctaaaattataaaacttctgcaaggaaacacagagcgtctttgtgtgaccttaagctaggcaagcaagatttcttggaataatggccaaaccctcacacattaaagaaaatttggacaaataaatcggaccttaccaaaattagaatctgtttttcagatgatactattaatataataaaaagacaagctaaagactgggcgagccttccagaagtgcgggctgcgacagagcctagggccaggcctgccttctggactctccctgtcttgtccagcccactcctcccccctgggcagctttgaactgcgggttccctggccgtggagcacagtcagggcccctggagcttcaggcacccagggaagcggctccgtcatctgcatttttaaaggaagtaaatcagatttgttgttgccttctcatatggaaatgaccctgttttggaggggtgtgctgagtagctcgtgtgcacgtctgtgaggtgaaaatgatttaataccttgttgcttcagtgccatgtagctctagaagaagttgtattttagattatgttactgtcaaaaaaatagacctcaatacctctctagagatgaaaagattgcgtgctgtggcgtcagataaacaccatttctttacaacctgccaggaggatttatttcattctgcactcatgtttactgagattctgagagtgagtggtcgcgttcctgtccctcggtccctgtcccccacggcccaggttctgagagtgagtggtcgcattcctgtccctcggtccctgtcccccacggcccaggttctgagagcgagtggtcgcattcctgtccctcggtccctgtcccccacggcccaggttctgagagcgagtggtcgcattcctgtccctcggtccctgtcccccacggcccaggttctgagagtgagtggtcgcgttcctgtccctcggtccctgtcccccacggcccaggaatgaatctggtatgacctcttctgtctcgcctgcctgtgcatacttagctgtgtcttgggtctgacctgtcttcagccccatccttgtgttgagcatgtgagaagacagcagttgtgtgacacgacgttgacattaaatgaacggtggagaagttatcttgagggaatgtgtttgcagtttggcctctgccttgcagtctggttggatctcagccctcaggaccatttaatggtggtgggagcattctgtttgtccccaaatgtgggacaccaccgcacgatcctgacactaacatcccagagttggtgtcagactctatgagctaagggctcagtccttaacaagagcaccctcacttcagactccagctgcacctcagtggtccccaggccacctgcacctctgcccagctggctgtaaattcagtggtgtccatgacttcaggtttgattattcattagaatggctcatgggactcaagaaagccagtgattatgattccagttttatgtacaggttagggggaccagccaaatgtggagaatcatgggacgaaatctgcaagagtcccggggatgcaaagcttccatacccctccccatggggcccggggacacagcgcttccataccccttcccatgggcccagggacacagcgcttccataccccttcccatggggcccagggacacagcgcttccataccccttcccgtggggcccgggaacacagcgcttccatacccctcccaatggggccagggtgctaactctcctgccatagccatgtgttcgccaacaagaaagcccctcagagcttggtgaccggggtttctattgaggttcattgcataggccagatgactgaacgggggccgcctgatggagctcagtgcccaacctccctcctcttccctcccttcccttcacccaggctcacctgactctacaacctgaggccttaatgtgctctctggtgtccagcccagactcggctgctgcccgaaggagaagacctgccggcagcctcgatcttggccaaggctcctggctgccgcttctggggcggggatggcaggagccctgcctgtttgcctgcagggatttgccagcgagtgtcctgtgccgggaaagtggagctgtgggtccatgattctgctgctcttccttgagccccatctctctctcctgttcccttccagctcaggcgcgctgtcccatcggaggccttggtgagcggccacagtgctctgtcttgagctgtcagccccagactgcttcccccagagtggcctgggccggggctgctgctcgtcctgggtctcaacccttcccaccctctgcccaccattggcagtgagcggttcttggtgttctggctggtgagcgtgactggaccctgcttgttggggacctggcttttctagctgtcagcgacataaaccaaaccatgcaaatgagaaaggaggtgggctcagagtggggggcctcttggtgcggaggggccctgctcactgtcagtggctcttgcttttgttctttttatctttttaactgattagagaattgaaatcttcccccagaatcaaagcctattcatggctgtcccagccaaagcgtgatgtatttgtgtctgttctcggctttgtgcggggggttgaaaggttttctttgtcaggtgtctaagtgtgagccattatgctgctcttcgggtgataaatctgagtgtctggtcctgcataaacagtgtgtgttttatgccaagtcaatgggatacgtgttttttccattttagcctaaatcctgggacacaatgtgcttgcataatttatttttatttttaatcaagaagacaagatgtttcagcagaattttcggtctgtggatctgctgtttaaagtgctgggaaaagtgttcaacaaatattgtggttgtttctccagcttgccaatatgacacatctcttcctggtgactttacaacaataacgttgccttgccctgccacataagggctttatgaaaaaaccttttcagcctgaaatatgacaataattacacctgcctgctcattcattgtatgtatactcttatttccagtgaaatggaaatttcaaattcagaattattgccaaccaaattacctttatcagtgaaagagcatctgctcgcaattacttataaaataagaaaaatgaatcctttcggcatgtacatttgcagctttgatgtgtataaatgggaagtaatgcctggagtttagcagcccatccttcaccgtgcccagacgggaggaggctttcccgctggggatgcacgtcccgggggggtgaggccctggctggccacgcccgcacccttcatgacgtgctgccagagaagccacggagtcgtgctaagtgaccacttccgtgtgaagaaggacactccccggtgccttctggatggatgtcccatgggctccagaatcaagccagcttagccaggctgtgttgggtgactcagcggagcgcttgccatggagtcccttgctgtggccaccatggtctcgtgctgtgcctgccatcacctctgggtgggcgtgggttttgccttttcactcctttcaggagttcaaggtcctgtgtcaggcagaaggccaggcactcaggacacagagagcttgtaattcgggtgcagtgcacagcttggagcccgaaggctggattgccttgtctgtttcctacaggctgctgagcccccggcgggcagaaacaggccttgtcttccttgtagctttgctttcagaggcaaccctgggaagtggaggccctggtcaatctttccttaaggaaccaatgaaagaggagcctcttgccctggaacggccttgcctgtgcctgtgaggttaacgctgtgtccggttttctggttagttccttgtgaccgggtgctcttgcagatgtactgggctttgccctgaggagggtgggtggctctgcccagggcgcaggtgcccagagatgcaagggtgggtccatgctcagctctggtggtgtggggtcgtttcaaggggacagagtggtggcaatcctcaggcccatcttggctcgcctgcctccttgtgtgcacctttggacaggtcccctcacctgcctcacctcacaggtgaggggccggggtccccagggtgtgaggtgtgtgccccccttcaggagctgtgcagtgggagttcggtgcaggttagccggccattgcactctggctggaacgggctccttctcctcaagtcagcgtccctcagggaggggctgagggcttggtggcctctgtgctttccacccctgagtccctgcaagtggggcaggaagggttaatttgtactctgtttagttaccacaatgacaggtgttccagaaatatgtgtttaaattttcaagtctgtttcttgccagtttgtgttggaaagatgtcacctgcttcccaggcccgtggtagagttgtctgttttcccaggtggggacatgccgagccccggcacaggtgggctgctgctgctctaggcaggtgacagactggccggtgagccacggctcctcttctgcgtgtgactctgtggtgtgcaccttccccagcagtcacctcatcctcatccatggcagcggctgccctgggtgccaggctgcctggttaacaaatgtgtgccccgcacacatcacatgtgtggtgggccatggcctgccttggtgctggtctctgtttccggacaaagtccctgccctcgaggaagtcacagtctagaggataagaccctctggcaagtcccacccacaccaggtcccccagactgggtccagggcctggccctgtgagtgcttggttgagaggcctcatcatacactggatttgtgcctggagtgagaggagagagggagtggccgcgaacacacacccaaagggaagaacacccaggctctgtagccctgtctaaagctcgcctgaagcctcctgtgtaaaatgtgggcacagcactcgtgtcctggtgattagcctgtgactgtcccactgctgccttggtacactggggccctgccctggcagcattggagaaccttcagagcagcggccagacagggatgtgcagtgtggccgtgtgtcccaggaggccccaggctgctgacttcagcttatctccacggcagagcttcattcacgccagtgcaaggcggcacccacttgctgcagcccagacgtccacgcagagctgtgggctgggagtggccagtgaaaccaggtgccacctgccaggccaggcacctgccctggaacgttcctttcacactgccgtcccaggctgccctgtgtggcccctccttcctcaggcgctttgtttcaagcagtgattttcctctggggctgtcgctgtcgtcctggctgctcttccccaagtagccaactgctccttcatggaagctcattcttttttctgtgcaaaagagccttgttgagtaaatggagtcattttctaaacagctggttttaagtgttcagacttgaattccacgtgtcagtgcgctgggggcagcagagtctggtagcagcttgggtggacttccaccctccgaggggcatgggcagaggtcaggcctggatggtggagccccctcagggcttcgtagaactttctatcagtttagttttgtagctgcagattaacttcaggttagaaatgattctgtaagttctttgaaaagaacgtcatgttctagggtgtggctggaaaactcctcgctattgctgtgttgagaaatagaagtagaggaggacggccaggctgggaatgtgtccatcttccggttacctgtttgctctctgtactcattcgttcatcacagtcacctgacagacactcatggatgctcagttgtgtgtactgggggccggggaaacaaaggcgacacagacctggacccacacctgaccagctcacaccccagggtgggcaggcaccctgagcacttatgcccctttcgtgataaatgcttccatagaggtgtgtatagaacgaagaagagggggaggctcacagcttggggtgtttctggaagcatccaggagttttgacgtctgggtagcctcgcactgagcagagacaggtgccctggtggaaggctgccatgagggtgagcccggggcgcggggaagcctgcgtggtagcatgggtgttgttggtcacctggtgccaccgcaggaggcatggcattgcaggggaaggcagcggtgaaggccgaggagggagtgggggtctggtgcctttcttaggcactctgacttcattctgggggccagtgtctcttcatctgtggggatcctgagacacctcctggcaccccctttggtctctctgtcccccgagggatgagcagccgtgggattaaattctgcgggggcttcagcctcaggggcccctcggcagcaccgttttgttctctccacttgccgcgctgccctttacttattagagactatgggaaccattttttggtagtgaaattagttttattttaaaaataaatgtctttaataaagcggcagtggattagaaggaagctgttaagtgagcaacacgctggcgctgcctctggacctgcactgcagccctcccctccctcagtgtggagctcttggagtgggtgtcctgcgtgagccactgggacctgtccttcctgtctctgtgagcctgtgtggtgccgcgtccttgtgtgacctgccctctgaggcgttcccagtgcagagatgtcactggcacgtcagcatcttctctagagtctctgacatcccacctggaagagtctgactgagagtcgagatgagaatctgtatttaacagctcctgtgctcccgtggtgatgaggatgaagaggagggggaggaggaagatgaagacacgatgatgtccagccctgtttgggaatccctgaggtcactgccaagcccactgcaccctggcatcaggccttccttgccctgcaagcgggcccctgcgttccctgtgccccggctgtctctgggcctggctcctcaaacgtttctagcccaacacctttcagaagtgctccaaggcaggggaggcaatccctggcctatgtgccggggactttggacgacggagctcgaacaggcccagtgcaaagatgaaattgcattgaaatcgcagttttatcctaacaactgatgacgataattgactttatggcatattatgcattggttttggttttaatacacaaataacattttcagtcgctcagaataaactgtccttgctgctcgcgtgtgacgctctttgcttgcagccgactctggcactgatgcgtcaggctccctgagtcctgaggcaccagcgttcccagccactcgtccacccaaatgttccacctctgaagctctcctgggggcaggggagacaggtgggcttgctaatgaagaagtgtgggcatctgtggccgtgtgtgtagtctgcgccagacctcttcataaagcaaaaagccaaccaaccccctgctgtagcaactgagtatctgaggtgagcagatgccatctggaggagctgccctgcaggctgctctgctgccagggacccccacccccgcctgcctccggggcctgcctggcctgcttgtacctgctctctctgcaggcctggagcccttagtgctcaagtttgttaccgcagaggcagcgcacagtggtgggggtgtgggtgcctctgggtccaggcagcctcctggagggcagtcctgtgggtcgtgggcaaggctgtccagcctccctggtgacttcctcccaggctggcccctggggctcagaacagcctttgctgttctgctccacccagttctgcagtttccacaattaattattcactgtcgtgttggaatggagcgtgtattgctgcatctaccccacagtgtgaagcaggcctcatcctgcaggcatcccctgacacccagccctacaggagccccgccccagcacgtttgccctggtcagctgaggacagcagtggtttaggggaggagggtgacagtgagggcagagacagtgaagggaccagctcccgccacagcagggtcccatcatgggaccagagctgcccatgcttttccagggccagcttagtggagcctgcttggaaaccagcccctgtccttaggtgagggcagctcccggtcccacggccctgaagtccaggccggcacccgcatgtcttagtagagctcctggtccgtcaggtggacggcattgcaggatggaccctcctgttcctcttccccctgcttctcgcttgttgctgaaatattgcaagttaccagggacttgagtaaaacaaaccagtaaacagaacactagcttttctctggtatttgtttatttgccatttctagaactttctttgagggaatggcgatccctgtgaagtgtttcggggtcacttctcagggcaagccaggattaggtaagcgtggagagaagggaggtgtaacttggaagcagggtaaggaagtgagctgcagaaagaaggctctcagcagccctcaggtgcacctgcgttttaaaaaccaaggatccactatccggctcaattgggcaataattagtaatgattatttgtttttataaagcagcacccattcttctaggccctttagagtaggacctcatgggcagaatgttggaaagaggagcataggcaccatgatcactgggattttgcctccaggagtgacaccgccaggactcagcagggggtgaggcagggagcacggggtctgagctgaggctgcaaagctgccgcccaccacagcttgatgagaggggagcgcatgtggctggtgtgagcgtgtgcttctgggagtgatgcttggtaaagcctggctctttccagaggcccagctgtgtcaggggtgtccccatcctgcagtcgaggggtgtccttcacctggcctgcaggccttgtgtcccacttgcgcactcaacggttgggtccaggcataggtggagcatttccctggacaagattgggcccctcctgaggagctggcaagctcatctcctctctctaagcccctcctgggacaccagcctgggtctgtggagcttctgtggagcggggaaagagcgcctatctgtggagccccacggtgtgggtgtcgactcaagcccccccatcttcctgggtgttagggcgtgaagcacccgaacatgtccatgattataatcatcacttcagcagcaccaccatctttcgctttcctgtaggaagggagagctgtagtctctcattaatagaatcagttctttgctccttgggggttgttgcttgggattccctgttggagtggggttctgaggcgggcgcaggcccttgggggacaagtgacctggctgccagtgcctccatagggctcccctgacagccttggggcctgtgtttgttttgtgcagagcaagtgcaccggcacctggaccaacacgaagtgagatacctgcagtttgccttccgctggatgaacaacctgctgatgagggaggtgcccctgcgttgtaccatccgcctgtgggacacctaccaggtgagctctccttcgcaccctccgccatgggggtgccaggagcccgggccgtttcctgtcgccttctgccctgggcctgtgtgctgcattcgattttttcttccaagcgctctctccattgaaatgcggtctttaaaaagtatactcctggccgggcgcggtggctcatgcctgtaatcctagcactttgggaggccaaggtgggtggattgcctgagctcaggagttcgagaccaatcatgggcaacatggcaaaaccccgtctctactaaaaacagaaaaaattagccaagtgtggtggcccacacctgtattcttagctactcagaggctgaggcatgagaattgcttgaacccgggaggcggaggttgcagggagccaagcttgcgccactgcactccagcctgggtggcagagcgagactccatctcaaaatataaataaataaaaataaaagagtatactcctggcatgctttttatctgagaagatgtaaaacagggaaaagaacttcaggccgttctctttgtggctgagtttcattctgcctgcgtggtgacagcagccttgagctctctgggaattcacatcctgagcagtgtgctaggaggatgcgagggatgctggtgactctgctgtgagtttgagctgcttctgccaaaaaactcacgctcaggactcacaccttgtctatattttgagttacatataataaagattttttaaaaaatcacagattcagtgtgtatgaaattttctactcttcaccaattctgatgaaattcaattcttcaggaggttgagttttctggaacaagccacctctcttcccttgagtgtcccatcacttattctagcaccttttcattttgttcgagatgtttgctgaagcggaggcggtgctgtggggggtttacgcgccagcctttcatcatcagttacaaatagcaggcaccattatgtgggattaggaatcaaatctctacagagtgctaaagaaagaagcgtatggctggttttcatcccggcacctcaagagccaggctttctaccacagtgagcacagcccttcatcggctgcacgttcaggatttgcaggggggcagctgcccttggaggttgatgctgggggacggacgtgtctggaaaggggagctcttggcgggaggctttttctaaggcggcataggtcccaggcactgcgttgggtcccaacattggtgccttgcccatggaggtggggaaggctgggcatcacagagcagctagggagggcctgggggtcattctgaccagctgctcccacagggcctcaggctgcgtgcgttcttcccacaggacagggtgcctgctgggcctccgtgctctccagtctctcattctgagcctgtttttgtgtgagtcatctagaacagtgccccaaagctttgttcctgacaccggttgctggtcagtgtgccccttggtgggtgtgagtgttttgtggctctgaagtcctgtattctgactttgcttttcctttgcgccgcttgtctggtctaatgatctcactacggaaattatcaccagtcagcagactgtcattcgtgtccgcgacttgggttttgttcttccaagtgtttggcagctacagaatttctggccagcagcatttgctgggacataaagccttaccttgggctgttttgttaaagtagctgtcagtctagtgctattgatcggctctctgtaacatgacaggaaacaaaacttaatatcctgtaaattgcgaatgctgtccgtttttgtgattggttaggctgtttgagacccagacctccctcattaaacacagttccttgtaatactgtccccattacgaataaattaggtattaagtcaatcgcatttttgaggagccagaaaatggatcggcttgcccatggttctgcaccacctacttaaaactcctaataggtattaaaactttaagcacaattgtggcatctttattgagttaattttcttgaaattaaattttgtcatgaattgactcatttgtaccagggactcattcttgaactgatagtaccctggttataaacctcttcatatcttaagaatcgggggtatttctattttacagggccaagtaaccatgaaattgtattgcatcttttggcaatgaaaatacatagtaatcataggaaagcaatcgggtgattactctcccctaaactggggggtttattagctgagccattacaggttttagttactctttaaccccttacaaggtagcttaaagtcctcttgggacacgtgtcaataaaaggttgtttataagcacctacaccttcccaggccctgaactagatagtatataaaaatgaatgaggggcattgtcatgagggtgacaaaaggcttggaagaggagccaatgatgcagagatagcccagatggaagagaatggccctgctcccccaggggtcgcgtgctccctcatggatgcgtgcatttcaggaaaaaaaaaaaaaaaaaaaaaaagaaatacctgggcctgggtcatttgtaaagaaaagaggtttaattggcacatggttccaaagaggctgtacggaaggtatagtgctggcatctgctcggcttctgaggaggcctcaggaaacttgcaatcatggcagaaggtgaagaggaagcaggcgtgtcttccatggctggagcaggagcaaggcgtcggggaggtgccacagcctttttttttttttttttttttttttttgagacagagtctcactctgttgtccaggctggagtgcagtggtgcgatctcggcccactgcaagctccgcctcccaggttcatgccattctcctgcctcagcctcttgagtagctgggactacaggtgcccgccaccacgcccggctaatttttttgtatttttagtagagatgaggtttcaccgtgttagccaggatggtctcgatctcctgaccttgtgatccacctgcctcggcctcccaaagtgctgggattacaggtgtgagccaccacgcctggccggtgcccagacttttaaacaacccgatctcaggagagctcactcactagcatgagaacggcgtggagaagggtggtggtaaaccactcgggagagtctgacctcctgatctcatcaccacctccaacattggggattacaattagacatgagatttggtggggacacagatccaaaccctgcgtcagcagtggtcatcaatggctgagagcaggtgcatgggggtgaattcagccaggatgagggggtcgtcgagcaagtggggtcagagggcatcggtaagtctgagaagtgtggctctgatggggagagggaagctcggatggggggtgggtggaacctggggagggtgatcccacagtgggcgatccctgggtgcatgaggctgctggggaggtgaggatgcagggcggcggctgacttgatggggggccctgtgggaggttaccccgtgcgggacgtgactcagcagcagaggagcagctggggtaggccgtggaatgaaaaagaacaacaggttctgacaggacattcaaagccaggttcttttctctaaatcccggtgacttcttcctcttggggaacattcagggctctgagtatggtgagtgagcagcagccaagccggcctcctgggcctgggaggttccatttccagtttggtgaaggccacctctcgtttgagatcctcggctgccttcagggctgcgggtacacctgaaacggttacttacgctgctttagaatggctcctcacacacatcctgtgcaggtggcgggggactcgctggtaaacgggcgaacatctccacactttacgtttcctatcccctagtgacttgatgctttttttctaaggaaagggaacatttatttttggcaggtgagtattgcaagatgacttcatttggcttaaggcctttattaaattcctttctagtgatatccaagaggccacttgaatgttaatcattgcacttctaccacccatatcccaaagtgtatctttaatcatcactgcccgcgctcctcacgcagggctggctgtaaattgcaggggatgaaagatggtgcttgtctccctgggcttcggatctggtcattcctctaccatttgcttcctctcccgagggtcagagccgcctcacaccgcactcagggtggactcctgctgagggcgcgtcctcccacttcacacccaagggcaggtgctgcggagggactggagtgtgagaatctgtggccaggacacttctatacatggaggctctagattgcctactggtcaccaaacagatctgggtcctttaaggaaaaggtttatttgagtatttcacggaagccctggtgggtccatgttctctgcggcgtcctgggctcggatggagggcgtttctgccctagttctgtgcttagctgtgcatccttgggcgagccgagtttccgatccttgcctcgagaggctgctgctaggactgaggaaggtttttcgagtgaggattggcagacgttttctgtaaagggctagatagtaaatattttcaggcttgtgggccatatggactttttcacaacttctctgctgttgtagcacagaagcagccacagacgtggacagcgggcgtggccgtgtccctgtgagacttgcctaccgaggcaccagcgagccgtggtttgcttgcccgccctaacctatagcaagtgcctggccctgcaccaagcacagagcaggcatcaggcaagattgtctccccagcccttatcaccggtgttttgtccactgtgtgctgttcacattctgggctttgttgccaggcagtcattgttctctgagagtttttatagaagatggaactgggagtctaggagcataagcaccttggccagggccacttccctttcatactgtgtcacagtggcttctatttctgcccccccatgaggcactttgggctccagggccctgctgaggcaccgtgcgaatggggttccagtctctcagttaccaggctgtgcatggctggagcagaggccgggagccacggctgccactgccagtccacatctctgtcctggccagagcccccatcagtgcgctgtggcagtgggggcgccatggctcccggtctgtggaattgctaccttgccagcctgtatgagagagagagagagagagaggaagagagaggagagagagagaatatgaatgaatgagaatgaagatgatgcggggacattgggactcagcatcgcagccttctgatttccatgcgggaggagctatctgattgtgttcctcctgtaccctgtgggtctggcagtctggcagtgccatttctgagatacagccccacattccaggacaccagtcgtgccagccaggggcatggggcagaggtcagggccagagcctccaagcatgttgaatgccaactgcctgatgggacccccatctgtccactgctgagaggggccacacagacccctgcgggccttgaggcacatctcccagaggtagctttgatcaagaagcagcctgttctgctgccgctggtgcatcatcatggcacctgatccttgttcagtatcttaggtgaaatgtcttcattttattttcttcagcatggccagtgcaagcctcgccatccctggggagggtgcgtcagaaggtcgctggaggtggggcctgcactttgcagatgtccctgatatctctcaggacagagcttgatcctgggcaccttgggccccgaatcactcagcccacgtgcagttatcagcgcctgctccgggttgggccctgttctcagccctcaggcatagcaacgggaaaggtgggcctgctgtcgagggctcttttctcagagagggatcctgacagcaaaccagcagcatctctcaggcacctttcaggtgatgaggccatgtggtgggaggccacaagagccggccctcaggcagggtgtccatggcagggggtcctgaattgagatctgtgctgcatgatggggccccaggttctagtaggaggattctggcttggagtgcctgggccaggacagagcaggcgaagggtgtggggagcagcaggtgggccggggcgacgggcacgaggtcagggccaggatgcggctgcccccgggcttgctggagaggctcagcacacctgcagtgctccaggtgagagacatagcatggtcaggaaaagctgttgtggggactgagcgagtgagggccctatctaaggcagcagcccctgccacctgcaatttcgcagcccagctggtggccagcagtcagcaagagtgcgatacaggtgcccaggtgtgctgaggacgtagggaagatggggtgtgttcatctttccaggggaggaggaggcttcctggggagacatgtgagcagggtctgggggctgagttgcagctgaacaggagggtggaagggtgcaaagagggtcctcccatagggcatagagcaggtgtccaggaaatgagtgagaggtgggttgcaccaaggaagagcattccaaggctctgagggcaggggggcgcagtgtgctctatgtgaggtgcagttgagtgtggctgcaccagagtatttggatgccagggcaggtccgaggctgccagactcaggtggggccatgtgggaggctctgtgtgccttgctcagacattgcattttatctggggcaggtgctggggaggagcctgtctgagcggggcaggtgctggggaggagcctgtctgagcagggcagggctccgccttttaccatgggtcctcatagcagcccaggcagctgggcactggggtggaagggcatcgctgaggccgtgctgcctggcatttggcccacccacattccatcagggcagagtagggggccgattgctgtgtctgtctcaggccctgcccttccctgcacccttctgctctgtgcctctgtccggtgccgtgctatcctgagagcctccctctggccccttttgctagagatttatgctggatgtaaacgattactggctggccactcacttcctccaccatctgggtgtcctcagccctgcctttccccaggagtcctttggacctgctgtcccagctcctttgaaaggctgcctcgggtctccacttgcccttgccaagcctgggtgagggtggacagcgtgctccaactaccgcacctgctgggtgctctgcctcgtgtgccaggcgacagcccttggggctctcctgaatgtcccaggtgccacagcatggattctgtgggtcaggtgcagtgaaactgatgatcgggttaacctaatgaagctgaagaagctggtctccgtacattgtactttctcatgagcccattaagatttgaggtcgtaagctttccatgcctgcccgcccacaggaagtaggcatagatcactgtcagctggggagggatttcaaaatgagactattcagcaggacgtggctcactgctgctactttgcagggaggagctggaagaggggtgtatctattccttcggaatgacagtgaagtcagtgtcctggggatttaagctgtatttaaagacatgtctggaaagtccttagcgactttaagcttgctttcttcatgtatcaatcacgttgctttttattggggctcgagaactctacaggagatggtttcttccccctgcaggcctggcgtgctccagcacctttgggcaggcgtgtgaaggccctgaggtctggtctgggcgcctccaggaaagaatgactctccaagtgggcgctcgggacccctgtcagcctccatggcccttcacatggagcggtctctcctctttgtggacaaaatgcagagttgtgcttggagcaagaaaagtgatttgtataatgttttgggcgctgactcgtacatttatgatagataagacctttgttctttctgaaaagttacgtggtgaggattgtgaaccgtggctgcgtggcacccggctgcacacgtggctctgtgttcactgtccctcggactctgcgggaaaacgtgatgcagagccatggtcacggctgtgctcctccgcggtttggaagtcccattaatgcgacttctctctgagaagtcaacctgggcctcctcactctgcagacgtccagctccctcccggaagcggtcatgcagaggtgtcaggcggcactgttgtaatcgatagtgggtgaccagtctgaataaatttccttgtacttgctccaaagtagacaagagtccttagccacctccagagtttgaattgaacggtaatgacatttcttaaggagagattaaagagttcttttttaatagtaaaaacatgcagcagaacgggcagtgttgttagcgggttagcgttttgatgactcttttctcccattgtgttcatttcttgctcaccagtcccttactgaggccctactgtgtgctaggccttgaaccagaacagtcaataaaaaagaaaccgcccaccctgtgggggacctgctgtgatctccaaccacagcaacctgtgagtggaccagttactgctgttcacccaggaagctgctgctgtacggattggtgtggggcttggttttggtcccagagtccatgcttcttctggtggctgcagccttgtctccacgtcctccccacacctggcactgcacccccacagcacccccagcatccgatttttggaggctagtgaagaaagcagcaggtcttagtggggatggccctgggtggaggtgagaagacctaggccaaggaggttcccggccgtgggccctggtgatggggagacaggtccagggtccctcatatggactcgctgatactccctggacctctgggtgatgtgaggtgtggtctacctgtgggtgtctgtgtgtgtgggtacaaaggccttgccccccaaggagggtgtccaagtccaagtaccttacaggatgccgggagggcccccgagtgggacggtggactgtttctgacaggtcacggctcggtagtggagtggtccctgcaccccactgtgcaggcttccctctgagatgtgctgctttgccctcgtgggggcatctgtaggtcctgtcgcttccctagaggagagccacgggcctgtgggtccctggcagtctaggaatgctttgggccccagagtccctgaacctcccttagcgactggttgggatttgtgctgggggagcgcccagggacaccctttgagtgagggtgtggtagaggccagctggggagggttgctcacacctggccctatgaaggtgtggccacgggagagaagccaggggcacagtgccactcacatttgagagctgggccctggcatgggcattggacttggtctttgtgggactgggatctgtgggtagaaagaatagggctgaacacgaaacatacctttctgccagagctgctgctgtgatggcacctgggccccctgaagcctcctccctgcacttgtccaggttttaactgaagaggagccagagagccgttgacatctgagttgatcatctccagggacccctctatcccagagccctggatccccccagatgccagaccaaggctgcgggaacagcagtatgccaggtgcagggcctgtgcaggcagcctgggagcttgttccccaggagtgtaagaaaggctggcgggtctgccccactccaggccacaaagagtgtactttctttggggcatttttggtaagctttcagatgatgtattcattaatattttatctgcagtgtgaccttaagcaacttgtctaactgctttaggcctgttgtgggacgaagccccagaggagggcttggtttcgtttgctgtgaggatttgtgtttctcctgatcttagcttgttcttagtgcgagggtgtggcggaggagggctcggggaccttccctgcctgcatgtagcaattctgtgatataccaaggccagccctaccctcttgctagaaatgcatggcctgggaagatttctgacaagattagaaagaaaggaatacacatagcctattaatgaaggctgcatattaaatacgaatcatacatttttaggaaaattattgaattgtatctttgtggccggtgattgaaatcatagtcctaaagagttgagtagatcacctgtgcagggcagcgtgctgggcgctgaaggagaggggcacagaggagaagttcttgccttcaaggcaccaagccttcagcacagctgtttgctggaaatagatggagacagccccgagcggagcagcaaaggagaggacccagagaggagtagtcctggggctgtcgggaagcaccggctgccccaaccctgggcaagtggctgaggcctactgccccaggttggccccaccagtgatggtgaccaagaggtcaggcctgcagtttgatgggactttgagaatgaacactcagttgacctcatccttgatggtggaagaagcttgccccatcctgtgtggaggattcagagctggggtctttcagagcctgtcgggtgccctggcaaggcctcgaggctgtgcattctccaggctcctgccgtctgcctctactccttgcctttgctcgagctgtgccctgttttctgctgcagactctgctcccatctctttgtggagctgcccacaggacttctccaaagtttagagttgacagcccggaagccaagggcagcccctcagtctttccccagaccatgtggctggatgtcatctttgcaagttggtgttccttaaatgaaaggaacaagaaaaaagccagaacagggtcccagtggaggctgaggtgccttccagtctgccccgggctgccccagctccactgctgttgctgcatttgcggttcctgggactcagctctctgggtgtagttgagagaggagccccaggctgggccctgctgctgagaggtgtgtgtggacccgtcttatgtgtggggtgtggttttggggtttcacagtgcggtaaggctcccctcagagcacccccttagcacttaccgggtcagcccaagcccagggtcacccatggttgctgtcaggtagggaaagggtggcatccagcctgaggtcgggaggtggaggacgcgtcaccttccaggacagggtggtcaggccccagcacatccagttactacgtcacttgccgagacggtgctcaggagtctctggtcagagttcctggttacagaggcctccttggcaggcagaggacaaggagtaaagggtgaagggcacagcagccttgctttccagatgttcacagtggctgccactgggccagaggagcatggggcagacagagccatgggaagcacttacagttccctgaggccaggcctctcccgccagctcctgtccctctctcctttcctctgccgtcccctgtgcaggcccctcctgcattgcttctcctagtgaacggagcttgctgtgttcctgtgcagggtgggatggggacaggctgacttactgttgcccagctctggggggaggtggggcacctgccgcgccgtaatcaggagcaatgtaggggtgaggggccctgcacgggaccctttggacatcgcagcccccatgctggggcacacctgactgcccgcatgcaccctggatttataggttcctcttttaaggtctggtgtaccctggtaatgaccttcatttttatgtgttctggaagaaatccaaaaaggaaacgttaacctgagaattgctttcaggagcttggcctcgtgtgtccccagcatggagagtattctccaggtttccagtccaattttctgtgacctttcgttaatggccgggaagaggaggccggcgctccgcctgggtccccagtgtggcactcacagctctgccgggtacacgttgtgctcttcctttccaggccctacatgaccaggcttgtgatattcggacggtttcctgggccaaccttcggctttgcgccactgttccagtattgacattttccgatattaacctcccagctcctgggcgaacctcttggtacttaatggttgagcatgcggaagtgtgggaaagaagaagcgggcgcgggcgctgggttcacgtccacatcagggtccccctgggcagcgggacctttgcacagatggcgctgctctgagtaaacctgcaggtgaatgcacttctcagcgggcctccttcacttcctgttttctaaagtgttaatttttaaagtttcatcatgagagtacatgcatattgctgaaactttacagagatgaaagaaggaaaacctcccctttgaatatatccaacccaacataaatggcccccagtggagcaggtgttagtgtctcttttccatccttttctacgagtttttttgtaaaacataacacaaatcaaatagtacataaatttctctttggctctgtcacactgcccagtcataatgctttctgtgttagtttggagtttttgtagctaatgtttgcttaatattctggcctgtggatagatcatagtctacttaaatgtggtgcgtgatttttcagtgtatttgtgactgagagatgatatatttgtgcttaaagctttttctgtatttagaagtagtcccgtaagagaggtgttcaggaaaggggctgcagggtgaacgggtccccctgtgtttggggaacttggtggccacagccaagtgaccctggggcccactgagttggtttgccctgcagccagcagttttgtgagagggggcatttccttttttcagagaagtctcgcccttgtcccccaggcttgagtgcaatggctcgatctcagcccactgcaacctctgcctcctgggttcaaacgattctcctgcctctgcctcccaagtagctaggattaaggcgcctgccaccacgcctggctaatttttgtattttttagtagagacggggtttcaccctgttggccaggctggtctcaaactcctgacctcaagtgatccgcccgcctcggccccccagggtgctgggattacagacatgagccaccgcgcctggccgagagggggcatttctttaccgtcaccatcactgggcattttcattaacctcgttcttcctcatctggttaagcagtagacagaaacaccctgattctatttttatttccatggctgctatttaattccaaaagtttcccgtgtttttagcagctggctgtgctctgttttttaggtaaccttttagttcacccatggtgtctttctgggacattttaagcttgagagcatccgttcagagtgttcactgcagccagcatttgcttgggaccgcgtgtgaggcctctccaggcgccgcttgggccctgactctaggagcttgccttctgcacaaagtacagggtggccacaggagacagctactaagagcagccagggatgggtggggcccggagtcagattgcaggccatggcgggggctcgggaagggtcttgtgagggcagaaccttggggtgggtgggatgagggtgaagtgcgcatcggtggaggtggggggatggtgaggacagcctgggaggagcctgtggtctgtctgccatgccctggacaggtggactgggttcccctctgaccctgggtggcagcttctgctcacagtgtctctggatgaggagggcggccacaccaatgcggtggagggagcagggggtggcgggggcagtcgcggggacctttgcagccgcctgggaatagcagcgctccctttgctaaggagaccctgtctgggcggcggctctggggcttccccagggggcttccgtgggttctgccctgtggcctggcaggtcatgtgggaggctgggtcattgcagggggacctctcctccctcggggctgtagattgtagcaaaggagctgagggagtgggagcagggaggagttcccacctcagcttcagcagaacattccagtaatgttgttgtctctaaatacgtaaaccctccaggttccagacatagagcaaatttccctagaattgtatttatcagagaaggtacctggttatagataattaactacaatttaaattttaaatatttgtaagatttttttatactctcaaatgcacacatttggaaaatactgtctttccgtccttaaagaacagtctagttccggaattacggtcctcagccgtgctctctggatcctcctggacttgcttcaatgcggaccctgggtgcggcaggggtggcttcgggagccgggagctagaacattctttgatctcaaaacgcccttccggtggaggccctggtgattctcctggagggctgggccagccatgcttttcaggtcccctcaaggggccgggcccctgccaggctgtggagctctgttggaggagaccctctgtggcaggagcagtgagccctggccgcttgcctggggtgggggcagccggcacctccctgcagccccaggactgctcctctccagctcccctccctcctcctttccttcctctcgcgctcctctgctcccgctgtgttctgtcatgagtggagaagactccttctctgctttgtattcagggattcagtttgtttcagcggtgctctcctggccacctgctgttccagaatcttaccctgaaaggcggtcactgtgcggaggtgaacagaagcagagtgcattgccactagcacatctcacagtgtttgctttctcggcctctggggaatctgtgagtgtggacagaaagcacagagcgggcgggatgcctcctcttcagcggtaaggcagggtggggcaggctctcactgggcctcctgcccccagcaaggtgtccgcaggtcctctgtcactctgaacatgggttcatttggagagcagcagacagcacagggaagccagttctggagttagagtgggatgtttttctgaacacgtatttagagcaatttgctttcattttgaatacttgagtccatcaggaaatattgaatcattccatagtccagaggccgggccagcgccctcctgatgagggtgcccatcggccatgcggcctgtgtggcctcctggtaccagccagggaggcccctgggaggggcaggcacagcgggcgagcctggggatgcctgggagggaccctcaaggtgaggaggtgggaggctgggaagaaagatgggcttgatccatttagaaggagacagcctgatggatgggccccctggggagcattgtgtacagagagaggaccctgagaccctcccacagtggggaggggactcgcctgaggtcacacagcacggtgtgcccaggccattgcctgccagtgttgcaccaagcttctccggggatggccctgtgcttgcggcagccacatcacagccctcctgctctgaggggcagcggctggaggctctgcctgtcctgagcaggactcctgtcggccacacacagcactgctcaggctctgctggggcagccaggatagcaggaggacggcctcccacagtacccccgggcatcttcctgtccttccaggccactgctccccaatcagtgacaccaagcccaccacacggtggtgcccgtctgtgttggcacatcactgccacatggctggccctctgtggtacccggtatccccgtgttgatggtcttggggtcttggtgtaaacctggatgccacgcagctgtgacatgctgggctgctggctgggcctcctcacacctgcacactggcctccctcttctttacctgtgtggtcattgtcatgtctctgtcatttgacttgggcaccttcactgtgtgtgagtgctgccccaagcatcgtgcccaccaccagcccagggcctcactgcttcctgcccaccaccagcccagggcctcactgcttcctgcccaccaccagcccagggcctcactgcttcctgcgtgtcccctccggcctggagggctcctctgccactttctgcctcctcctgttctgctctcttccttgcctgcctgcaggtggggtggacgtgtctttgtttctcacgtccgcagtggagaaggtgaggggttgccagggcccctcctgagaggcagagcctgggggctttgctatcccagtcccccttggtagggcaccccctcctctggaggccacagttacctgcaggaccagcaagcagggtggcctgtcccagggccgcctcgtcaggcgcactcagaggcctcaggagtgctgctccccagtgcccttgaaggagatggagggcgcttctctcccagtcggggcagcagtttgccaggcctgtgaggatcaggagagcagaaaggccaagccctcagagacgccagcgaggagggaggcctctgtgcacagcaggaggttgagaggttggtttgaggtaaacttgtgacatattgtcgggctcatctttggctgagaaacatcattagtaattttgctgagtcagctgacaacatcacattcactggcgttggctgagcccttctgcgctccaggcgctggtttggattcccgcgtgctgccttgtggactcagacatataccagcgcatttaatcttccaggaacaacaagaggaggttctgtgagcctcaccccaagccatcgttaagaaatggagttgaaccaaggacacgggaatgctccagaagtggtagctgttactgtggggctatcacttctctgttgtacagaggaggaaacaggctgagagaggccctgactcatcagtcatccggcttcgaagggacagactcagtgtgagagctgcagttccctccctgagcaatggccagcgctgctcagagtctctgggtagcagccagtgcccgagctctgggcatgcatccctgactcaagagccccccagcacccatggctgctaggagaggaggaaggacgtgcagggacccacaatgcagtgaaagagggatgctgtttcaggaaaaaagcaagatgttggtgagagcacgtggtggatcctgaagtctctcttggccaagttagaaacgagtggacttgccactgcttgtgttggaagagctggtggagacgatgagcagccatccttgggcttcattttcttctgcctcgaggcaccactcgaggtgaggggtcctggttttgcctggccgttcctccccatcgtctgtgtccactcccggcccacttcccactctgccctgcttcctgcctgcatgacttactctccacagagctggctccagcatctgcttgggcgcctttctgtggcctcgccatgtccatctgctggtgcggccaagagccttcccagcggcagctcattgctattccagccacgcggctcctcttccttctcaggcccttcgaatcctgggcactcatttcccccttgctgatgcattaagagaagaaagatgctttgctgctgattgaagtcaagtagcagggccggtggtgggcgcctgggaggtggccagtgagggctgttcctgggcaggtcgggctgatgattgtgtacacgtagaagttgtggggcaagggcgaggggctcatccagttccctcaagtctccctacttcccgttgttaacttgtaaacagcagaaatgtcgtggtgtgtagggcacagaccgtggggtgtgggtgcagttggcactctcacccttaaagcacgggctgggactcacagcccaggtccagcatggccctgggtcagagtcctgaccacccctgcgcagctgggtggcagtgggcggggacctggcctcttagccgcttctttcttgcctccgaggtggaggaggtgagggggtctcgagggcactggcaggagcaggttgtgacactgcatgggtacttgctccctcctgggatgttggggtctaccccaaagcccacacctgccaggctggcccttgtgccctgcttggggctctgcccctactgctcccacaagtctttctcttttgttgccattctctttatccctgtgtgagatataggagaacgatggagtcaggtgagtgttttgctgccaagcccagagctgatgctcgggttggagcaggtgggtggttaattgcaccagcgcgtctctggcaaactgatgccggagtggtcagctggacaggggaagagatggatggatgggtggatggctggaagaaaactagccccagtagtttactgtgttaatacacacccaaatcagagatcatattgagaattttgattaggggtatgtacatttgtgatatacagcaaagatcgataaggcaagaatttggagcccgaccctatgctgttagctggggtcatggaggggtaaggtgcagcccctgccctcagggaatctcagcactaggtaggtgtggggaggcagagaggtgcagccaggcagagcagccagcatggagagggagggagtgggcaggcgcacctaggaggctggggaggagctgttctggccccttggggccaggaggaaaaggccatttaaaagcctctgtctgctgctgggagctgggatgagtagggcatagatgtgatccctgcctacattcagccataattgggtctgagttcctgggcagtgagatacgccacggagggttgatgagatacgccactgagggtcggtgagatacgccactgagggttggtgagatacgccattgagggtccttgccatttggctccatgggaaggaaggtgccgtccagggagcaggactccccatcattgggactgttggactgagcagggctcccgtcatcaggcttcattacttgcttgagttaggtgtcccgtgcacacatcagcgactgcccttgtcttgggtctgtttgagcagtctgggtcgggtaacggtggcccaaaaaagtctctcaggaagagtgtgtgtgggtggtgggccgggccgggctgggtaacgctccacactgctgctccccagccgtggtgtagactgctcgccttcctccgcatgacctgggtgcccttggggctctgtatgtaaagttctgcttgctgtttaaaggaatctcctccggccgggtgcttgttagtgattgacagcgtttgagtttgagttggttttgaaggcacagggctgcctgtgagctgacggttgatttgacttcaccatggagccctgagcgatatccttcagaatgagcctgcgcattttcagcagatgaggccaccccccttcctgatgcagaagccagagagaagctgccgtttgtcttgtgccccgtgccatccgtcaccaactcctccctcagatctctgtctcagatccctctccaccccgtctgtgcacagccaccatcctgtctccttgttggtcttctcaccgctgcctgagccgtgcagctggctgggtcttaaggacacagatgtggccacactcatgtcaaccccagggattcagaggacccaggccttctgtcctagaacatggtcctatgacaggggaccttagcagaccagcaggaactgtctgagcagcatctggggtggatacagctcgctccacctcaggtttcctagggtggtggtcttcagagtggggtcacggcattttacccggggaagctgcagggacagacacagaatggaaggggcctggagcagaggagatgcaggggtgtctgacatgggaggtgctggcgggctgcagtcacagggaggggtccagcagccgcctcctacactgcctttccctgccttgctgcctaggcccagccactcaggagagaacccgtgaggtcagcccacctggcaggtgcctgaccctgccttagccccgggtctgtggcattctggcctgggagtcaggctgaatgcagtgttgttggattccgaggctgttttgatgtcaagtttggtcattttaggaagtcggtaggtgggtttcagccagaatcgccccttcctcagtcaggttgaggctgccgcaaatgagcgctgggcagctggctggggttctctccttgttcccctcccagtcagtcccaagctcctccttccacgggagcagaagttcttgcctcccaccccatggtcccttaggccaccgtcccgccttcccctgcactttgcagcaggattttacaagtttccttccaggtgcagggaaccagggtggctcgaacccagatggacagtgctacactttctttccgggagccgtgggcacatccctcacttcactaagccaagtggaaatgtgtattagtttgttctgacactgctaataaagacatacctgagactgggtaattgatacagaaaaagaggtttaatgaagtcacagttccacatggctggggaggcctcacaatcatcatggaagacgaaggaggagcaaaagcgcgtcttacatagcggcaggcaagagggcgtgtgcagggagccgccctttataaaaccgtcagatctcatgagacttactcactatcgcgagaatagcacaggaaaaccattcccgtgattcagtgacctcccactgggtccctcccataacacgtggggattatgggagctacaattcaagatgaaatttgggttgggacacagtcagaccacatcaaaatggttacccctgccccatgggggtttataaggtgaaatgcaactacacttgtaaagggacctgctgggcagttgatgggtgaagatcctgggcttgtggtcaggcaggccccacgaggatctcagctgcgtcattgctactgtgtggcaccagcgcagggcctcgaccccccttgggctgccctaggtgcagcaaggattgcaggccaagggactggcacagcaaggactgcccagcagatctgagctccggtggccactgttgtctcagcaagcaacaggctagcttcacgccacaccctgcgtgcggactcctgtgtctggcccagacagctggagctccctgcccttagtgggtctttgtgtctcaaaggtggttctgaggggctggcctcctccccatgccgtgcaggcctggagctgcttgttactgacttgactttcttctcggactcctatgatcctgtccctctccctgccccccagcttatgattccacccgcccgacagaagccatcacagggccagtgctctgcagccaggccagccctgcgagaacgagttcagccctcagccccaccgtccttcctcttcccggctccttgtggtggttatgaccacccagtctagtccagcattagagccctccttcccctcaccttagctcttgcctcccctcccttgtctactcttctctgatccctctgccctctcttctgcttgctccaggccactgtcccctggttccgagttacacattatcatgtacctgtgattccctgttagcaaggaggcagggctcagagagatgtccaggtggacaggctgggtccctggagagccacagtggctctgccccaccaggctcgctgaggcccaggccttggtggggttggtccgtaggtcccagcgctcagaacagcttctgacccagccgtgttgctctgtgactgttggttgaataaggtggcataagtgaaatggaatgactaaggagcatgaatggggcccgctggacccaggtgaaggagacagatcttgagcagtggtggggccctggggaacctctccccatacccctccctcagttgagggtgaagaaggaccagtcatcatcacacaagaactgcggagtgtccaggtcctgcgctggacactctacacgtcccctgtcatcctgggcactccacacacccctgtcatcctgagagctgctgcgttcagtaagcgttgtgatggccaccttacagatgagaacatcaaggctcggccagggtaggtgctcttgtccaaagccatccagctggtaagtagcaaagcgctgggggacaggccatgccgtgtgggcgcctccactgtctggcacctggattttctgccagggtcctactgggcatcttgaacacactggtgtgggtgcgcacgcgtctggtgtgggagccctttcttgacgctgtaagagagcagtgagaactagaaggtgcagacaggagggcgttgcactggcagcgtccccccggcctctcacaccagcgcccactctcacttcacttttcagaagccatagctttgcgccttctttccacgggagtcatttgagctgcatgtaaaagttttaaagttttctcctgagcactaaattgggagcgtgtatgtgtgtttccacccccaatgtgagcaagtctgtgtctgtcacccaaagatacttgtttaattgaaggattccttaaattattttaaggaatgaagaattaccgatctcctgaaaggcagttttttaagctcccacctccaagtgtgtaagcctcaaaggtccctctctctgtcatgagctaattggaatgaaatgcaggtgccgtttctgcctgagctccagcagcatccctgcgctttcaggtctgagccagcacatgtttctggcatttagactttacggtaacagcagggatcttatgattattactaaagatggttttggaagaggaccatctgtgactataaaagtgcacagtttcagttatgcaaacgagtgctgtggtgtttgtgtgtttcacagaagatgagctccaggccaagcttctctgttccagggtacaggaggctgcaggagcgtcgcacagccgcccgatctgcagggaactgcccatgacatggccgtcctcctgtcagaagaggactctgggggctcgagatcctggagaaaaggcctcatttggacaggactgtggcagtttatgtcctgattgttggtgcatgttttatgcacgtgttggctccgtttatcattaaaaccaggatgccagaagccagtgctctgcgtacttccagcaggcagatcaggcctcccttcagcctctgcggcccctgctaagggtttctgactttttttttttttttttttttgagatggagtcttgctctgttgcccaggctggagtgcaatggcatgatctcggctcactgcaacctctgcctcctgggttcaagcgattcttctgcctcagcctcccaagtagttgggattacaggcgcccaccaccatgcccagctaattcgttgttttttgttgttgttgttgttttggttttttctgagatggagtctcgctctgtagcccaggctagagtgcagtggcacaatctcggctcactgcaacctccgcttcccgggttcaaacgattctcctacctcagcctcccgagtagctgggattacagatgcctgccaccacgcccacctaattttttgtgtttttaatagagacggggttttgctgtgttggtcaggctggtcttgaactcctgacctcaggtgatccgactgcctctgactttctttttgggagaagttggtgatggttcagcagacaaataattgccaaattacataggaggaaaatgctgccagaaagggcacacaatttagcggagtcagtccagcagcaggtgcctttggaggctcccctggtgtcccatgtgtctgaggttgcttcccttccattagcgccatgccgctcgactcccatcatcggggcggttgcagaagacaggtggtcatttatattttattgtcaggggccttgtctttgcctactgaagatatatttgcagcccctggaatgacacttgggatcattcaaggtaaccaccggaaccgctcgcatgcgacctcctggaaaggttgagccacgctgtcttcctcggtgccctcaccacggtcctggaaaggttgagccacgctgtcttcctcggtgccctcaccaccgtcctggaaaggttgagccacgctgtcttcctcggtgccctcaccacggtcctggaaaggttgagccacgctgtcttcctcggtgccctcaccacggtcctggaaacgttaagccacgctgtcttcctcggtgccctcaccaccgttctctgtaaaggtgctcagatgctttccttggggcagatacggggcctggcttgctctcccagagatgcccaggtgtgcagggcctcttcctcctcccctcactctctcctctgccttggtcgtggtccctgcttggttccctggttctggtagtccctcgagaggggatgtcctttcctgctcgtcctcagccaccagcacttggcagagcccttgctacacgagcagctctcacagaagcttcgagcgcagatccaagggtggcttccgatccctcaccgcagcttccccacacagtcctaaacatatttgcagcgttttgttttgtctcttctgtagccttagacaagctgggctccagcatatgccccttttcacctgactccttccactctccatagtcatctagagatttagccaggattttgcattgtcggtggtttgtgtctttgtgtagtggagtggtttgtcatcgtaaaggattctttccttaaaagtgttcatctatttcctcccagtcttgaggttagaaagtgtgacaagggtgtggtggctcatgcctgtaatcccggcactttgggaggctgaggccagcggatcacttgaggtccagagttcgagaccagcctggccaacatggcaaaaccccgtttctactaaaaatacaaacgttagccaggcgtggtggtgcatgccagtgatcccagctactccggaggctgaggcaggaggattgcttgaacctgggaggcagaggttgcagtgagcccagatcgctctgctgcactccagcctgggcgacagagcaagactccatctcaaaaaaaaaaaaaaaaaaaaagacaatgtgacaatgtcagtcctccgccccctttgttgctgtcagtcagaacgcggattgttttcccagggttccggcagtgtggaccctggaccagcagcctcagcatcacctggaaacttgctagaaaagcacattctcaggccctacccaggcctcctgaatcggaagctctgggtgtcccggcagtctgtgtgctcctgggaatttggacacctgcttgtgtctgaggtctgaggtccattctctgtggggtgagggaggatgagggctgggcctgctggctttacagtcagctcggaagcagcacgtggctgtctggacaaagcctttggtgttgcttcctttgtcctgaaccaatgtccgtgtgttcctttctgttttattccagaatacggtgcatggtggttcctctagcgtgagtgccgtagtgatttctacagtgcatggtgcttcctctagcgtgagtgccgtagtgacttctattcctgtcacgacataaaatgcagccataggtgcagcttcgtgtggaaaagactaggaacacgaggcaaatccctggtcgaccttaggaagtgggtgaggggagaagcctgggggcccacagaactctgcacaaactgcgtatctgtgagccaaaccattgttattttaagtcattaagtttggggtgacttgtttaatccagatgaacctgcaggctgcccaggttatctatgagtggtgggtggtggcaaagagcagccattccaagcagaggaagaagactggctcataggaccgcactccacagccccccaggccaccatgtgcaacgagttagttggtactgcatctgggaaaaagcctgaaggtgagaaacagcagcgagcgcaggaacatggaaacagggagaaggtgccactgtggtgaccccagaggaaggaggccatctgaaggcaggcacggtggagaaacaggatgggcagttctgggtgcaggagcagcaggactcggtggaggatggacagaaggaggagtctaggccaagggcctcacccctggctgaagaatcgctggggctcaggagccacagatgctcggatcccgcctccagggttcccaatctcatgggacactggtagtcaaaccaccccggatggctctgatgcgcagccaaggctgtgcgtgactctggggccagggctagtggctgtcactaagggccacccagcaggagcggtctgagggtaggtgaagaggttcccttaggatttggggagatggaagttaggcccggcctcgtcctggagccccgtgggtggaagggaggcctcgtctgggtgatggagaggacagcctgcagagagaccggcgggggtgtgcaccagggcatactgagcctggccattgtggtacaaggcctgggtactaccagcctcgtgcctgctgggggtccgggaatgtttggggagcactgtgttgagggtgagcctgggtgcccctccagtcacacctgaggaggtgaagaatgtcaggactgggctgtcactcgcgtggagtatccatgtcctagagctgccatgtgtcacacactgagggcttataggcctgagagttctggaattggggtgtgggcagggctggttcgctctggaagcttcgagggagaatctgccccatgcttccccttcccgcctccatgtgttaccagtcatcctcggcattcctgactcatggcagcctcactccagtctttgcctctgtcgctacgtagccttctcccattgtgtggctgtgtccacgttttcctcttctgtgaggacacccatcgttggatcagggcccccctactccagtgtggcctcctctgaactgcatcttcaggtgccctgttttcctcttctgtgaggacacccgtcattggatcagggccccccctactccagtgtggcctcctctgaactgcatctccagatgccgttttccagggaggccacgttcacaggaaccaccaggaccggggcttgagggacacggatccactcgctgtggacaggccctcgtggagcagggctgatgcgttgccgttgccggggagccgctgccggcacccgtgctctctctgtggtgaactggccctcctctcccgctcagcagtttaacaggccagtgcaagctgctcagttcccgggcagcggtgccgggcggtcatgccgctctaagccaggcaggtttgtccacaggaggccacttgtggttcagcaaacacagaattagaaaaccagaatccctgttgcacgtctctgcagatggagctgttcagctcagtatggttaatgtcagggaggattaactggttcagtctgatccatttacctgatggtattttattttaagtacagaggtggtagtacattttcagaaaacattattccttttcttactgctgcgaatgcactgtcattaaacgtggctttaaggccaagctgggcctggccctgcccagccgtgctcagcactgccccctcgtcctcctcagggcctggcagggctctgtggtgactgtcgccatcaccgtaacgcaggaccagatgatttggaaggaatcctaggggcatctgggtattcataaacgctgagattgtccctctaagtgtctcctgtctaccatcttactcaggatcgctggcccattacggtgtcaggaatgtgctgcttttaattaaatttcacgaagaataaatgttaactctccaagtgtctttagtttcttctctgtagttgacagtccttttgagaaatggattgtacactttaatcattgtcattataaagaggcagtttctaagggatgtatcaaggtttttaaaaatttgtttattatttattttattttatttatttattttttgagacggagtctcactctgtcacccaggctggagtgcagtggcacgatctcggcccactgtaacctccgcctcccgggttcaagcgattctcaaccttccgagcgattctcagcctcccaagtagctgggattacaggtgcgtgccaacacgcccggctaatttttttgtatttttattagagacagggtttcaccgtgttagccaggatggtctcaatcttctgacctcatgatccgcccacgttggcctcccaaagtgctgggatgcaagcgtgagccaccatgcccggcctaaggcttttttaagcaagaggaatctcaattataaattaaggttattttttagttctttttggttcctcactaacattagtgaaaagcgaagttccgagagttcagtctcacaggtgggctctgtgcaggtggtagcctttctccacggggcagggctcacgaccctcctgccagcctcccctgtggctggacactcctggacctgcttctgttggggggcaggcctggctccctgcccctcccctgcctgcccttgggggagagttaagaaacaagtattagtgaagatttcattgtgtttttgctgtgggtctccacgaggacttagcaggcctcggagttgggactgggttggattgcggcacgaggacttagcaggcctcggagttgggactgggttggattgcggcacgaggacttagcaggcctcggagttgggactgggttggattgcgggagacctgcgtgagtcacatcctcagtttccccatctgacttgaggaagctgcaaagttctaaggtctagaagcagctggtttttagtgttgtgttttgtttcaagtgagtgacttcaggtgaggagatgcgggttccttggccacgtcgtgaatcctgctctgagttcctcagttccccctgtgtccagctgtgcgtggggtgggaaggaaggaggatcgggagaaatgcagtgtccccctgggaatacactgagtgagtggaccttgggcacactggacccatgcctagcagacaactggacatgtagatccaggaaaagagccctcctctgagtcacgccaccctgtgcgtcatgggagataaagacttgtattaaacaagctggtggaaagaaacacatttatcgaggatcgttagggaaggtgattgatgtcatcaaaacactttgcattgcaacatgccaacagcattttgggaactaagctgctggggactagataaaccaaggcatatgggtacagctcacaggcgtttcttaaaaagctggttttgttgaaaaggaaatgcatcttaaaattcacacaaacaatggcaaagccacctggtgctcacgcaggaggatgtggtgctgcctgaatcctgaagtgggtggcacccacgaggggggttcctcggaatgctggtggcgtgtgccgggacgtacgtgcgggactagagggcacatgaggggatgctcgagtcaggggaggtcgggagggagggagggccaagctttggctgcccaagggtgcacagtatatcatggctcagccccgcgaagagacgctcctcttgagggcacctgtccctctgtttgcatcccttggtgagggaccaagcgtgtgcggagggaggctgggaagcacagcctggctgtgtgtccactataaggtattcccgtggaaggcaaagcacagcgttaacagagtgctggccagctctgtcccacagttccctgtaccttggcacgcagcagctcgggaggcagcacttgcccaggcagccagcctctttgaaactcatctaccttgggcatcggggaaaccctaggtcccccatgaactttgctcgaccccctggcatacctgtacctctgctctcctcccttggcccattccacatctgtattttaatgcagctctaacactggtgtctggataggtcactgcaaatcctgtctcgaatgggccgtgcctattaaaagggtttgactccccacagactctgttgcctgtacctggcttggtttgcccgataccagtccttttaaaaaaactcattttggccaggcgcggtggctcacgcctgtaatcccagcactttgggaggctgagacgggcggatcatttgaggtcaggagtttgagaccaccctggccaacatggtaaaaccctatctctactaaaaatacaaaaattagcagagtgtggtggcacgtgcctataaacccagctactcaggaggctgaggcacgagaatcacttgaacccgggaggtggaggttgcagtgagccgagatggtgccactgcactccagcctgggcaacagagtgagactctgtctcaagaaaagcccccattttaaccactctgtctcttcttccaggcctttagaggcagaagagaaccattgtaaattccagcacaagctctttcaggcattgtttatagtttaataaatcctgccacctctattcatcccggtaatgaaggggcgactgctcaggagaaaagccagggtgcacaaagagatgggcattagcatataaaaggacagaggtgggccttccaccctttgcaacgatgctccttgtacatccacagagaattcccttctgatcagtgcacagtgagtaaaggcgccggctccaaagatgcctgctcagagtggctgggcgtgtctgccccaggctgtcctgttgtttcgggttcatcatggtgggaggtggtgtcagggatcagaacaggcagagatgcctggggatggatgccacagcctcaggaagggaccatcgtcatgtatttaataacttgaaacagattaagaccacgagtgtgcgtgcacacacacacacttgcgcttgcatacgtgcactcacagaactgtgctttgctcagcactttcccagctgaatggccctcttcaggtgcctgaaggcctctggaacacacacttgtctgtctgtcgaccacctgttcatgcacgatgctttgagtgcctctgaacattcggactccatgtgttctagttctgcatgctggacataacagactgacaagcaccatcccctgctctggaggagccttccattgagaggggtcagggagtagacatacctccaccagagtccgcgaaagcgctcggcagggagagctggggagaggggctcccctgtctggccacgggcagtgtctagtcacctggcttgttttcttctttggcaaaccagcagcagagaccttgtgggcagaagtctccactctggccggacccttgactggggtagccacccatccatggcaccactgtcgaggggagaggagccgttgcccccagggctcttccctccctctctgccggcatcattgggtagaaagcaggcatccttgacactgctagccatcaggagagccagtgttaccaaaggccatcaggagagccggtgtcaccaaaggaagtcatgtttctttctctgaagtccgtgtgtcagtcccacaggatgtgagacgtcagaagatgaagatagctcttctggtggggactttgatgttacgacttgcagcaccacagagcacctgcttttcatataagttctttctgtggacctgaaataatccaaaatcatctcatcaagtggaatatgccatatgatatttaaatacctgtaatttctctaaaaccctggggccagaaactctagtggttgctctattcatggattcatgttgcagtaaaatgtgataattgatgaatatctgtggaaatggatatgattgtgtccttttaaatgagctaacaatttcacgccgaaatctcagcagtgctattgtttagaataaaaggagacatgcaaatgaggccagggtgcagattgtggtagaacaatgctggcagcctctttattggacccattaattaattccccatcagccagtttccctgggaatgaactggaaaaataattaaaatgatacatgaggtaaggagtttagaaattcaaaaggtgaaggcgagaattagtttaatacgtaattagacatattatttgtgactctacgtttttttaaatgtggctcactgaggcagtagggtcctatttttagtcctggatagttaataaatatcacttggggctgtttttcaacccacaatggctcataaattttcttaataacattaagtggctaattatattgtacattgttaaaataacttctattgcaaaatctaataataccacaaaagtttgcaaaagcaagtttttagaggaattcatttgactcaatttccaagtgagatctggcacacgtagaccaaactgaaaaatgtatagcaaagaatctgcaggttcacatatatttttgttgcaaacatgatccaaacaatctcaaaacccaacttcgttttagtgtgagtggtgcagatggaacgtcgtacctcccagagttcagactgagtgctggctccatggctcttgggagtggcggaatcttaacggaacgtgcttccactgctgtgtcctctcggtgaggcctcggccctagcctcagtgttgcatatgtcaggatggacgaacgtgagtcttggcatggtgcaagtgcatctgaattgcatgtctctgtccttgctggagcaaaaccctgttgtttggatggagcggagctgacctgacggttccaggctgttccctgttgtttggttggacgctgttccctgtttggatggagtggagctgacttgacggttcccggctgttccctgttgtttggttggagcggggctgacctgacggtcctggctgttcccggttgtttggttggagcggagctgacctgacggtcctggctgttccctattgtttggttggagcagagctgacttgacggttcccggctgttccctgttgtttggttggagcggggctgacctgacggttccaggctgttccctgttgtttggttggagcggagctgacttgacggttccagcgctgtcccctgttgtttggttggagcagagctgacctgacggtcccagcgctgtcccctgtttggttggagcggagctgacctgacggtcccagcgctgtcccctgttgtttggttggagcggagctgacctgatggttccaggctgttccctgttgtttggttggacgctgtcccctgttgtttggttggagcggagctgacttgatggttcgagactgttccctgttgtttggttggagcagggctgacctgacggtcctggctgttccctgttgtttggttggacgctgtcccctgttgtttggttggagcggagctgacctgacggttccaggctgttccctgttgtttggttggacgctgtcccctgttgtttggttggagcggagctgacttgatggttccaggctgttccctgttgtttggttggagcggggctgacctgacggtcctggctgttccctgttgtttggttggagcggagctgacctgacggttccaggttgttccctgttgtttggttggacgctgtcccctgttgtttggttggagcggagctgacctgacggttccaggctgttccctgttgtttggttggagcggagctgacctgactgttccaggctgttccctgttgtttggttggagctgtcccctgttgtttggttggagcggagctgacctgacggttccaggctgtcccctgttgtttggctggagcggggctgacctgacggttccaggctgttccctgttgtttggctggagcggggctgacctgacggttccaggctgttccctgttgtttggctggagcggggctgacctgacggttccaggctgttccctgttgtttggctggagcggggctgacctgacggttccaggctgttccctgttgtttggctggagcggggctgacctgacggttccaggctgttccctgttgtttggctggagcggggctgacctgacggttccaggctgttccctgttgtttggttggagcggagctgacctgacggtcccggcgctgttcgtgtaagttgtttctgtttccctgttattttgaatatacttaaatggcccaataattccatttctgtgaacctaagagtataaacatttcataagattattgaacttaaagtgataggcctggctggaaatattttaccccatacctgtgcttatttctttttaatgagcaactgaaaagtaattttagtaaccaacctcccatacctttggagaacaaataaaaccacagtaatttccacgtattaagagcccacatgcgcctatcactgtcatccacagtctgcacctgttagcttgtttaagcctcccaggagcttgcacagagtatggccagatacccgccttacagcctgtgctgctgtggccaaggaaaagaggttttgtgcctggggcagtcagaccttccagtgggagtgactcttggctgctccctgcccgtcctcagttgctttttggtggaagtgcaggcccctctctccccactctgccctcccagccacctgagccactgagcttctgcagcagcacaagccctttcagtcttcctgagtcggccccactctggggtgggctcccgcttttaggctctttgctttcacaatcaaagttacaacgggaagcccttcactcggggccggcgggaaaggatccagccctgctacttccattctttccttttaaacaagactctgtccattaatcatcctctggtttgatctgtcaatccagaaacccttgctaatgctttatggctgtggtttgttgcggttctgggaaagaggaaaagaaatgagccagtcctaataaatgaaagttatttcctcatttgaatttctgagtcctgagagtcaatatgatgcagacatcaatcttgttattctcggagtggagagacagtttctgattgtgcctctccctgggttgtgatgataaaacgtgtggtgtgtttggctgggctcagtcatggcctctcctgagaccccctgcctttttatattgcagataacacacatggcttaatgctggaaacaggcctgtgttcccttggtctttacgagtgttattctagaaaacttcatgtttctaaggtggtttcatttgtcatgaatactcagatgcggttttctctagcagccctccgagtgtgctcggaaaggtgaggcccccgaggcagaggcatggccaggacgctggtgggcttctttgggaattaggaggaaaaagaggagtggggcagagcctggagaggctgccctcctggggtgcaggccggtggaggatgtggagctgcccagctggcaggtggcagaattgggactgaagctcagtccccactcgtccaggccacagcttctcctttggggccactctgcctcattcaccatctctccagcaccaagcaattgtgtgattcttacaatgtgcctgtcgtgcttctggtcgcagcctccttggctttgcagcagtgcagtgcctgggcctgcatttggcagaagtggagttcccagtcccatccgtggagtggccttcccctgagagcttgcctggtatgtttcagatgcaggggcttctgtctctccatgccttatgcacttggccacacccctgttagcacccctgccatttcccagggccactgttgcaggcacccaggaaggtgcctgacctggctctacatcccacaccctgtgcagggggcctagcatgctggcagcctgctaagagctggataggtatgtggtgagcacatggcaccccgatccgatttacttggtgtcctgtcgggcacacttgtgaatacccgccaggcctgtgtgtgggtggagacagaacctgccctctggccatcgaggctgtgcctcttggccatacatgtcatggtcttgttcatcagacctgccctgcctgtctgctgggagggcccgcatggagcctcttgcccagctgcagacaagggagggtgaccggccccacactcctatatgaaggatggatagctctgggcagctttttggttctggggtcagatttgaatgtaaaactgaaaagtcctaaatttattaaaggctttcttttggggctggaatatgcaatagattttctatccctctcaattccctcttaaaatttaatactgccataaaaatgatggataacaaattattccaggaaaaatggtactgaaagactcttctaactgttgaagcagaagtacagacttggcgaagaaatagacatgacccagaaaactcacgaggaaagaggaaatcgtgtactttgtggaaaccatatccacgtaatgttgttccaggctgtagaaagcaactattgttattccagatactgaagcacagagtctattttgtgccgctggcggtttcattaacatagtaacactctgcctttctagaattgggtgagcagccttccctgtttggaacactgcagagggagactgaaccccacaattgatatcagaaggccccgtgtggatgcctcttcagggtgccttccacagagctctgccagcatgctgaggctgcggggaaaaaccatgaagcctcataaatatatacaatgattgtgtgtacccataatcattagaaataaaaatttaaaaaaacacataaaaccacaagggctctgattgctgggtctaggacttccccactccgacagtgatggtagcagaaacaaggcctgacagccagaccccagggcaggcagcagggaggaaaacagatttaaaaatcgcaccagacactcattttctacagaagtctgcgtgtcgttaatacatgggcaaacagccctttgttccttagtaggccttaaagacaccaccccatgggagctttctaaaaaagatagtattaaaagactatgattcaggctgggcacattagcacacacctgtaatctcagcactttggaaggtcgaggagggcagatcacttgagtctaggagtttgagaccagcctgggcaacatagcaagacctgatctctctacaaaaattagctgagtatggtggcatacacctctggtctcagctactcgggaggatcagtcgggccccggaggttgaggctgcagtgagctatgatcgcaccactgtactctagcctgggtgacagtgagacccagtctcaaaagcaaaacaaaacaccccacaaagtatataattcagacttaacatcctgactcttgtttttactccaaggcaatgaagcaatgatgtggacgatgcgtgtcctaatccggagcgcctcccaggctaggaatccaagccaggttatggcttaaatggagaccgatggagctgctagctgagatcgcccacattggcctctgcagactcccttgttttccctaatgtgtgtcaacacatctattaaggggaaaggactgctcggtatcaatgatttccacttggaaatgtcaccatgacaactgaggaggtgctggaagcaggcactttgttaattctgtcttaacccatcccaggcaacttcaaaactttttctctggagagaaataggcttatttaggaaaggcgtctctcattgatcctcagctacatccactgaagtgaataatttacttctttggcaggtttagaaaattagatgcatacaatctaatatcccttctttgtacattttcatgtgaaatcttttggagtgctttttgatagccaccccctcggggacctggaagtggcactgtctgaattctgttctgtcggttctgtgagggacagatgctccatgtcatcctgagagccatcctaccgccttcctgcccagtcctcttcactggcacctccattggccaacagatcaagtctgcacaccgcagcctggctgcgagggtccttttcatccagcctcattcatcagtgttcttgtgagcatctactctgggttaggcccagacctcctgggttaatcagattgaacaaaggggtgtaatagagaaccaaagggccaggtgcggtggctcacgcctgtaatcccaccactttgggaggccaaggcaggcagatcacgaggtcaggagattgagaccatcctggctagcacagtgaaaccctgtctctactaaaaatacaaaaaattagccacgcatgttggcgggcgcctgtagtcccagctgctcggtaggctgaggcaggagaatggcgtgaaccagggaggcggagcttgcagtgagacgagatcacaccactgcagtccagcctgggcgacagagcgagattccgtctcaaaaaaaaaaaaaaaaaaaaaaccaaagtactaaactgggagtttgtggggacatagatccctgctttgcttcttgtgtgtgttgggggaggctttgtagggtgctgagctttcaatatcatatatcacatgatcctgagaactcccagagatgctgatagagcatcaaaaacagactttcagccaggtgagggggcccatgcctgtaatcccagcatcttgggaggctgaagtggtaggattgcttgaggccaggagttcaagaccgtcctgggcatatagcaaaatcccatccctcagtgttaaagggtgaccactataaatgagtagaaatataatatacaacttctaaattagtagagggaaaaagagagaggaagaaaaccttgatcaatacaatagaaggcataaaaggagaagaaatatttttaaaaagcagtaaaagtaaaaatcatgaataagatattttaaataaatattgagatagttatttaaataaatgtaaatggcctaaatttgccagttaaaagacagtgatttttgaaaactaaaatccaactatgtggtattcatgattgacacacacacacacacacatatggacacagaaagttttgaattttataaatggaaagaaatacaataggaaaatcatgactaaagaaagttgcaatagctacactgatatcagacaaaattgattttaagccaaaatgtattagtgttaggagatctctacaggatgataaaataaataagtcactagggatatatggcagttctgaacgtatatgcacctaagaagcttggccttacggtatattaggtaaatgttgccagaattacaaggacagattgacaaatctgtaatcattgtggtagattttatcttacctttctcattagttgataagccaacaaacaaaaagtgagaaggcatagaagattacaacagtacaaaaacaagcttaattgaacggttgtatatagaagtctgcaccggaaaacagagaataacgtgaagcatttgtaaaaattgagcacatggaaggccatagcaattctcaacaaattccagcaaattgggactgatgtatatatatgtatatgtgtgtgtgtgtgtatatatatatatgtgtgtgtatatatatatatatatatatacacacacacacacacacacacacacatatatatatatatatgttttcccatggtgcatttaaaatagaaaccagtaatacaaagagaacaacaataccaaatcccctgcatttggacattttaaaatgcactttttaaataattgaacagtgttttggtaggtgattaggtatttattaaataaatctggcagattggagttctgcaggccagggaaactatgtgaggactggtttatctcctgcatttccttccacttgttctccctcccatttttcttgtttgttctcctccctgacctccattattggtctccgcatttgtgatagttcgtttgctttgactgcatgtaacaggtgggggaaaacaaacaacaacagcaacagcaacagcaacaaaaaacagttaaaaaagaatatcatctccctgtgacaagagtgtagaggtagacatctgtgggactgtgagatcattggtggcacacatcttgatgctctgatcctcttaatgtgctacctcatagtccataagggcagcttgagttccagccgtcatgtcagtatcccagctagcaggaaagaggaagtggtaaagaagggcatcatgccttcttcactgaaggatgcatcctgagtattgcctgtacttctgcctgcgtattattggcaaaatgtaatcacatggctgttcttagctgaaaaggagactgggcacatgaccacttgttcctggtgccaatggctcagctaaaaattgtggattctcttattgaagaagaaggggagaaagagtatttggtcggaagctggcagacttggccacatcattccactggccattccccaactctctgtgtgcattcactactcttgtacatactatctcctctgcctagacatcttttcctctttccctggtgagtgtggactctttctgatgactcagtcttcaccagtatgtgagttctggcttgggatgtgacttacttgtggctaagggcagtttgtccctttaacctgtgatcccaggttgctgtggctccagagttgtctgcagtacttatctttccccaaggcctggtagcaagccctcccgccctattggaagtggtttcttattgcttcggttctgctggggggtctgaaaggtctgtgttcaagttccggctctatgcccggtgacctttagttgcacattgagtatttatggtgctctttctatgtgcctggagctgttgtaaggagcccagcaatgaggtgctcacactctggtggggagtgagacaagtgaagaggcagtcgcactgcagagcaccgaaggctgcggtggcagaagcacggggaccatgggatcagtgagcagggccattgggcttagtctgaggggtcagagaaggctttctgggataaagctcattttgtggcttattttcctgaacctgtgtcttcatttttaaaatgggataggaatgcctgtgcgccatgatttgaaaaggttaaaaggatttgcacagaacttggcccacagtctgtactcagtacctcacggttttctttttctgctctcctaatttgcgctccttcctggaatggttgtctcagtgttgccttgccttgcccagcagcatcttgtatttagcacttgaaatttacagaacttggtcatacatgcccatctgttacagcagtgttctggatctccatgccaggcccatccacggagttgctgtgtttggtccccctagacacccttgagggggtagaaagtgtgatttcaggttttgtggatgagcaggctatcacttggtaaaagtatgtggcagtgccgtggagagaaacagggagaagcctgctctcctggctctgagctcacttctcttccctctgcccttggtctttgtgtcacctctctccctggatggacgtgagtatgtttcaatctatactgtaagatttttgctttcaaaataaatgtagaaaaagggtgagaattgcaatcgtgtatgcaagtgtgccccctcccctccccggagagctaagacaggtgagaatggctggcatggaacagctccatgccccccgctcccttacctgtaagacactgctggtggtaggatccacttcatgagaccattgtgaggagtaaaccaaatggaatagtgaatgtaacgcgcttagcacagttgtggcacgcagtgccgtgtcacaggccagagctgtggcgtgtagttgctatcagtgtgattcttaccatcgaggtttagggaacctaccaccccatatacaatccttttgttgcacccttttttgctgatcatccagtgtctgctgcactacctgtggtgacagtgaacccattactcacaaggcagcctcttccattattaattggttctagttaagaaggctttccttacattcatctaaggtctatcacatggtaggaatgctcccacggagactggttttctcctcaggagctgctgtagtatgatagagagtattggggtggaaaggctcacagaaggacgtggaccgattccatcagtttacagagctctcagctacagtgtcctcaactgtgcagagcttctctctttgccctctctaaacaccctgtatatatacgaacaagagagcgctactttacgtggcttggggcttgttgtcattgagtgggtaagtgagaatgtagagcagacttttttttttttttttttttgagacaaggtcttactctgtcacccaggctggtgtgcagtggcacgatcttggctcactgcaacttccacctcccaggttcaagcaattctcctgtctcagccttcctagttactgggattacagtcacctgccagcatgcccagctaacttttgtatttttagtagagatggggtttcaccatattggccaggctggtgttgaactcctgacctcaggtgatccacttgccttggcctcccaaagtactgggattacagacttgagccaccgtgcccagccgggacagacatcttgataaagaaaaattgaagtttcatttctagtaggttggtgaaatagctaccttcccatggaaaagaaataaaactgctagaaaatagcatttataatagcacagggaaggggtaaatggaagtaaactcttgtaaggttcttatatttaagtggtgcaaagtaactgaagataaattcagatgaggtaaggatgtattctataaaccctagagcgaccactagcaaaataaaacataggtataaaatcctagtagagaagataaaatggagtactgcaagatatttgattgatccgaaagagtctggacatgtaggaaaaaagaggagtacagaagagaacatcaaaagcaacagcaatatagtagacttacacttaatcatattaacagttatgttagatataaatggattaaatacttcaattaaaagatagattgtaagagtgaatagacaagcaagatccaactatgtgctgtttgcagatgaagcactttacgtgtaataacatggatagaaaaaatgatttaaaaaaggtgtatcaatgcaaatactagtcagtagaaggctggctacattaatatcaaattagggagactgcaagacatactttggcatactaccacagctaaagaaggacttttttcttttttaatgataaaagatctgttaaccaaaaacgtataaactaccctaaatgtgttaacaggacttctaattacatgaagcacaaatggacagacttgaagggagtagataaactagttataaccagagatttttacttttgtttctcagtcattgatggcatgaagagaccaaaaatcagtaaaagtatatttgatttaaataaaattatgaagtagcttgcttgatctcattgacatttatagaatactacattcaacaatggcagatacccaacaacattctttgcaagtactcagtaacgaatcaccatgatttcctgggccgtaagacaaggatcaaagttatatggagtatgttatctaactctaatagaattaagttagaaattaatcagaaagataaaaatctcaaaaattttgaaacttaagcagcatgcttttaaataatccgcgattcaaagaagtcaaagggaaaagagatttttttttaaccgaatggattataaaaatgtaacctttgaatttgtgggttatagctaaagcagtgcttggggagctaaccatatacctgtaaaaatatatatatatatatatgaatgaaaagaagaaggacttaaaatcaggaattttagtttttaccttcagaagccagtaaaagaagaggaaattaaacccaaaggaagtagagggaaggaaatgaaaatgaaaagaacagaaatcagtgaaatagaaaatgggcaagcaatggaggagatcaacaaaatcaaaaaatcagtaacattgaaacatcttggccgggcatggtggctcacgcctgtaatcccagcactttgggaggccgaggtgggtggatcacgaggtcaggagatcgagaccagcctgaccaacatggagaaaccctgtctctactaaaaatacaatattagctgggcgtgatggcgcatgcctgtaatcccagctactagggaggctgaggcaggagaattgcttgaacctgggaggcgaaggttgcggtgagccgaaattgtgccattgcactccagcctgggcaacaagagcgaaactccgtctcaaaaaaaaaaaaaaaaaaaaaatgacagtacacactgagtagcatttgttctaggcttgcaaggttgctttacccttccaaaatctacccatgtgactgaccacgttaacagaataaaggggaaaaccatatgaccatgtcaatagatgcagaaatagcatttgacaaaattcagcacccgccgtggtagaaacgctccataaactaggagtagaagggcacttccgtgttgaaagacactcatagagtctcacatcttacctcataattagtggtgaagttatcaaatgcttttccccctaaggtgagaaccaggcaagaattctgctctcactacttctattcagtattgctctggggagtttagccggggcctccagtcacgaaagtgaaataaaagacatgaggattgacaaggaaaaagctcaattgtcctttggattatatagatagaaaaaatttaagaatctaccagaaaaagtggatgcaggatacaaggttaatacagaaaaatcaaatgtatttctgtatattagcaataaacaattagaaaataaaatttagaagttgatatcattttataacaacattaaaaatcctaaaaatacttagggataaatttaaaactactcaagatctttacactaaaaactgcaagacagtgctgagagaaatagaaaaagatctaaacatatggtgagatataccatgttttatgagtacaaagacttaacactgttaaaatattaattgacggccaggcatggtcgctcatgcttgtaatcccagcactttgggaggccgaggcgggtggatcacctgaggtcaggagttcaagaccagcctggccaaggtggtgaaaccccgtctctactaaaaatacaaaaattagccaggcgtggtgacgcatgcctgtagtcccagctgcttgggaggctgaggcagaagaatcgcttgaacccaggaggtggaggttgcagtgagccaagatcacgccactgcactccagcctgggcgacagagcaaggctccatctcaaaaataaaaaaaaaattaactgtccgcaaactgatttttaaagtcagtgaaatcctaatcagattcctactaacctttattatagacacaaatcaatttattctaaaatttatgtggaaatgcaaaggattcaagttaataaaatttacagagttttttaaaagaacaactaagtttgagaacttcttgattttaggacttcctacagagcggcagttatcaggacagcgtggcattgacataaggatagataatagaataatagaatcgagtagagatctgaatagtcaaaggacagacagggagggtatatttataatacatacatctgacaaagtacccatatccaggatatataaaaactcctatagctaacattacaaatagcccactttaaaagtggacagaaggttcagatagacactgcacagcagaagatattctgatggccaacaaacacttgaaaaagtactcaaccttattagtcatcaaggaaattcaaattaaaaccacaaacaaggtactactacacgccctccttaatggctaaaaatgaaagaactgacaacactaagtgctgacaagtatgtggctcagccagaagccccaggcacagctgatgggaatgttaagtggtaccaccactttggaaaactggcactttcttataaaactaaacaaactccattcctaggtatgtgcatgagaactgaacatttatgtccacaaaaaagtacttgtaccagaatgttcatagcagctttattcataccagccaaaacctggaaacaatgcaaatatatgtcagcaagggaatggattaacaaattcataccgagcagtgctcttcaatgacaacgtggatgaatctcagaaacattttaaccagcaagagaaaactgcaagagaaaacataccgcctgatttcacttacgctaagttctagaactgacgaaaactaatcaagagtaatagaaatcaaaatggtggtttcctctggttagccctgggtagtgcgggattgctggcagaaggacatttatatatcttgatagggatgtggattccactggtatattcaattagcaagactcagcaaatagtttgcttagatctctgtgttttaaattatacatccgaaaaaaactattaaaatcatgtaaaatgttgaaatctagaaatacttagaagacacacacacacacacacacacacacacacacacgagtcaaaacatgaacccaaagtaagtggcatcctcgtcctgttttccaaatctggttaacctgagcttccgtgggcgagaccatctcaagtacttgggacaaaaggaaatggtcacggttctccccaggtagtgaggctgaggggagaaccctctaaataaagccgtcagctcagagggcgccgtcctcagtgaggctgcgttgggagcaactcctgcccagccccaggggaggctccttacccttgtgctgagctctgtgaatctgtctgtgagtgaggctttggcagaccgtttgcttaagggtgaaagataaattgtcatcttagggaggtagggtagtaagaaccatcccacacactggtgggaagatattcaaatggccatcaaacacttgaagaagtactcaacattactcatcaagggtatattaaaaccacagtgagatactactgcacgcccaccagaatggctgacaacgaaaggattgacaactctaaatgctagcaaatgtgtagcgcagccagaagccccaggcatgcggaaatgcaaaggattcaagttaataaaatttacaaaattttgtgaattttgtaagaggcaaaataggagtgatagtatttggatttaccagtgtacactgtgaaaatcaactgcaaaaaagaatttggcttcaccggggagagttgatgaggtgcattctctacgatccaggtattccacacttaagtcatacgcagtcaggctgccctgtctagtatggtggccattagccacatgcagttgtttaaatgaatagattgaaacatgacatttctcagtcacactcgtcacagttgaggtactgcagacccatctgtggccggcggctacagtattgggcagcacagatgtagacattcccatcattgcagaattcttcccgaggtgccacttgagagcactgattctccaggggtgacgactggaccggcagcttccgcatcagcaggatgttgctgggtgcatcaacaggttgctgcatttctgttagaaatgcagattcatgagtctcattcctgagtgatctgcggggtcagagatgcaggaggcggggcccagcaggctgtgcttaacgagccctccaggtggttctggagcacgcagcagttgagagccactgctctagggggactcttgaaaatgtgcacgcggattcctgcagtcctgatttttaatagcaagaaaggagcagaacctaagtattcagcaacagaatggataaactgtggagtattgttggggaaatgaaaattaataatagtctgcagctacacgaagtaatgtgaatgtatgaaaagtccctgatgaatacatagtttatgcttatctttatctaaaattcaaaaccagaagaaaacaagtatggtacaaagatagagaaaagtgaggaaatgataaatgcacaattaaggacagtgtttaccttgaaaggattagaatctcatggaaatggctggcttcaggggaagttaccaatccagaggttcattttctccttaaacaatagatggtaactctaagcgttcttggactattggcattcttttactttcatattaaaaaaatattttgaggccaggcatggtggctcacacctgtaatcccagcactttgggaggctaaggcaggcggatcgcctgaaggtcaggagtttgagaccagcctggccaacatgatgaaactccgtctctactgaaaatacaaaaattagccggatatggtggcgtgtgcctgtaattccagcaacacagaggctgaggcatgagaattgcttgaacccaggaggcggaggttgcagtgagctgagatcatgccactgcactttagcctgggtgatagagcaagactctgtcttataaatatatacatatattgatattaactcaatatttaaaccatttaaaactataaaaatatcagtttttggttgatcatgaattttttccagaaagtaacatagagcaccaaaaatattcctttatctatggattagataaatattttatccatgcagtcttacagttgccaatttttgcttgaattttccatcttagcatttattattaggcatggaaggattagaagtaaaatgctgggcagagctctcccaatcaaacttgagctataggcaaaataggagtgatagtattcagattaaaaaatgactaaggaaaattgcattaagttaattacatagagccattttattgtggtaaaacaatattaaatatatatgtcagaagtcgtcaagataagaaaacagaaagccaaaatctgatcgaaagattacagttgcaatagagaactttaattctttcttatcagtgtgtgagttatcaagtagaaaaaaaagggccaaggattcaaataatatagttttatggtcaaattaatatttgttcaccgggaatccagagatgggagaatagctagactttttagaagaaatcacactaccatctacattcatgcacacagatgcacttgctgtccacccatacgtacatgtgcactgatgaatgtgcagaccagattaaattgtgatgtaaacagttaagttaaaaccatgtgcttagattaagcatttgaagcatgccagtgcccactagaatcaagaatttagtagaatgtgtgaaatgtcagttgactgtggtgtcaggacgtgtccattgggcactgtagcccagcgctcttctgggagcgctgtggctcccatgtgtaccattttctaccgtaaattaaaactgtagccatggctggccgagcgcggtggctcatgcctgtaatcccagcactttgggaggctgaggtgggcggatcatctgaggtcgggagtttgagatcagcctggagaaaccccgtctctactaaaaacacaaaattagccgggcgtggtggcaggcgcctgtaatcccagctagtcaggaggctgaggcaggagaatcgcttgaacctgggaggcggaggttgcggtgagctgagatcgcgccattgcactccagcctgggcgacaagagtgaaaccccatctcaaacaaacaaacaaacaaacaaactaaaaacaaaccgtagccttaatctgggtaaagggtccaggggcattgctttgtgttgtttcttacaactacatatgaagctacaattatttcgggataaaagtttaataaagtgttctcctccccctatatactaacagtgtatacgcgatagtattttatcataggtaatattatctaatgcccaacagcagagagccgtcagcctatggggactttcctcgtacggtgagaggaaaggagggcagacagccgggaggggagcacagtgcggcagcagggcggacacagggacccagcaagaatgagcacagacgggtggttcacacactctagcaagtagcatatgcctggacaactgttggcccaggagccatccaaaagattagttggagaaaagaaaaaatgctgtatctacaggcctgttcatcgtagcactgtttgcagtagcaaaagatagatatccatcaatgtgaaactggctgaataagctgttctacacctgccaccccgcaactggagttctgcacggggctgaaaggaatgtgggtgctccgtctgcagctagtgagctcttggttgcctcactgtttactggaggtgcaaggtgcagaactgtgtgtgtcatatcccatcacttacctgttgattggttggcagagtatgagcgtacacgcatacgcgcatgcacacaaactttcctatttgcttatattacaaaccaaacaaaattaaagaataaaccagaaaccaatgaaaaagggttatagtctatatggggaagatgagatacaaagggtcagatctgaagcctgacttctcttctctgaatgtaccttgttttatagttttttactttgaatcatgtattgctttacataattataaagccaaactaagcccaaatcagaaagctattcttaaaaagcaagaacaaaatcaaatgaaaagagaacctaaactatgtgtcaagtcggtactttaatcacacagagaaaaatgacttcaaacagactttgaagcaatttgaatgtacagccccagtaggatatatcttaagcaaaaaagaattgcaaaagttctcaaacttcagattgttggtaatattattagtgctgtttgaaactatgacttatatacctacttactgaaatacatatttgcacatatatctattaagacaaagcagataagtaattatgataatgttagaggaaccacaaattctaacaaattctaacataaaagagaatcaagcataaaattaaagaagtaaaacacccataagcttaaatatgaattaaggttcaatatagccaggcgtggtggctcatgcctgtaatcccagcactttagaaggctgaggcgggcggatcacgaggtcagaagatcaagaccatcctggttaacacagtgaaaccccatctctactaaaaatacaaaattagccaggcgtggtggcgggcgcctgtagttccagctacttgggaggctgaggcaggagaatggcgagaacccgggaggcagaggttgcagtgagccaagattgcgccactgcactccagcctgggcaacagagcaagactccatctcaaataaaaaataataataataataataaatttaaaaaagattcaatatgaactgttggtggattctgccctttgaaaaaataacctcttatcttctggctgtgaccactgaaaattattggacccagttatcaaccccagtggaaatgagcaccctgcggagtccttaagccgtttcccatgaaaagaaaccaaggctccttagagaaatgtttgatgccagaaaatgtttaagatgaatctggaacatctagtcgtacagaaagcaaggaacttctcatagactcttgggtcatgccaagagcccaatttaaagggaccctctctagccaaaaataggaaaacaaagcatcagaaagaattatgatggcagtttattagaacataccaagaatgttaaagtctatgaattcataataacttctaagtaaagcccttactagttcacccgtgaaggttgctagggcaccaactggtatataaaaggaaagagtcaagaaagtattctattttcctgctaatcaaatttttttttttgacggcaagttattccttatggaagaactgtggctgtaaatggagaggcagtgaaagaattgcagtgtcaccctaatgaaatgagtcaagccagtgctcaccagtagcattcagaaccacgagagggagcttgcaggggacttggtgatggatggttctgcctggtaacacctggacctgccgatcaattgcagcatcaccaggaaggagaccccagacatttcacaccttctgatgcggtgaaatgtgaaggccacagctccaacagcgaagcgttctcgcacacacacagatcccatctgcataggatccagcctttagaccgcagtcctgcttgcagggagtaccagggaagggggaaacggatggaactcagcaggggaataaactagccagaactagagtgtgaaacatcccacatggccatgaccagattgcttccacaaaagcaggacagagaagcaagaaagaggagggaattcgagattttaaatgagtaagagagttggctctcagatgcattgtgtatgtgtcatttggagactgatgagaacaaagtgacagcagaaagacacatgattgggaggcatgcaggatcacattaaggaatcatggttaattgttttgatgtaataataggcttgtgattatgtgtctaagttgttgtctctgagagaagctgtgaaatgtgatgtctgggatttgctttagaataacctagcagcatgcaggcagagcgggggtcggtaataaatgaaatggcattggccaaatattgatcattgtggatcttgagtgatggatgcagggctgtctttctactatgctttttactttggggaattcttgaaaagtcttatttgaaaatggttttacacatcacaccacacgtagacgtacacacagtccatgcacacagacatgtgcgcacaaaggcggaaagcctggcctgggtgagctcgtgtgggaggagtgaggccggcagggtgggaggtgtcactctagtcaccagagtgggaagctggaggtgacaaggggacagtttgactgtcttaaagatcctgtcttgtttcttattgttgtgcagaacctgtataattttccttgttttagatcgtaagaaattcttctcactgttccattttctgtaaaatctaagaattccctggttaatggttattgggtgaatgtggattctttttgttcaaattggttcaataagacttttattcacaagtcttattcacagcccaacttacaaggggacaggttgaagtgtttgctcaaggttggtggtgggaggtccttgtaaatgctcagtcatcagtgataagcagaggtcagaacagcccagtgtgaagcctccggggatgtgaacagtccggaactttggcgtggcattcgctcaccctctggatgtctgtatcatttccccgggccccgccgtgcgcagcggtcccgtgctaggtctgtggggtcccagaggggtgggggggcggtcctcatctctagaagcttataccccagcaaagtggttctccagctccacctcacctgggaatcatcttgggagcctgtgaaagatgaagattccggggcttgccacccattcatgctaggaaaggccagcatccgccagctcatgtctccacccggcacacactgagctgggcaggaatgacaaggatataggcacaggagacccagtcccagcccagggagcgctcagacagacggggcgtcttggaggtgcatagacatttctgcctggatgccactccagggtggatgtgctcgtcccctactgccactctgccccgtgttccagcagccgagtaacttcgggaaatcccagtcagtgctgtcagaaacgcaacatgcatgccctttactgtcctgtttagaaaatgagcacctgtgtcccctccaggtggatgctgggcctgcagaagctctcctgggggtgtccggtggtgggtcctggtagccacagcctctgcttcctcagcgtccccttcgtttgcttgctccaggtctgggtcggttgcagttgacagtagcggggagggggtggctgcgtgttgatagagacaggcactagaagtcatctttgggggagtggcctcgcagagggggtggctgcttgttgatagagacgggcacgagaaatcgtctttggtggggagtggcctcgcggagggggtggctgcttgttgatagagacgggcacgagaagtcgtctttggggggagtggcctcgcagaggggttgttgatagagacaggcaggagaagtcgtctttgggggggtgtggcctcacggagggggtggctgcgtgttgatagagacaggcacgagaagttgtctttggtggggagtggcctcgcagagggggtggctgcttgttgatagagacaggcatgagaagtcgtctttggggggagtggcctcgcagagggggtggctgcttgttgatagagacaggcacgagaagtcatctttggtggggagtggcctcggggagggggtgactgcttgttgatagagacgggcacgagaagttggtggggagtggcctcgcggagggggtggctgcgtgttgatagagacaggcaggagaagtcatctttggtggggagtggcctcgcagaggttgtggctgcttgttgatagagacaggcacgagaagtcgtctttgggtggctgcgtgttgatagagacaggcactagaagtcgtctttggggggagtggcctcgcagaggggttgttgatagagacaggcacgagaagtcgtctttggtggggagtggcctcgcggagggggtggctgcgtgttgatagagacaggcacgagaagtcgtctttgctggggagtggcctcgtggagggggtggctgcttgttgatagagacaggcaggagaagtcgtctttgggggggtgtggccttgcggagggggtggctgcgtgttgatagagacaggcacgataagtcgtctttcggggagtggcctcgctgagcttcttctcaggtcctgtgcacctggcaggctgcttcagccttcacaaagcagtgctcttgaactgaggacctcacaggtctgggtctcagaggtcctgagacctttagagtttatccagctggactcttcctttttccagctgaggaaactgagcttcatttgcacctaagctgcctgtctgttttgaggaattttcagtttagtgttcacagtgagacaggtattaacacaccgtaggcttcaccattctcttaatcacctgttttgggtacagagctctgtgatatggtgatatgcactcagtgtcatctctaattcttaccatcatttgtactggaaagcgtgtactcgtgtactggacatcatgattgccgtcttacagatgagctgttggaagctgaggcagggacttcagtttgtcctgcaccatacagggaccatatggggtgggagttgtgggccaggcctgagttcagtgcccctgctctttccacaagaacagaagagggcacgctgtgtacctgtgtctcagctgtgcactggagggatgtcggagcagggcgccttaccctggcctcaggagtccctgtggggaagcgagtacctagagggatgcactgtgcgtgggtgtcctgatagattgcagggggaatacagccccagagcacaggacagagaggtatggagggagcccgcagcagcccagagtgtctcagtgaagagggacaggactcaccataagggatggggccttgggttggtggtggcggaagaaggcacttcccaggctgggagagcaggaatgagtcccaggagagagtgaacgaggatgcccaggagtggaaactggagtggaggggcttggtgggcaccttgcatgcatgccctgggagcagactgcaggctgcacactggtgtgcacaggggtgagcccgtgtgtatgtctgtgtggctgatgcagacctgtgagcctcagcctgtggacatgcccaccggcgggcctcacaagtcattgcagggctggggacagaacgtgggtcgctcactgagagctgccccacacttactccttctctgacccctatgctcttttagctaagttcagtctacagagagagttgaggctttgacgtattaactggtgtgatgtcatttcttgcttcaaagaaaaaataatcagggctcacagtggttctcttccctttgaatttgccaagaacatccttgacaaaaattaagaaaacagcgaagttcatcagtttggacaggatagcaaaagtacctttagagtggtgctcacagaccacatggtgttacagcattttctagaaatgctgagtcatcagacatggaatgttgagatttgggaaatgggaggaggagcatcgagggtggctgaggttagcagcagaaagttaatccttcttgcaacttagtggcagctctggcccccacagtctacttgagcttgtataattcatgaagttttgacagagcagcattgaaaggatgtctttgatttcatccataaaggagataggcgtgtgcaggcggtgcggtacttgtgacgggagcttgtgaagtgagccgcctccctgatgtgtcttggcggccagcaggccctgtgatcctgcgccgagtctcctgtggtctcctctaagcacctgctggtgaccttgcatctctcctcaggcccttgctaaaatatgtaaatcaaggtcattttttttgagtttgattcttagctagtttttgctggtgtgcatttttctggtttaaggatccttgcctccctgcagggccagcagcagcaaaggatgagagagagcaggttgggggagggggctgccttgttcactctcccaactctcagctgcccatcggaaaggctggctagaccattcctcatctgtgagccctaggagttcccggcttcccagtgcatgttgatttttcattaataaattgaatatttaaaccagtcaattggtatataaaaggacctaggaacacagccctgggaaacgcctttcaaatttgaacatgaaaacgatctgtcatcactgagcacatcattgatgacagatgcagtcatcactgtaatggttaatttatacgtcaacttggcggaatcaccattgccagatatttggtcaaacattattctggatgtctctccgaaggtgttttttggttgaggttgttacagaaacaccaggggttctgtctgggtcctgctgctcactgcacagaaagccaatccccaagacaacaattattcccaaggaagaaggctttaattgggtgctgcagcccaggaggtgggaactcagtcttaaatgcatctccctgactgactaaaacatagcagggacgaaaagtaatgatgtatgggaaaacagggaggggtaaggaagcagtcaagatgaatgaggggcttggcatctagctgtctggatgctataagctggtagtttcagttctttgatactttttgagaggctggtatctcattgtccggatctggtgagtttcagtcctttgatactttttgagaagctggcaagtcctttcctgaggaaggaactcagataaaacaaatgttaagttttaagctttaagatcagaagggtcagtttctaagtttgtcaaaaaaatggtctgtgggacaattgggtgggtttcaaggctaacatttaagtcaggggactttgcataaagcgaagggtgaccctccataatgtgcgtgggtctcatcccatccgttgaaggccttcatagacagagactggcctctcccaagcaagaaggaatgctgcctgcttttgggtggacttaaactgcagctcttccctgagtctctagcctgcctcctaccccaccagattttgttctcatcaagcctctacaatggcatgagccaagtccctaagataaatgccctctgtctatttatatacatgtatatgtacatacgtcctgtcggttctgtttctctggagaaccatgactgatacatcaaccaaagaataaatatccattgggaattttaaaagttcagtatagtttatgtctttctcttatactatacggctttaaaaggcttatttcagttagagagtgttcatacattggaccagaatcccaggaccaagggacagaccctgtagatcattcccttcccctgatcagcccccgagactgtagagaggagaacccgtcctgtgactcactagatttgattggctgtgacctttgtctttaaccagttggaatgttctcaagacctggacagacacatgccgataagaatctggcaaaagagaacatgggtggcatagagctaatggatgagtcactgaggccggctgggtagcaacaggctcatttaggctttaggatttggctgtgccatgaaatgtgatgtacagctcttactacagcccatgccgtaaacgtggggatgttggcgtgaattttaaaatggctgtgctctgcattatgggctggtaattgtgaaacacagtggtctggtgatgaatatttcaaaggaaatcatagcaaagattttgcttgtgcagctgaagttggtgcacttgaatcttagcaaagaatgggaaacaatttctgtcatttgaatggcctcaaaaccacatctatgtaaatacgcatatgcggggaaatctcgtgaggccagaaggccatttgtttttatttcgtgccaaaaattataaggaaaatcgaacaatgcaattaaaggtgaaatattgttccttttatcacagtttctccattataaaaaatagaaggaaaattgtttctttgccttagttcctacattttaaaaagtttatatcatatataagtaatttgcatttaatcttagtcattttgaactttcattttgtcattttataagcaaaactaaatccgccacagaacgtgtagtgcagtgttaagagaactcatgtggtaaggcatcaggatttccccctgtctcccaactgggaacggaaggagaggagcagctcggctctgtcctgctgtccatccctttgagcttctctcaaactccagggccctggcccctgaggaaactcatggcagttcttaagggaacaatcctgcagggagacccttgagaggaaggttacagggctgtcaggagctgccccaggcctatgcacctttcccagtgaggggatgctgagcgggttgagtctgagtgacagcagagggggcagaaccagaaccctttcccagggctgggctggaggctggccctgtccactcctggctgaccccaaggctgagtcatatggatgagaggtgctgctacatagatgagtctgttggtaactagaaaagaccacttcagattagtccttggtctttttgctttttttaattataaaaaatgttaaatatacagaaacatgtagataatagtctaatgaatgcctttgaacttattacccagctttagcaagtcaaaaagatttgtttcatttttaaaaagcttcagatctgttgtctatttcttgtttagaaacacatttcacatgtactacggaagcctcttctcttcctttcctctccttggcagtctgtggtttcgcctaaactttgtattcatcatctttttagttcttgcccatctggaaactaggaactggcctctcacctgatccactgcgctgaatgccccagattttttctcttgtggattctttggaggattttgaagtagaatacattctggatacgaatcctttgtcagtcacatacccactacaaatacctttttccagtttgtgattgagaaatcttaattatagtgtcttttgtcatacagaagtttaaaatttgggggtagttaacttcatcagtttttaaaatttatcctttgttggccgggcacggtggctcatgcctgtaatcccagcactttggggggccgagggaggcagatcacttgaggccaggagtttgagaccagcctggccaacatggcaaaaccccatctctactaaaaatacaaaaattagccgggtgtagtggcgcatgcctgtaagcccagctacttgggaggctgaggcaggagaattgcttgaacctgggaggtggaggttgcagtgagccgagattgtgccacagcactccagcctgggtggcagagcgagactctgtctcaaaaaaaataaaaataaataaataaataaagtatatcctttgtgtcctgaagtgttgtttttaggcgccactttctcccccaccctcagttcgcgtgtggtgtgcaacagagtccagtttcattcttccacgtggatagccagttgttttctctgtaccattgatggaacgttccatcctttgccttctggctggcactgctgtgcctgtcatggatgattgtgtgtccacatcagtatgggcatggccacgtggcctccacatgagtatgggcgtggccccgtgtcctctgttccactgctctttctgtccggggcctaggccacgtggcctccattagtcccacaaaatgtcttgctgtctgatacagtcttcaccttgtcgttttgtctttgcagttgtcatgctagttttggccctttgctcttcaatatcaactttggaatatgctttaattctacaaaaatcctggataaatgatagggagtttttattagaagtgcattgaattgggttgggcacggtgactcatgcctgtaatcccagcattttgggaggccgaggcaggtggatcacgaggtcaggagatcgagaccagcctggccaacatggtgaaaccccatctctactaaaaatacaaaaattagccgggcgtggtggtgggcacctgttatcccagctacttgggaggctgagacagaattgcttgaacttgggaggcggagcttgcagtgagctgagattgcaccactgcactccagcctgggcgagagagcaagagtccatctcaaaaaaaaaagaaagaaaaagaaaagaaatgcattgaacatatcaattaaaaggaagataattgacatcttttccattttgaatctttttgtgtgtgaacctggtatatctctctgttaggttttcttttatgtctttcaggtaacttttacatcatttccaaaagtgtcttgcatatatttgtgtaatatattcctgtgttcttctgtccctctcactcagcaaaaattctgcaggggtgggctccctgtgcccagaggttgcctacctgcctttgcctttgactggtcagaataccctttcatctgtttacctggaagtaggaggggctctgagtgctaggtatcccctgggagtggtgggggcccctgctactgtgcagctgtcctttggagcagctctcatggcatgctggctgctttattagatacaatttactggacgtagtaaagaaaaaaaaaagaaaaagaaaaaaaatcaggattgggagatttcagctgtctaatccaattgcaataggatcaggacttgttaatggtcatttccaaggcacgtgggctcttccgtgaaatgtttttcccttaactagagagatgtgttatttttaaagatggtgttggctctaagaagagtatttctccttgacctccagaaccccctgtccccagagtcctacccttttcccagggtgagcgttttaagaggagattcttctcatggacttgtttttcacaggggtgatggggcagcatggggcgtgtccaaacacagccctgacctcacttatggctgttctgacaccctgatgctgccacccccaggtggcctgtgcattgtggggccgcaccacaggaactggacactcttccctgtgtactgcacagcagaagccatgctccccaaccccatgcaccaggctgccctggggaagggccaggcaaggcatccccccgactccatgtaccaggttgccctggggaagggccaggtgaggcatctccccgactccatgcaccaggctgccctggggaagggccaggtgaggcatccccccgactccatgtgttaggctgccctggggacaggtcagatgactcgcatcatgggtggcttggggtctggaggttcctccctgttgcccgttaactttgctgacagtcctgccctcgctgggctgagacggggacaccagggagtcatgcagccattagtcgcacagtgtctctggcaaacagctgtgctctgagctccgactgggacctcctgtgaggacaggagccagggtctctggagagcctgcaggcgtagggggcagtcaggtgctgttgttgactcagcgagcttgcacacagtagccccaaaccctgactgcgggggctcctgaagatgaatttcccatcctagccagtggggctaatccagggaaaacccctctttactcagaccctgacacaggggtcccaatgccaaggctgctgcagaggtgaaagttccaccctcagaaagccaggagtcctgagcgcttaccctgtgctgtgctgggtgtcaccgtgtggaagtgcagaccctgctcttcagagccttagatggcagctgggaggaaaagggcatacacagagggaagggcctggctgaggcgctgtctattcacattaccagataagaagcctgggagggagcttggagggttttcaggaaggcatgagaggctggggttggaggagccagggagagttgggtttaggggcggtcaagaatggtttggcctaccggaaggcatgagcaggggcaaagacagtgagcagcctcgtccctgctttctttcttttttcttttgttgttttttttttttgaaacggagtttcgctcttgttgcccaggctggagtgcaatggcgcgatctcagctcactgcagcctctgcctcccgggttcaagcaattctcctgcctcagcctcccgagtagctgggactacaggcatgtgccaccacacccagctaattttgtatttttagtagagatggggtttctctgtgttggccaggctggtcttgaactcctgacctcaggtggtccacctgcctcagcctcccaaagtgctgagattacaggcgtgagctaccgcacctggcctcgtccctgctttctaaagttagaagacatcagggtggctctgccaggtctcacatggcccattctgtgttccacaccaccctccagggtgcctcacacagccactccagctctccactgttttctcgtctatagagagaggtgcaacgtgctgaccttcagagcccttccagccctggtgtttgacacgggccccaaacagtgagggcctcgagcaccagagaaacgaggtggggcggcctggggctgtgtggactgggctgcaggcctgagagtgggtagatgctgacagacagagccaagattgcaggtcaaaggcagtgtttgcaatgaaaactctagggggctgaaacccagctgggtggcttccagggtgctgcctggcccatccctgcagctgcaggccggtcctggcttgttcttagtacttcacacagtgccatgcaggggtgaggcgtcagggcacaggggtgaggtgtcagggcacaggaatgaggctgtggagtgcaagggtgaggcctcagggcacaagagtgaggctgtggagtgcaggggtgaggcatggggaataggaatgaggcctttgggcacaggggtaagcctggagagtaggggtaaggcctgagagcacaggagtaaggctgtggggtgcaggggcaaggcctggagagcagggatgaagccctggggcacaggggtgaggcctcgggggacgggtgatatggtttggctgtgtccccacccaaatctcatcttgaactcccacatgttgtgggaggtaatagaatcatgggggcaggtctttcccatgctgttctcatgatggtgaataagtctcctgagatccgatggttttaaaaagaggtgctcctctgcacacgctctctccttttttggcctgccaccatccacgtaagacgtgacttgctcctcttttccttccgccatgattgtaagggctccccagccatgtggaactgtaaatccgattaaacctctttcttttgtaaattgcccagtctcaggtatgtctttatcagccacgtgaaaacggactcatacaaggggtgaggtgggcccctcctccccttcccgcagtaggctgccgtcttcaaagcagagtcctgtctaccaacagctcgcctcagagggatcgcttggtctctggttaggcagttagagcctcggctgaatgagctttgggcttctgtgagcttgccaggatctgcttaaaagaaccatatttctcttccattgcaaagtgtggaaacgtgcccgatttgcatggcactcccgggagcccttgggtattgtgcttcagtgtggccccagcagacttattgttgagtcatcagtcaaagctgctgtttctttcattagcgattaagagaggggaatattgaagtgatctgaaataaaaattgtcaaagtgttcttttgttgtattaatcagaaccatattcatcattcgagggaatcctaaaatattcctgactcgctcgttaaatgacacctgagtgtttcctctgcagactggcagtgtgaggaagactggaagtgtccccctgccccccaaaccagagaagaagcagggacaggcttggggcattgtttcaccaggagtgctggatgctgggccggcctctagagcctgtcactgccctggtcgggctaggtatgtccttccagcttctccgtctctctagaccttggccgggtccgagacctgtgggagtttcccaatgcagcgaccagctgcctcagccatgcctgtggggcgaggcggccaaggccccaggaggaaaggagcagtttccccagcatcctcggtactcagacgggacatgcttggtttccaaggccagtgggttccagggtttgattgtgtgttggggtttttctcaagtgctagggctgtaacagaccggcgccagcaggaacaggcccagcactggaggccaatgtgaaggggtcacaggacagtgggggcaccgagttaggtggatggggcctcatatgccttgaggggaactgggggcttcatcttccttgacgggagatggggagcctctgactgttaggatccgcccactacatcgtacccattgcacatggcacatggcagacagctgcccttgctccagtgacgtccagaatttacctggtgcagggtagctgagcactccactcccaatccagaatattccacacaatgatggtatttcctcatctagtctttttggctttctgctgggagaagaagggagagcttacggtttcgcaggtgaccagctcaagacctttgtttcagggtagggggaggaaaccgtttccgtcccccaacccccacttgccgttgctgcagaacagtcctgagtatctgctgaaggttcatcgctgaggatcctttctcagtctctggcgccttcctttacctccccaaagtagcccggagcctggagaacggggagatcttgattttcaggacaggcctggtggcatggaggtgggggatgccagaagtggccttgcgctacgcacctccctgtgagtcagccagtgctcatcccacagccccgggggcttctccacgccacagcctcctcctgcttgacccaccccaggcgtgtgcctctcactgaaggggatggagcccccggtcctgagtgggctctggccaaggccaggtgcccagggctggcctgtggccactgctcacgcctccctgttttcccactgagtgctgggtgatatttattgtctggattatgcctcattaaagcagaagcccattttccatagatgatatgagttttttatttattaaattagttttaagataatttaccaagtcatccaagacaaataatccacttaagtgatgccgtaaagctctgttttcccccagtgctgtgtttctgggaaagcatgccctctcctaagttctgctccctggttggagacatcttgtgagcggcagaatttacagtccagccttactaattcagagtaggattgggtaggagggctggctgggggctgacctttgcactccctggttaaataaaaggctgttaagcaaattcagagtgtaaacaggattccttggagaacccatcattctggaacttcccagagtactcctggagacctttccttctcagtatttgcaatgctaattaccaatcacgtgctactcagggctggttccctcagggcctcacatacctgaaggtttttgtttgttcaggtcacctaaggtatttaaaaggaaagacacacatttcttcccccctctcccaaaccctcaccctcaccccagaaagaggtacgttgctctaggtacattctcagtgccgagcttccatgcacccagcctgtccctttccccaggctcctggtaacccaaggtggtggatttgggggtgtgtgtgtaatttcgttcggtttccattcctactcttagtcttggggctgggattagaatgaagaaggggtcacagagggaaagctgacacaggggacacactggaccatgacagtgtggcatgtgccgcggagacatggccagggctcctgggaagaaggggtggagacagcccactgcctgggagaaagggggaagatcctgaagaatgaatgggtttatctaggggaacaaacccaggagcattccctcgtggggcagcagaatgcctaagacagccaaggctgcaaagggttggaataccagatgcagggtgggtagggaccggatgtccggtctgctctgcctcatttctacttgatcctgaaggcagtgggtatttaaaaataaaatggtgacatgataggagcccgctgaattagaaagggcatcctagttacagtgcagagagggctgacgtgcccagagaatgggatataggagtcgcagtggcatttaaactcagttgaaatatttggtcaattttaattccaacacaaacatgtaacattttaatggctgtatatgttttaatgggtattgaggactaagctctgatttttttttatcttgcccaaattcctgtttaacgggtctggagagtcaggccctacaaaccatacataaattctcatcagatgggttttaattaaccgtatatatcatgacttactttccagcctgactttgggataacattatatgacaaagaagaaattcaaaatattttaccccaaaacgtgttttttttgccatatttggaaatggcaaagctgtcctttgtgggggaaaatttgcgtctgtaaagaatcttggctgggcacggtggctcacgcctgtaatctcagcactttgggaggcagaggcaggcggatcatgaggtcaggagtttgagaccagcctggccaatatggtgcaaccctgtctctgctaaaaatataaaaaattagctaggtgtggtggtgtgtgcctgtagtcccagctacttgggaggctgaggcaggagaattgcttgaatgcaggaggcagggaggttgcagtcagccgagatcatgcaactgcactccagcctgggtgacagagtgagactctgtctcaaaaacaaaaaagaatctctattaacatagctagatttttttcttccaggccctcccaatcctaaagagattaagagtccagcaccttttaaagattcaatagatggccaggcatggtggcccacacttgtaatcccagcactttgggagggcaaggcaagtggatcacctgaggtcaggagtttaagaccagcctgaccaacatggcgaaaccccatctctactgaaaatacaaaaattagctgggcatgatggcacatgcctgtaatcccagctaccccagaggctgaggcaggagaatcgcttgaacccaggaggcagaggttgcagtgaactgagatcacaccattgcactccagcctgggcgacagagaaagactctgtctcaaaaaaaaaaaaaaaaaagattcaataggaaacatttctctctattgtctctaagagcagccactataagacttcaaaagaaccttggtctccacagtcttttatcttaacctggacatttcctttctattatcccagatctttagacaaactcaaccagttgtcaactagaacatgtataaattcacctatcgcctgggaacaaccccccgaccgttgctgctgccacctttcacttgtcccccctttctggaccaaaccagtgtatttcttaaatgtatttgattgatgtctcatgactccctaaaatgtacaaaatcaagctgcaccctgacccccttgggcacatgctctcaggacctcctgagggctgtatcatcggccatggtcactcatatttggctcagaataaatctctttaaatattttacagagtttgattcttttcgtcaataatatcataaaaaaaaaacctagctcatcaaacctatactacaaagccacagtagcaacatatttaagattcttgaaatgagtggatttaaaaaaaaaataatagggcagagcctcctctttccggtggtgtggtgaatgtggtgtccgaaagaccctcctgtttttggtatgaatacaccaaataatgctggtgtgcttttaagaaacataaccacaaaggtgagactatcagagaccagaaatctcgagaaaatacaaatctagagagttaggggagcaacatcaaagctggtctttacccaggggtatctgccagttgattttaatgagccactggcaggagtcaaaacctggggactgttttgttcagggactgaacagttgtttgtgtttgtctttcttagccttggccaggttaaaggagaaagaaagaaccctccccttcctcagaatttccaactacaatcctacattcacatggattgggggagcccccgttcatgttacttatttgacctaaaaaaattgcaagctaaaaatttggtttaatgtagtctgggataacaaggccctcaggctctagagaagcaaatataggtttcccacccccccactccccaaagaaaagcctcaaagaattccaatagatatacattctaaggagcataatgacaggagaagtcactgaagtacaaggaagcaagccactgggggcaagaatcagcagtgaaaacagactgcagaaagagatctacagagattttagaattatctgcgacatgctataaaaataagcttatacattttaaataatacaaagaaaggtattgaatggaagaaggaggagtaactatcaatttacaaggcagaattgaagaaataaccaaggttcaaatgtaatagataagtgaaacaaattgtgacaaagttgaagagattattaatgaactagaagagatatttgaggaaagtacttgtcccagaaagacaaagagatggaagatataaaaagagaggctaaaggaaatggaggatagaatgaaaagaccccaactctatatgatctgagttgtgagaaaataaagagaatgggtgcaaatggatgtttgataggagataatggatgaccatttccaaaactgatgaaaactacttattccccagattcagaaagaccaatatctctagcagaataaatatcacaaggaaaccgcaaaacatccaagacaaagaagttattcacaagcagccagagaggaaagttagattgcttatgaaggaatgacaaatagattgatagcattcaatagcggaggctagaagatgatagagtatcatcttttaaaataataaccaacttagaacaatatatccagcaaactatctttcaagaatgagaataaagacatttttagacaaatgaactctgagagggtttacaaccaaaagaccctaaaaccctctcattaaaggagcttctaaaggttgaatttaaagaaggataataatttccaaagaaaggtctaggtgcaagaagaaataatgaggaaaaaaaaagggtaaagtcatgaataactctaaacaaacatatatgaaagaacaagaagaagatctccatttataactttcggaggctgaggtgggtggatcacagggttaagagatcgagaccatcctggccaacatgttgaaacctcgtctctacaacctgggaggaggtttcagtgagccgagatcatgcccctgcactccagtctggcgacagagcgagactccatctcaaaaaacacaacaaaacaaaaaacaaaagtcacaatggaactgaaattctggaaaccatgagtacatagctagggaagattaggtcagtgtgtggtgctggtatgactagaattaaaatattcttaattttttgtactgtttgggaggaggataaagataacaattcattttagatcattaagttaaatatacatgttaaaatttgtagaggggctattaaaataatagaaacaattcattaacttccagattcattggggttagggcattagaatgtagagggaagtagattagtccacatgtaggccagaaagacaaatgctagaaaaagtagaacagttggaaacctcgaaatgagagcatgtgaattaacctgaatgtatcaggagtcacagccagcagggaccaagatctttggttagaaagcatggctggagtttaaaaacccagtgctgtgctagttatgagagaaatataaggaaataaagaatagaggggaacccaacaactaccaacaagcagaaatcgaggtttttaggaccctattttcaatatcatcaaaaatatgaacctgttagggaaaatctaaaaacagatataatagacctgtagtgagaaaactataaaacactggtgaagagaaagaagatctgattaaacgaagagctatatcatggtcatgagtcagaagactgattaagagctatgctatggtcatgagtcagaaatcccagcaagcttttctgtaaaaattgacaaaacaggttctaaaacttacacagaaatgcagaagatatggaatagccagagcagccttgaaaaagaagaagacacaagtgaggactagcactagctgaagtttagtctttcagcaaattgctggaacaattggatatccatgtgcatacaaatgaacttccatactttttaccatatacaaaaattaactcaaaatggattatagatctaaagtaaaactttataaaccttctagaagaaaacctttatgcccttgagttaggcaatgattttttagataagacaccaacagcatgatctgtaaaagaacaaagtactaggttgaccctcaccaaaatttaaaacccacgatcttcaaaagtcactattaagaggatgaaaagaggaggcatggggagaaaacatttgcaaagcatgtatttgataaaaggtttatatcaaaactagtggcagttttttcaaaaggtaaatatactcctaccatatgatccagctgttctattcctaagtatttatccaagcaaaatgaaagcctatgtccattcaaagatgagtacacaaatgttcatggcatctctctgcatagtagccccaagctagaaacaattcagtccatcaacagatgaatggataaacaaactgtggtatatccaagcagtgggtgctgctcagcatgtatagaaatgatctattcgtccgtgcagtgtcatggatgaatctaaggtaatcaccctgtgtggaaaagccagaccaaaaccaaatgtgtattatatgattccctttatttgaaaatattggaaatgtaagctaatgtatagtgacacaagtaagtcagtgatattctgggactgggagggctcaaagggaggatttacaaatgggcacaaagaaacctttggagccatagatatgtccactacctcggttgtgatggtgttttcacagctatatgcgtatatcaaaacttatcaaattataaacttgaaatatgtaaacatgttttgttttgttttttgttttttgagacggagtcttgctctgtcacccaagctggagtgcagtggctcgatctcggctcactgcaagctccgcctcccaggttcatgccattctcctgcctcagcctgccgagtagctgggactacaggcacccgccaccatgcccagctaattttttgtatttttagtagagtcggggtttcaccgtgttagccaggatggtcttgatctcctgaccttgtgatccgcccgcttcggcctttcaaagtgctggaattacaggcgtgagccactgcacccggcctgaaatatataaagtttatcgtatgagagttatacctcaggagagctgtttaagatacattaccgaacaaaaactgataggtagttttagtcatattagactccttcctcctgactagagacttcagagcaaaagccctgcgtgaggttagaggtcataagtatttgtactgtttagtacaccaggaagagaaaacaattttgaatttgtatgctcctgataacatagcttccaaacacagaaaacaaagattggcagaaccataaggagaaagacatacactcactgtcataatgggagttttgaagcatacctgtcagttattgatagattataagcagacaaaaaaaaccagtcaggatttataggaaactcgaacaacgctgttgatgaactttatttagtggatgtatgcagggcactgtatccaggaactcttagaatatgcaccctcttcatgttctgtggtctggccccagctcgctggtcattcctgtgggtcgttcagtccttggtgtttatttctggcccgaatcactagccactctctgggcttgtccaggtgcctccctgacatctccaccaggatccccaagtgtcttaaacttggcagttccaaagaataactcatggccttcccaccaaaacagtctcctacagccttttccataaacctttccccatcttaggaactggcaacttcgcccttccagttgttgaggcccatagtgtcagagtggctcttggttcctttctctcctaccccagatctgtcatacgcgttggtgtgttttttctgcacaaccttcaaaatacatctcgaatgtgtcttcccacaagcttgcctgctccgtcttggcccaagtcactagcccctcttgaatttctgatgaccgtggtcccctaacctgcctcctggttctcctggttccacctctccccaccctgccatgtgccatccattctcagagtgacagtcggagggatgcttttgaagcctgcatttttccctgctcagagccccgaggatctgtaccccagatgttcctgccattgcttgcctctgctcgcctcgttctgcggtagctgtgctggtctcctcgcttttggaacattccaagcagcttctaaccacagggtctctgtgtttcctgctgcttttacctggaatatttctctgccatgtgtctaaatgccttttctggccaggcacggtggctcacacttgtaatcccagcacttcgggaggctgaggcgagtggatcaccggaggtcaggagttcgagaccagcctggccaacatggtgaaaccccgtctctactaaaaatacaaaattagccaggtgtggtggcgcacgtctgtaatcccagctactcgggagactgagacaggaacattgcttgaaaccaggaggtggaggttgcagtgagccaagatcacactactaccctccagcctgggcaacagagcgaaattccatctcaataaagaaaataataataataaacgccttttttctctttggatgtttgctcatttgtcaccttaggcgattgaccgttgtactgaagtggcatccctctcttcacacacaaacccccttgctgttcctcgtcccagtctttgccttgttttctccatagcacatcaccatctaatgcactgtgcattggatttgtttacttaatgaaccactgacagtagtcctatagatgttgcatgggcaaggcagagaaggtagcaccccaagaactggagtttggggaaccctcagtctttgcagttggccgtgcgtgcttgaactaacaccatagccccaaggtgtgcaagccccgagcctcggtgtgggagggcctctgggagctgacagtggtcctgggtttccgggatgagtaaggggtagatatctcaagaagggggagcagggaagccttgtttgatgacagtgaggagagacatgggtggtgatttgaggggcgtgagccgtgtccttccgcgtccgtggcttccgagtagcatcatttccctgttcatttcccagggagacccggaccgggttgtggtcccaggcccagtgcctgatctccggcttgactgggctcagccttgtttcctcatctgtggagtgggaggaggcctccctcacgcgccctttgtgaggagtagactctgtgtctggcatggcaccagcacacgttgaatttgtctcttatcctttttggctattgtctgcgcaagagagaagaatgaacaaccgcttctgaggctgtctgaagcttggtctgctgttcacatgctgtttatcaggctgctggaacttaaagagaaaatggtgtttgttttaatggaatgaggattttgaaattaaggcattaagtaaaagtgagtcaacacaagctttggtttcctctgaaccctgactagataaaccctgactgtcgcagataacctcgcagtgatgttaatgggtcacgcgttacaatttctctcttggttattttttctcttttagtctgaaccggacggcttttctcatttccacttgtacgtgtgcgctgcttttctcgtgagatggaggaaggaaatactagaagaaaaagattttcaagtaagtaaatgtcttttcaaaagaacccaagtttgattttctactaggagagaggtttattacattttagttcacagggttatttgtggaagagttttgagaagcgctgcctgcatttcgccgctgacctcctgctggttgaaagctcgtccagctgaggagatgagcctggcagtggtcacgtggtcacagcagtggaaacgctgcccacgttatgagttattagatgtggctgtgtgacaagctccctgcagaaccttccctggggcagcgtgcccctcagcagcacgacccctgcagtgtgcggcttgtgacctctggtccctggaaccctctttacagcacgtggactgtgatgctttagggacagggctgggcaagaaatcacacagcctggggtgccttccagccaggccactggaagctctgtgactgggggcacattgttcagcctcactaagctagtccctggcgacttagcaggagagccctcctcgcatgccacgcgtcagaggcacgccctgctaggctccgtgcttgacctgtgggactccctgtggactagtgtccagcccctgacccaccccacgtgttcctctgtgaggcgtcccgggcacactgtggactgttggccccttcatggggtgatacccactgttccccaaggtgcgggctgggaagtccttctgcccagtgttcacccagcagagggctctgggtgcagcaaggaagaccccagcagtgggaagcagaccaggctctgcaccagctggctggggtcagccacacttcaccgctctcccttctcgaggctctcgtctctcagataaagggacggacctaggtccccagggcagtgctctgcgcagctggcagcctgttgttccccagctctgtgcttggcagaggctccaagcatccctattccttccgagggccttgggaggagccagggacctcctgccgccccgcttcatctcggccccaggagagaccagacaggtgagggccataccgaggccaagagctgccaacagatcctggcccagcagatggaacccagcccgggtgttcgcaggtggatgggacaagacgctccttctgctaacttagctcctgcctttttgtcagtgtggggctcggttgtgccctgcggggagcattgaggcggtgattggcatctcaatctcagacacacgcctgccttgcctctcccagccatggtctgtaagtgagtagggtgcacctggcctgcccctccgcccggctgatgcaaggctgctggggctggggcctcctggcccatctggcccactcgtcactttgcacaggggaatgtggaggcgataagaggggccatgacttgctgtgtcaccaagtaagatggaatgaatggggcctagactgcggtctcctggccagcctcctgctgtcctccacagtaggctctccatctgtgcagagagcagtgctggctgggcaggcagcaggcacccactggcctggccacttacctgtagggagaagggcccagcctctctggtgcacagcggccactcctggtaggacggtgcccagagtgcttggttcccaccggccagcacacacaactgtatgctgcctcccggagagcctcccaggggacttgctctccaaatgaaggcggctggctgccgagagtcagtcactgggctggccatggagcttggatgttcctgcctcggtggtgtctgtgactggctggctggggagctctgttccctggaggccctgggcagacattgctgccctcctgggtcagccatgcctggtggtgggaggtggggtgggagaggactcggggtgtgcctgaagctgcagggcactgtgctcaggcccatgctaacaacagaccatgtctcatcgtctccagaaatcaccctgggccccactctgggcagactctaagccacacatatgcgaggaatggaccctgagcacattctggttggggagagagaacagtaaagaaatgattgaccttcagcaaaaggctgtgcctccattgacgactccatttcttctgtctgctcccaaatagggacagtgtcacaaggtggctcgaggcagaccagacacacactggccgtgggagcttgtgggcggggtttcttcctgttgtgaatacgtgcagaagtgtcactccggccctggaggctgaagcaggccatgagcccctcagggtgaaggacaggagatagggacagctgtggatgccagggtacctgagctaggtctgggggaggtgggtcatgagagggtggtgttgggtgggcagtgggcctcctaccaccctgtcatgtggtggtcccatccaggggccactggcaggggcagacttggaccaagaaacggaattgatggcagccttgacagatgcaagtgacaaggtgccctcattcctcaccctgccgcagctcattgggcttttctgtgagggatacattgtgtttgctgttgggccggagacattgctctgctgctattagagggtgcagcgtgggcagctgattaaaatgtttggccagccttctctgagcccggcctacttaacttgagatgaagggaggacaggagtcaggcaaagccacacggccagggtgtggggtgtggggtgtggggtgtggggtgcagggtgtggggtggagtgcagactctgagagcctgtggggcccctgtgacttgagtggggaaccgggaggaggcgctggcagaggagccatgagattgattttcttcctttagaggaagaggaagttggttctttgatgccataggggttggatggagagaatgctgtgagtgaggggttggatggagagaatgctgtgagtgccacaatgtgttgtgggcactgaacccaatgggaaaggaggtgagaaacagaagttacaaacctgaggagtcctggtgagcacggggaatgtgtgtgtgcagttgtgacattttaggaagacgcttccgcatccatgggaggccacctgagcgagtagggcccagaacatgattccccaacagtggaacgttggtggaaagcggctttaaaagccctcatttgttgcagccttgtgatttgtcccttgggaaatgatgtgtggctttaagtcatttttccacaggaacagaatccttttctgattcccagaagaaaggcagagaccctcctgttgttaaacagcagagccaagcagttcaggggccagggagggggcgatgggtcacgctgccccttaattcccgaaaacttgggcaggcggggaaggtgagggcgctgcctgtgtcctaggtccccttggcctttgagcctcatgcgggcatggtttgcttccttgccatctgtgagccacctccagggcctgctgggcagggctcggggagcagggagtggtggggcggggcggggcggggtgaggtgaggtggggcggagaggggcacagctgggattggtgctgcactctgggcctcctggcccctggatggcggcaccttctggagtgaacgttggccctgtcctgagcgctgggccccaggaggtgtgtgcttctctggaggattgccactttgccacctcccctgccagagcttgctggtcctcaggaagggtggttgccctcaggcacatgccccatgccatctgcattgctaatccgcaggctatatgtatgtggctccacagccctgccctgggcgtttcctaatgccccccaccaccccacccccggctccacatgttgatgtccagtggggcctctccgctgagccctgccccgcccctttagccactgagattcaagcctcagccctcacagcatggactgtgccttccatctgccactctcccaccagactttcgtagggtcttgggggtgaaaggagcatgcttgtgtggaaagttgtgtgtcccgcggtgcccgcttggtgccctctaccccgtccttgccctctgtgggtcatttcacagtaagaggacactggggcccagcaggggtgaggcgagcagggaccctgctttcccttgggatccgctgtcccctctgttaggaacctgccacccgcccctgctgattgggcctgcagaccctcctcaggcacacgtggcacggtgagtgctagaaaggccagctccagcatgtcatgacccacgcggaaaccttctgtggcccccactgctgggacacgagcgcaaaaccagaactgagccatgtcctgtgcccattctgaccggctgggggtgtagtttaagtgcctgatgtcggcattactgggatcttttcctgattaataagcacggcattgtaaaattagaaaataagctatcccggaaaatcttcatttatccattttaccccccaagtctaaacctctcagtttggcttcccaggggactgggggtccaactgctaaacgccctgcaggccgccctctccccgccggcccccatcctcgccagcttcccctccttggagccccactgccctcaccctgggcttggctgagagggggccgcccacgcgggatcgattgtgctctgccagcttccaggagtgcccaccagaagtgggaatgccttgtgaggctggaagctccaccacctgccaggagctgggaccgttgtttttaattttaaagtaagcaagctgcttagacacagtggggacggcagttggcagagttgtttttctaagtagaaaaagcagttaattttatggtgaacagagtgtggcacctccatgaagtcaggaacctcctctgaggaggcctcggcagctgagaggtctgtaaatgtctgatcagtgagtgcgccactgcctgatgttgatgcgtggacagcctcgttgggagaagcagcttcctccagcatggtggctgcctgccttgggaggctggtgcaggcggcgaggaggcaccagagcggcatcgtggaaggctggggcccttgctctggaagcatgctccgggcagtctgtggccgcctggccctgggccctgcatctctgtgggagccccagctgctggatgggctgcatgggaaggaccagcaggtgccagcccgagctgcccagcctgggagccttcacctttgtcccctttggctctgggactgagttgtgtgaatctgccagctgctcagtggggaagccaaacacacacaggtgtgtgcagtgcctaggttgaggggctcagtctggctttgtgaccgtgggcttcacagcctcagctggtctgttcattccttcattgaatgcccctggaaccctcgccctgagccaggccctgtgctgtcaggttctgctctcaaggggcagggcgagtcgggaggggcaggtgcatgaagggactgctctgcgggggtcggcaggtgggcagggaccagggaatagaagtgatagatgggggagaggggagccagttggggagcgaggcaaagagaggatggggtggccttcccgtaacagtggatttgtaacagcctgctctgcaatgtgaagtgatttggtgaacttggcgccgcgggtggattggcagctagaatataagcagccatgagcaatatgaaaagacgagcagggacggggcaggatggcgcatggaggaagcaggaaaaattgtgtcctcggatttcaagaagaaaacactgggtagagcagggagtcactccacaccgtggcatcgagcagggagagtcaccccacaccgtggcatcgagcagggagagtcaccccacaccgtggcatcgagcagggagagtcaccccacaccgtggcatcgagcagggagagtcaccccacaccgtggcatcgagcagggagagtcaccccacaccgtggcatcgagcagggagagtcaccccacaccgtggcatcgagcagggagagtcaccccacaccgtggcatcgagcagggagagtcaccccacaccgtggcatcgagcagggagagtcaccccacaccttggccttctcccaacaagggtctggcagcggccgcaggagcgaggaaagcaggacgctcccgggagcacaggagcccagcgccagcttcgtcggaaacctccttgtagaggctgtgatctgtgcactttcctgtctttgtattaaacttgaatttaaaactgtataaaacatacaaagatattcagtgaagcaaccataggaggaaagtttaagcatatttagttggattaaaaataaggcgggggctgagcacgatggctcttgcctgtaatcccagcactttgggaggcagaggcgggcggatcacctgaggttaggagttcgagaccagcctgaccaacatagtgaaaccttgtctctaccaaaaatacaaaaattagctgggcatgctggtgggcgcctataatcccagctactggggaagctgaggtaagagaatcacttgaacctgggaggctgaggttgcagtgagccgagatgacaccactgcactccagccggggcgacagagtgagactccgtctcaaaaaaaatacataaaaaataaggtggattgtgaatctgaatggcataaaaaaggagtggtttgggagttctgggtggaatttgtaccaacaaagaatgcatcttctttctaagtatttatggaatacttacaaaaagtaatcacccaacctaggccataaacatttccaaaataaaaaaacagcaatgacataaactttgttcactgagcataatactttaaaattagatcataataaagttaaaatgaaaaaccaagcatttggatgttaaagaacccccttcaaaataatgtgggtcacagtggaaatgaccctgtaattacagaaggatgttcaaaagcacaaggaatgtgccagtgctgggcttgcaaacagattcaaagatgcaatgcttttattaattaaaaatattaaaacaagtaaactaagcctttaaccaagaagttaaaaatagaaaaataaagacaacttatgataaagacaataaaagaatgaatgagtaaaagcaaatgaatagattagaagacagggtttttatgtagaattcctaagtacatcttagaggggcagttggaaatgttagtgaaataggcagacctccagcaaggaggaccgagatagatggctgaaaacatagtcctcctctgtgttaggaaagaggaatttacacacacacacacacacacacatacatttaaaaaatgctaaacttgcctcaagataagctttaaaaaaagcccaacctggccaggtgcggtggctcacgcctgtaatcccagcactttggaaggccgaggcgcgtgatcatgaggtcaggagactgagaccatcctggccaacgtggtggaaccccatctctactaaaaatacaaaaattagccaggtgtggtggcgcatgcctgtaatcccagctacttgggaggctgaggcaggagaatcgtttgaaccagggaggcagaggttgcagtgagccgagaccacaccactgcagtccagccttgcgacagcaagactccatctcaaaataaaataaaataaaacttgaatagacttataatttgggagtaaatccaaacattgccaaaagtcttggttttaaatatgattctaaggccagaaaatgtcttcctagtaaatttgttcagtttcaaaaatccttatgctgtgtgacctgccccgctggaaagaagcagcaggcttggcactccgtctcacagagctggccacccggacacatggctcccagcaccctgtctcagctgaatcatcagtgacttctgtgcaggatcccacatctgccagtttctctctccacatatatggagtgtcttagtccattcctgctgttataacaaactaccttagactgggtaattttttttttttttttgagacgaagtctcacactgtcacccgggctggtgtacagtggggcgatctcggctcgctgcagcctccacctcctgggttcaagtgattctcctgcctcagcctcctgagtagctgggactacaggcacgtggcagcacgcccggctaatttttgtatttttagtagagacagggtttcactatgttggccaggctggtctcgaactcctgacctcgtaatccgcccgcctcagcctcccaaaatgctgggattacaggcatgagccatcgtgccaggcctagactgggtaatttataaacaatggaaatgtatttctcactgttctggagactggaagttcaagatcaaggcgtcggcctctggtgtctgtccagggcgcctcgttactgcatccttatgtggtggaaggtaggagggcaagagggctgggcgctcccatcagcctccttcacggcacccatcccattcatgaggcctgccttcatcaatattataaaataaaaaatatcccataaaaataccactggaatgtagccatgctcctggatgccagcctagagttagcctcagagatcaggccagcacacctgtaactctgtccggcttgcactattaataaaaatatcctatcaataaaccagaggccctcaatcccatgataccttaagagattcagtagcttttcctgagtttaatgaaaagaaaaaaacttctgcccttaagtagaactaaaattaatactttattaacatgctaagaacattttaaatcaacaaccaccagtacctagggaaatgctagagacagccccactgagatcaggacgatttcttctgtttttgtaacatgatgaacaaatgttcagcgaaggctccttgtcctctccccatacagtctgcatgcacacacacacgcacacacaacatggatattaacaaaatgctttttaagttcatgggctcttgagaagagtaagccagccctagaactagtgtttgccctgaaggtgtctgctgcttcctgctctgggaccaggtccccagtgtaagcagcctggcagagggcagggtagaaggcctggggctggagcaggtggatgtgagtcagagaccctttgcctacgtcaggacccctgaacccaagcaagtgaaccaggacagacagacaaaatggcccttgtaggttcatgcttgcctgaggcttagctctgaagggaagaggaataaaagcaggtctcctctgaaaattcctgaccccagctcaccctttcactcatttaggtctagaagttactttacttttatgtctgaaaaaccctatgctaacaagttaacttaatatggccagagagccccaggtgcctagcccaagaaaatgccagttcactctagagtggcacgttttaagcacaacatagaagttggaaatatccgtctaccagaaacatcataaacaaaattcaaaggcagttgacaaagttcttcattcacaacgtagcttatatccttaatatgcagagaactcacacaaataactaataaaaagaaaatgtcctcatagaaaatggatgaggacaatcggaacagtcagaaacccacatgagaatttatgtagctatccagaaaatgtaagtgtttcttccaatcattagtaaagaatcgaaaatggaagcaaatgctctctcaaataagcaccgcttttagcgaggggcctcctggaagtggatgaagttggcgtaaagcaggcatgctgtttcattctgatgaggggtgtgatacacagcgtttctgcagagctattaataatttatatcaagagcctttcctcgatccagtaattctccttgtttataattatggaaaaacaaattggcagcagcctgcatatccagctctcggggtacagttacctaagttatggtacatggctggttataatgtttcataactaccaaaaattacatcttcaagtaatatttactgaaacgagcaaatgttttcattgcgtttctatgtggaggaaaagcatgacctgaaattgtatatatcgacatatgtaatacagataaaaatgatcccagatttgcttctattccacgcgtggacagaaagaccgaacagaaacaaaccacggtgctagcctgacttagttttcattagtagagttatggatattttattttcttgtttgaaaaaaaatttttttttttttgtattttgcatgttcttttcaatatgtgtaaacatggttttctcactagggttaattcccacgttaaggatggttgtggggattcggctgctttgtgaggttcgtggcttggagctggagctcagaatgctgggctctgggttctctgcccttcttctaggatgtcgcactgcgcccgcccctcgggtgtcctgccgtgcctgcccctcaggtgtccccaccgcatccagccttgaggtgtcctgccatgtccatccctcagatgtcccctcagctcgctgacatgcacatgtgcaaacacatcactcaacacagagcacacaggcccatggccctcaaggcaagaggcgtgccctgctcgtctggtggagacttagttagcagatgcttccctggtaacacatgaggggcactggggatgaggagctggggatgagagtgtgagagggtcagaggggctgtgggaagagagaggtgggtggactctgcaggtcaccccagctcctaggctgcacaaagtgccattgaggctggctgtgcattccctttggctgagccaccatgacgaggtttcccgaactgccctgtactgcctgtagatgacataagggccacatttcattcatgggcctgggcttctttccagggtcctcagtgtcccatcacagaggagggggtgagtgtggtcatttctgagtaacctgtgaggatctgtgtgcacagtggaccaaattccagtccgtgacctttgagcccctccaagctggccacctggtcccctgggcccagcccctacttggaggtggtctcagcccatgtatggccacctgatgagtctggaagtcacccactgccccttaggaggccgccctaaatgctactagcctcagacttcagggatctttgataaggagataagcaataaagacatcacaggttctcttgggcatctgtgatttacagagtaggaaagacaacagcagcaaaagccctgtgctctgcagagacccaggcaggcttcactgcgcagaagcagcggcgaggcatccctcctcacccgtcccctggcctcggaagctggtgccagggtgtgcccagcctctctggctgtagacccctggagtccctttcatttgcttcatgagaggcctcaaagcaaatactccttagctcgagccttggcctatttggactttggggtctcagggtaattaaaggttgctttaaagatcaatggcagctttagaattatacctggaaggaggcggagagaagatggggtttgcacatggagatttatcatttctagttttttcttacctgaaagaaccacattattaatgacgatgaggtctcagcccctccaggaggctgaggggtgttcccgtgaggttccgtctgccaagactttggggcaggtgggtggaatcgctttgctttactcctggccacccagcccttccctttggcctgaaaacagagagcaccagctgcttcccgggtgacgcttcctccattctctccaggagggtgtagactcctgctggaggcccctcacctgtgaagcccccttgctgtgcttactgggggtttcaggccgtggttttgcacccagccgagcacctggcgcgtggtcggaatggaagggctgtttcccggctggcaggatgtttgtgcacccagtcctgatagacatgcttttctgcatgctttcatttggagttccagcatccttttgggccagtccattgctgtcttgagtcactagtgaactcacacccaggacccatttagtgagtccgtcaggcctcaacctgcccattggctcacagaatggcccgtggcagtgggccatgtctctgtcaaatgggactgatcttgcaatgctgcattagccttcgacaggctaatggcttcatgcaggtttctctttcatcctgtgttcactggaagcagcaaatgtcatgaaatgccaaagtagagatcgttgtctccgtctttattgtttcaagacattttaaagacaaaattgggtcaattgaaaagtaatctctgaagtgaattgtgcctttgtgtgcgggttgctgcatgtgtgaaagtgtggggtttgcagggtcatgcgtgctgtgagatcaggtttgtgttgctgtgtggggtttgtgttgctgtgtggggtttgtgtggccatgtggtattagctctttggaccattcttgagcagaagctcttgggggcccacatgcctgcctcccatgttctgatgcaacaccgtgaaacaggaaagaggacaccattgacaacggctgggcacatggcaggtccatggtgggtgcgcttactgccggattaggcctccccgaagaggggtccttgtgtgggagcggcagagagagaaggggactcttgggtcagcgggggagggcacgcctgagctgagcatttgaatccctgctgctgcggtgggggtgggcgctgcccttgtgttttagcaagaactgcagggtaaatgcaggaaggttggggatggggtggtgatgtgcagggttcagagggaagggcgccgtgggagctgggacctgggctcagctgtgaggagggagcagagctttccttgtgggagagctgggtaagaggacagcaaacccctgagtgaagcagggctgagagccgcctggaggacaggctgcccacgccaggccctcgagccagcctaggggcgcatgtcctgggacgcattgggaccttgcctcttcttgacctgggcctggcatgggcatgcaggtggaagctctatggggaggggacctgcctgtgcctctgtgcacgtcattttcggagctaacacatgcctggtgtggagttggcaaatcagctgggcacggggtgctgccctctcagccacaggtggcaccgaggggcatggaggaggcaagctggtcccagaggcagggcttggggagtgggccgcagggcgagggggacagacggggggcttctatcctggaggagcgttgggccttcaggagcagtgaggggcccgcgggggaagcaggtgatgagtttgggctccaccgaggtccgccagtctgagcacagctggtgtgaggacactgaggcagcagtgccgcagggccactgggaggacaggcgggcagaggcctggaggggacagaggacaaagatggtgcctgcagagattgggccaggcgggagtggagacatagaggctgaaggagcgtgggtgggacaagccctgtaaaggagggaggggcaggggcttgcagagggtggcggggaggcagccttcatgctgagggtgagcacagggaccaggtgtggccagcacagtgaccacactcctgccccaggcccatggggcagcgccctccagagacccaggcaaggggcgacatctctgccccattgagtccccgagtccccaggctccggcaagatctgccgccagcatggccaaatgcacccccctgggttcctcctcacacttcagggagggcgaccgtccccggagagcccatgggattcccagtgtcttccagaacacattcttttgttccccggggcggggctttctcagaagccggcacagctaagaggcgtgccctggagacctgggggagcagggaggcctgacacacccagagcatcttctgttcctagtcctcacacggtgacaccagcaggtaacttctttatacttcgaaaagctccctattaaattatacccctcattatgataatgcagtagaattggaaggttcaaatcatttctggggaaagtggggtttgggctgcagagtttaatagctttcttcctggaggaaatgatgaaaggttgggaagatgaagtgtgagttaagatgaaggaacaggattgttgggagagactctggggtgacttgcagggatctttaagtctaaaacaagtaatgagatctttctttctgtggctcaactaaggcaagagaaatttgggccactctgcaagaacttcccagcatctctttgatgtcccttgccaagggccccctaccggctgctgtggagagggacccgcatgcggcaggccaaccccagcctgagcccagctggggctcctggagcagccaacatcgggtgtcccaggatggtcaagtacaggtgactctcctggtgtccagatagtcagttgccagagggcagtgcccactcagagcacgtgggaacacaaaggaaggtgatgatgtttcctttttttgttttttgtttttttttgagacagagtctcgctctgtcggccaggttggagtgcagtggcacgatcttggctcactgcagcctccgcctcccaggttcaagtgagtcttccgtctcagcctcccgagtagctgggactacaggcacacgctaccacgcccgtctaatttttgaatttttagtagagacggggtttcaccatgttggccaggctagtcttgaactcctgacctcaggtaatccgcctgccttggcctcccaaagtgctgggattacaggcatgagccaccgtgcccggccagatgaagatgttttttaagaaagagggagccttttcaggccaccagaagacagggacgccatgatccccttcccctgtggttcctgagccctttcctgtaaacagcattggaggtggcccacgcttccctcttgtaactgggtggaggccagcatgcggccagcagtacgtaggccccgccggggcccacaggatcctgtctctgcagcctggtgggtgggctgctctccccatccacatgtcatctgctccctgagcgcatctcactctagcagctccagcactgcaccgccagtgagctcaggccttccaatgagggcggagggagtgacccctggcgctgtcttctctggaaacaggagtgagcattaggaagcggtaggctggaggcctcaaggactggcagggtgtcacctgctgggatgggaagcccagggaccctgtggttccaggaagccatgtcaagggcagagggtggcccttttgccctgcctctactgggggcacccagggaaatccctccactgacccagaagggtgggcgggactgtgagtgggaggagttctggaacatctctgaacttctcgtccagaaaggggagatggcagcgtctggctcactgtacttctagggctgctggagggtcaggtgagatgatggacggaggagaggctcagagctaccgatttttcacacgcataggcacgggtgcacacaatacacgcaatatccacatacacacgtgtgcgtgcacacccacccaccctcggggtctcaggaaaccaggcaggggaaaaattaattctggtcttttttgatccctggaaaacactctttctctctttgcaaatggaaaattcttggttagtgataaagaaaactactccttgccccatgtggaattggcatggatttttttgtctttatctttttttttctttttctcttttttttttttttttgagacagagtcttgctctgtcacccaggctgaagtgcagtgacgcgatcttggctcactgcaacctccgcctcccgggttcaagctattctcctgcctcagccccacgagtagctgggattacaggtgtgtgctaccacgcccagctgatttttttttttttttttttgtatttttagtagagacggccaggctggtctcgaacccctgacctcaggtgatccacccaccccggcttccccaagtgccgggatgacaggtgtgagccaccaccacgcccagcctggatttcttttgacgtgggcctcctaggctttcattattgcagcgagagtcttcatttgaggggctcttgcctgcacctgtggccagcttgctcttccactgccgtcggggaaggcggccccgttcctgtgtggagagagaacatccgcctcgtcattgttcactgagagaatgtgagtggcaggcactgagcacttttcccaggtagcaggaggagctggggccacagggagtgggcttccacgcatcagggctcacagatgtgctgctcttggcgcctgcttttgtggcaagtgccttatgttggttctcttcagggcaagtggtcttcgccttctcacctgagccatcctggcccagccttgaggagccccctgaggtgagggtttccggcctctcccacccacccatcctctcctccaccccacccgtccttccctccaccccacccatccccccatcctccctccaccccacccatcccccctccacccaacccatcacccccctccaccccacccatcacccccctccacccacccatctgctccacattttccccagctcctcacctatttcagcagggagccccatggtggagaatcaggagtggctaggggagggaggaggagctggtccttctgtgttccgtccctggcttccggtgcccccagcaggctccctgagtggcatcttccagggagaggtctgggcagcttgctgatcccaggtgtgctgtgatcatttttcctttaagaacttaactcatgaaggcactttgcaaagaagagaaatggagtcctgcacgaggctgcagaaaatcgattttcgttccatgactctgctcacagctatccgtgtgtttattaaatcatccctctctgtgatggataccactttctctggggaaagagcagctggaacccaagcccggtggccctgcttgacccagtggccatgaccgtggctaagccacggacagtcacgtggactccgggcaagcacctggcgacggtgtaactggctgtgtactgcgtccgaggcagatgggccccagagtcccatcaagatccccggctcttcatgaagtcacacttggcaatatgcatgaggcaggcaaagaaacaggaccgtcagcagagtgaagagaagcgttactttatttacagtgtgtgcgtgtgggccttgctgtccatgggtagccgggtgcatgtctacgatgccagctcaccaggatacgtaggcctctcgttttttgccgtttatcatggtgagtgccgtcacctcttggtgaagactcttggcccttctggagttactaggtcctgtcactgatgagcttcagcagatctcctaggaacacatgttccactaatgattcagtgtgaatagtaataaaagttaagaggctgttggcccgggcatggtggctcacacctgtaatcccagcactttgggaggccaaggccggcagatcacgaggtcgagagatcaagaccatcccagccaacatggtgaaaccctgtctctactaaaaatacaaaaattagctgggcgtggtagcacgtgcctgtaatcccagctacttgggaggctgaggcaggagaatcacttgaacctgggaggcggaggttgcagtgagccgagattgtgccactgcactgcagcctggtgacagagtgagactccgtctcagtaaacaaacaaaaaaacaaaaaaccgtaagaggctgttaacttttgagtttcgtggcactcacgaagtgggtggtgaccctaggatcctgagggttatggcatacaaatctagccattttcctgtcaccttacattcctagaggaaggctcagcagagggtgtttgaaactgaaagatgagaggggcaggcctggggctgttcccaagtattaatgccccaagcctacacctttttaaaaaacaaaaatttttatttaatcaaagctatgtgttatatattagaggaaattttgagagactttgaccaaaaaagagcagccctccatcccagcctcctcacaccgccagaggcgccgctcagcctttcaggttgctgtgtctactgttttcttgttttttcctctctctctgtctctctcaatgctgttcttaatttctgaggtttagaaatgcatttgtacagcggaagagggaagctgagaattaggcttccttaccctgtggtcccagcacacggccatgccctcgtgcccggcccttccttctgaggctcctggggtggtgtgcctggacttgtcacctgggtggggctgtgtcagcgtcactgccgctgagtcaccacgtgcactgtgcctgtcatccctttctgggacagcatgtcactttccttggtgtcaccaatcatctcccttaggagtctgtgaaccacccactccctccctccccaccagacaggttaccggagcgggcgtgtctggaggagcaggcagagcaggtgctgtacacctcgtgtcctctgggacccatcccttctaggcccctcctcaggacaccccctcctgccgggctccccccaagcgcagcccccttcccaaacccacgtttgcctcactgtcttccttgtccggtagagcacacccctcagcacttctctgtgtgaatgagcctggcagggacctaccttgagatctacatgtctggataccgctgccttctggcctctctctggatggagggtggagggtggaggtggaagccacttcctcgcaggcttcgcgggaatttgctctcctctcttacagtgtccagcattgcttctgagagattcgctgccatgtgactctaggcctgtgtttgcaccttttcgttccttccccaacacctctgccctgagtgtggtggtgacatgtcttttcctcatcttgctggagcagtctgtgggaccctgcggtctgcaaaactcaaggttttcatctctaagatttttctgtgggaaatgtcctgagaattaaattccctgccatatttgtttccggagtacctactagaaggtgggcttcctggatagccccttatttccgaccttatctttgcattgctataaaggaacaccctggcctgggtaatttataaaggaaagaggtgtatttggctcagggtttagcaggctgtacgagcatggctgcagcatctgctcagcttctggggaggcttcaggaagcttttccttatggtgagaggcacggggagccggcgtgtcacgtggcgagagagggagcaagaggggaggggtgccacgctctttacaccaccagctctgtcctgaactaacagagcaagagctcactcactaccacagggaagggaccaagccattcgtgagggaaccacctccatgacccagatgcctcccaccaggccccactgccaacaccagctgtcacattccaccatgagattgagagggcatggacattcaaactgtatcactgtccttgtactcagcaagtgccacatgtaagaccttgctgtaacctcgtgcatccctggagggcagtgtcctcagccaggtggagtccgggttcttccagaaatgcagaaatggtgaacctgcctgctctgctgcagaaaccaagctcgttaatcggccagtagtgaacgttgcaccacctggttgagctgacgcttctgtgggcagcagaaggaaatatgagctctgcggctgctccagccacaggagtgttccccctgccccctgtgggctccatgtgatctgtgactccatgtgggggcaacaagccagcttctacccctgctgctggagcaagaagagtagatggcctctgcccatgcgatgggaccctggccacctggggaagcaagggcatgtcaaggccattcctgctgacagtgggggtcagagcctggcgttggtcatcttgcctcactctgcagtgacaggccccttctcagcagaagggagcatctgcccatcagtgcacagtgaccctggctctctcgcagaggcccctggggtctgcagcctccttgagagcgatcccacatgggagccagaagtgagtgcacagtcccggggcgcccgccccgtccaagcccagctgtgcttggggcttatcccagcctgtctgtggagccactcgagttcgtggcagcacctcccaaactctctgtgctgaaggccagtttagattttctcccagttcatttcagactgataaactttggtcaagtacggtaatggtggcatggcaagggtgcagtgtgcggccagtttcttagcacctccctcggtttctgcacatacatccttgagggccatgatcaaacaagctgtgagacgccagagccccggaccccagctttaggagcctacctttaggaccccacctttaggagcccccatttggtgctggaagagatggggtctgcctggattccccccgagtcttggtcgtcaggcctggcggttgcaccccatgttcctgagccctcttctggccccgtgccaccccgttcttctgggactgtcacaggagctggctctgcctgcccctactcctgcttccttccgatccaccttccagaatgcagccagagagagctttctagaatgtgcgcttgatcccttcatgcttctgcctgtagcccttcagcagccagctctgccgtgggaccatgggcacatgcccgctgctacctggctgcttacctgcccggccttagtccctgcaccgccccgccctgctgtctctggcctgcaacccaaactgactcctgcctccgaccccacaggacatgagctgcctccttgcctgggtcctgcttctccccagtgcgagtggcctttcttcctcttccctggccgtgttgggagtcctgtcctggctcctgacctctcattgtctgccacggttgctgtgccttgtcccgggggaggctgtgatggccccaccttgtacagcaggttgggaggtgcaggttcctgctcccacatcacgttggcttgaaggcgggctgtttgctggggatgcaggaaactcccgagtgtccgcggaaacgccatgtgatctaaatggcaccttgaaacataaactgagccattggatttcagttcgaaccagggccttgaactccctggggtggacatggagttcatttggagatttcagcctcgccgaagggctcacttggatgtgagctcatgacagaacggccaccaccgtctcagggagccaagtgtgctcattgagatatggaaaaaaaggaactccaaaaattgaagtaggcaaatgtttaggcgacgcctgtaaaatgtaacagcctatccacttcattcagtgttcaactttgtattcatataaactttggcatttgagcataaattgtggattagaatttgttttctcagcggttcccaagtgtgcacagggacatcttagaaaccatagccagttttcagttaaatgaattgcagctgataattccaaagcaaaactatacagctctttccatgtttttataaggaaaaatagacgtagtgtggagtctggctgcattttaatatgcttggggtggggcctctgaagtactggggacaaggactgagaggaacgtgagccaccctgcggaggcagccccagtaccagagcgggaggctgattccaaggatttgccagccccatgtgaaagggccgcctgtggggggtgctggttttgattttcactcccaatgccattgtgaaattctgggtgattccagctgtgcagcagagttgacatactgcttaagatgggactgtggcttttcgacattcgtttttaggactgtcgtctgtcccctgtgggaacttggcaggtcccttctgcctgggacttaccggcggctcctggaacccttgcctggagctctcccttgttggctgtcaggaaacaggagggccatggagctttggcggtgacacttgtggtgtggccctgtgcctgcgcgaggcagctttgccatacgtcatgccaatacttcattgatccagcagcggcttcaggctggcagcacgatcaacacggccccgggcatcctcgcgagctccaaacatccttccgtgggctgtctctctctctctctctccattccttccagagtagaaattctcttgactgggtgaaggttggcatttcaacctcaggacttaataccctttctcgtgggcctggagcaggtcccctgtgtccactccagttattccagaaggtgccctgcccatgcctccctcataagaaagctgcctgcctgtggggcagagggcaggggactttgctggcgtctcttcccttgcacgtttctgcctgtgaattagtcttgccattaaagaaaaaagttacacccccattcaaatcattaattgaaaagcccttattatcccattggtggtgtttgatatctaaggcagataaactcggagaagctcatccgctcagtccctgaagaaatgtgattacatcctgggtcttattaaaacatctccctctcagctgtcacattttcccactttgcagccttttcaggacacgcgaaagaatcttgtatggaaacaaatgacgccggcctgagggtgggccagggtggaaggaaggcgggttctgctggagcagcactggttggtagcccaccgcccctcgccagctcctggccaggacaggcctcactcagggctggatcagccagtgttgacaggcagcgaaacttggagagacagagtcacttttgtgtgcagctagggctgagagtgcctgagctttttatgtaaaccttgggtgtaaaaggaatcaaaaagcaactggcagcctgggagtgtcctgtgggaccctccctgccccacccacccacgaggctgcgtcctcttgtcaaatctggggtcagccagcttcactaccaaacccctggactttgtttgcagaaagaattcctcgtgctgtgtggctggcatcctttctgctcatgtcctgggtttctgatgtgacaaccgagcacccccaaattgagatggggggttcagcagggagacagcctccagggtcctctgcctggcagggcatgttgcaccacaggggaggctgatacagagtttccctgcccagctctcccggagccttggctgattccagcctgggctgtgcctttgcccaccacctccatgcctgaagggctggccacttacccgctccctcaggcctcagccagcctcatcgggacccctcttgcacctgtggccagactcagacccccgccccagtccccagctgggaaggggacactggctgtggctctgctgccgagtgtcttcctcagggataagcaggatggggcctcttccctgacaagagtggtgcagagcccacctgtgggcagccggccttcccagaaccccctggcaggccggcgcagggctcggcgctgcttcccgtcatcccagttaatcccacggtccttcgatgagggtctgcggtgggtccatttccttcttcgctgattccttcatttagcagccatgtatcaagcacgggtcctggaccaggtgacactctgggcatggaggtcccaggcattgtggcctggcagggaggatggagtgagagtgaaccagaaaataagcacaagcacagcctggggttcatgcgagaaggcagcagtcggggtagggggagaagtggggtggtcaacacttggtgccttgggcactgcagagagttccactcggggggcgcaggtgccagagccaggccctggattgatggcagtagtggggcatggcccaaggcaaggatgaggggcctcgaggccgggtcccacagggctggtagccatggtggggaggagttgaaggtgattctgcaatacttcggcttctaaatcgcccagagatcctggtgcctagattagtacttgttgaaggaatgaaagtcgaggggaagtgaccaaaaagctctaggcagggcgtgtgcggagagtgctgtgttcattcgcccagcgcttgttcactgagcacgcgccacgtgccaggaccacccggacacacgtggtgaggtcactgtggagtgctgtgttcattcgcccagcgcttgttcactgagcacgtgccatgtgccaggaccacccggacacacgtggtgaggtcactgtggccgagtagatgggccagggacaccggttgaggaggcagtgctagttgctcgggtaggagtttgcagattccagggagagggcagtggaaaaggaaaggaatgagtggctgaggttcctagaacctcacgtacggagggaagtgaggcacgatggtgtggaaggccttggatactcgggggccaaggcccaggctccctccaccacgtcccctgaggcctcccagtgccagctgcggtgggggcccttgcccactgtctgcccatctgccttcttcagcctcctaggagcagtgagggtcctggcccccgccccaggtccccacagcccctttggtggacttggctacttggcgttggccccaggattcagccggtctccccccaacctcaagatcctggggctggctaccactgacctgggtggtctctcctacagcacccagctccacgcttcgaccaaagctgtaggacgttgggaggagtaggttggttgtcctcagtttgtgtgtgaaataacagtgtaaatgtggggtgtaaaatgccctggcatccagccttcctgagggaggcttgtttcagtgatggccagacccggggacgggggaccaggaggtgaggctgtggacccagttccttggagccaaccctgggccatgtggcaccaagagcccgggcaatcaggggtcctgggcttgagccccctcgtccctagggattctgagtggcctttcagcactcacccaccctgagcttgtgcatgccccgtgggaccaggactgctgaggtgagcaaggacagtggacgtcactgcctgtgcccccaggacacctgtggccctcagagcgggagctgcctcatcaggacccctcttgcaccctgttgcatcggtagggtggtggcagatgtgtactcgccccctctccagagcccccagacctgtcccggtgtcccatctcacggtaggtctcctcccagtcgccccggggctgtgggtgtcgccagcccatgctgtgcaggtggcgagtgtgagcaaacctggtcccgggccctggctacgtcttcactcggcgcgggcaaagaagaaagtaaaataagataaaaagaagaaagtggaagctcttgaggaggtcttcgtgccgtctcgtgatccacttccagtccaggaagccctggatctgtacggtgtgttcatttcgttaccctaattagtttgaggattttcagggcaaacatggtaggatttctcagttcaactttggggtgtttgttttttgagataaagcacacagaagaagttgcattgatcttttaattcctcatgcaaagaaaaaatatttgctcttctctgatttagtgtgtctgattctcactgaggctggagggggtggtggggtccagtcagagtggacactggagcatggtggcgtcccggccctgtcatcactgccccctcactgcccaaagaggggacatgtactgccccttagcgaggagccgaggacatcctgcacctccctgcacccctgctttccttctcccttggggcagctttcctaggtctccctgactgcaggggtgctggatacctctgcccaaagccccacattctgtgccccttggagccctgaagctgcccctgcccctagcagcctctccaccactgtccctgcaggcctgcctagccagcttcaccggccacactgggctacacccaagcctggcccctgaagcaggcggtatcttcatggctgcttaccactggggaagaagggtgggcgcaagtgggaaaatcgtcatgaaaatgggcctcccacgaggttggagtgaggagtgtggggtccctgccagtggggagtcgggagtggagagtagggagtggggagtggggagcggggagccgggagtggggagtgggaaggaaactgtctcagacaggaagtttgcatctctgaaaggggctggccctgccttcgcctccctcttcagggctcagcatctccatccgtgtgatgttactggcaccccctctcagagttgttgcaaatgccggagaaacacaggtgctctgtggagtgtcatcgtcagtgccactgtcacctaataggattcctagtccccctggcgtccagaggctccggcactcatggagataccttgtgagccgcagtcctcgtgggatcgtccaggtagcggcacctcacagctgtctcacggcccatcactttgtcgaggaagaagtggccagagctactgtttataaaagcgacagcatctgtgccccagcctctttgcagtgtgctctgtgcccccagctaaggatgcacagaccccaccccaaggcactttcggcctctgggggacagggaggaccgtggacagtgatggacctgcaggctggggaggagcgagcagtaggacacacagaccccaccccaaggtgctcttggcctctgggggacagggagggccgtggacagtgatgacctgcaggctggggagaagcgagcagtatgtccttctggagaagtgaagctgtgtgtcccggcacagcttcccagccagcctccctagtgaaccttgcctcttccctcccctgagctgtaggaggcaggttttggcaaaggccgtccttggagagcccccttggtgggtcttagggtgtttgccaaatctgcgtgctttgcaattgacaagcatcttagtctctccgggctggtataacaaaatagcatagatggtgggcttagaaacagcagtcatttatttctcagatctaggggcggggaggccataatcaaggcaccggcagacccggcatctggtgagggcccgctcctggttcatagacagcaccctctgccatgtcctcacacggtggaacagggaggggcctctcggcgtctccttcatagaggaaccaatcccttccccgagggctcccgctcatggccaatcacttcccaaagaccccgcttcctaatactaccaccttggcgtgaggattttaaccgatggattgggggaaacacaaacgttccagccgtagcacgttatttggccgaaacccagaataccaggaggccagccctcgctctgcagccgtctcccctgagggcccagcctggattcaggccttttggcttggccaaagcccttctgagtcccaccctgagcctttgcgggagggtgacgtcatgtgctttattgctttgtttatgtgcttcagtcaccgttccgctcctgcagcgaccagtcaggcacagaacactgaggccgccaaagactggcccttggttccagttgcccgcacggaactgtgtgtctggggcccagttgctgaggaagtacctcagaggacaccgctgacacaagccacaggtgctgacgtggccgcacctcccagggctccttagcaggtgtgcacctcgagacaggtgttcacccaaacatgagccgtggagggctccctgctgggtaggcccggggtctgcattgtcaggggctggtcggggcggcctcaaaggggctctggtctccacccagctcctgcgttccctcctgtacattgagcagagcacctccagggggctttgggtcggctccccctcctgtgttctcatgagaggctgctggagcgtggcccactgggacaggagagggaccgccattcctgggtgagtctaggacactcaccttccaagccccctgcttccagccacttaggaggaggcgcggtgtcctggccggggaggttgtgagtgtctgcccagggcgcctgggctgagctgcgctcgctaagacccaagttcaggagtggcggcaggagaagccccgctctcactgcctcaccgccctgcttatgtctccagataatcccgttgtaataaacttaattcctgccagtccgtgagaaccagcctgtggacctgttgcgaagtccacatcatgtgactgctcctattacactgtcagtcttgattaagatcccactctgaaatgtcaagctgtggtcttgtctgcgctccctgattcattcatatctttttataatcattatcagatgacacctctgtcactttggagatgtgtagctaggagcactggtgacacccacagtgaagcccagcaatttttgaagtgatttctcctcattgggagccacagacctaatgttgagcaaaaactgagctgtgtgtatttagaaatcaattgaaaacatcacattgctcaggctctgaatgcgcgtgctgagtctgcctattcttctcggtggcccaggctgctccgcttattttaagatagagctcatcggttgtgaaaatgctactgtgggccgggcgtggtggctcacgcctgtaatcccagcactttgggaggctgaggtgggcggatcacgaggtcaggagatcgagaccacagtgaaaccccgtctctactaaaaatacaaaaaattagccgggtgtggtggcgggcacctgtagtcccagctactggggaggctgaggcaggagaatggtgtgaacccaggaggcagaacttgcattgagatcgtgccactgcactccagcctgggtgacagagtgagactctgtctcaaaaaaaaaaaaaaaagaaagaaagaaagaaagaaaatgctactgtgtggcacccatttcaggagacaaggctcgtttatccggaagctggccttgcttggcagccagccaggcctgcaggggatgcctgcccctgcctttgctccttctgcaggccctgaaagcctggccctggcggcttgggcctgggggttgtccctggggctcagttgctgccctggcttctgcagcctgtgagcattccccatgctggggcggcttatcacaaagtgcaacttgcccctaccccaaaaaaacctgcctcccacaatcggcagcacacagccttgggcaggtgctggagttggaagggtctggcatacagactccggagccctgactctaggaccgctctggcttgttagcatgtatgttagtccattttcatactgctttaaagaaatacccgagactgggtaatttataaagaaaaagaggtttaatgaactcacagttccacatggctggggaggcctcataaacatggaggacggcgaaggaggagcaaagtcacatgttacatggtagcaggcaagcgagcatgtgcagggttactgccctttataaaaccatcagatctcgtgagacttactgtcacggggacagcctgggaaagacccacctccatgattcagtgacctcctgccgggcccctcccatgacatgtggggattgtgggagctacaattcaagatgagatttgggtggggacacagccaaaccatattagcctgcaaccttgatcaggtcactctgtccttcctcgcccagtcccagaagcagacaggttcccatcggtagtcctgagagttgccaccttgctttttgccttccccttacgcacgcatttataatcctcggaccagctctcccacagagggcagttgtccccagatcagagctgaacttgcttggagccacacagctggtatgtggcactgtgagtggaacccagggcagccgactccacgtctgggcttccagcttcgtcggctgccctgactttcctccatgtcttccggaaggccctcccaactgcctcactctgaagcagggcaccatgattctgtaaggaaatgagatttgagccacacgcctgtttgtgccacacacctgctctttcctacgttgcttgtagtgttttcccagaaaggtgggaagaaggaagaagggaaggagagaaggagggagagaacaaagaaggaaatgacgtggataatatcttaaacactacagttttttaatatcaaattccactagttccaaaatagaacttagctggataatattctgagttgtggctggaatttctgttctaccaaatggttgtctggcatgaaacgtatttggatttttatggatcaattttatcagtaacagtgctagttggacataagcaacatcagcctcctgtgtgctgggcccactagtaggcactgagaattcttcccacatctgccacagctctggcccctgtggctctttgccaaggtcagctcctcataggactagctccctccaggttcccagtaggaagatgggacctgtggagcctactttcaagcctaccccagaagctgtttactttcccatccatccacccacacacccatccattcacccacccacccattcacccaccaacccatccatccattcacccacccacccacccactcatccaccccatccacccacccattcttccatccatccatccacccacccatccattcattcagccacccacccatccatccacccacccacccattcttccatccatccgcccacccattcttccatccatcctgccacccacccatccattcacccacccacccacccatccattcacccacccacccacccatccattcacccgcccacccacccatcccttcacccactatgcatccatccacctacccatccatccacctacccatccatccacccacccacccatctatccacctacccattcacccacccatccatccacccatcatccatccatctgcacatccatccattcacctgcccaccatccatccatccatccatccatctactcacccacctatctacccacccacccccatccatctacccatcccccattcatgtatccacccacccaccccatccatttatccacacatatgtataccacccaccccccattcatccttctatccacccacccacccactcatccatccatcctcctaccctcccatccacccatccattcatccacccatccatccatccacccatccacccacccacccgaccacccaccattcagcatttatttggacacatactctgttgctctcagtcaagcactgtggagttctgagcctttgccctcagaggaggcagactctggtcctgtgagggcctgctggaatcatgcacaggccttgaaggtgactgcctggtggagacattaagaaccacccaactccccagaggaaggtactgggaagagagtaccccacctaagccttggcctcaaaaggaccttttctcctggaagcccccgtctctctctctcccagaaggggaatcatccaggtggatcggtaccctggagccacccctgtccccacctctgcccttaagagtttgagccagactcagtggagcagactctgaggtctacaaatcgacggagacctgacagcaacttttgtgcctgtaagtccataaatctctggcctgagtacttggcagtgaccctttaacattcctgaaaacaaagaaaaggtgtcccaatagcagaggatttgcagccaggattttactggaattaggaagtagaagccctgccgcgctggctagctaatgagttttgaaccgcttccaggaataagtgtgagtttagaatatcaccatcagtgcagtggccctacaccttccggggaatggtgctccacctggaatgatacttaggcactgcctcacgtgcagaaagcctgtgactgaacaacagaaactgggtcctgggaaatgcagagttctttccagtgggcagccctgcctgcagggtcccctgagctctctgatggacacccagctgaccctaagctctctgacgggtgcctagtagctctgcatgcatcgcgtgtacccagctgagctgttgatgctccaaggtcctgtcagaggcagctgtttgagcattggtccctggagttgccagaggtgcatgaggagggctgggcccggaggtgaaggttgacaactacagccctccgcttctcctgcagagatagaaacaccggaaacacgtggagaggtgtgcacttacggcaggcccgctgccttcttctgctccagcatcctgtgtcctgctgggctggccgtggtgcctggccacactccgaatcaagcctttagttggtgatgtccaaaggcccctcctccagcactctgcacccctggttcagcccgatgtccctagacggtgtcaggggatcctgtacctgaagacatgggagacaaaccattcccaaacaccagggaaagggtgtcccaaaatatcactgtctctctagagaaaggaacccctgcacacaccccacctgagccaccgtgctcacttctcatcgctgtcagagccgtgcacttgggctgccaagacctgtgaggaccagcgggtttctagtggccgcagccgcccgtttccctttccagagctcctctctcccagaggacggcgtccaaccggaaaggtcctttgtgtttggaaagggcccttttctggcacaggctacagcataaagatgaagaagtgagaccacttctaccatactccagaacccaccagccccactttggggggccctgaggccttgggtcgccacgcaaggcggtctgtgtgactgcaccagcgtccctccttggcccctgtgcttactgagcccctgtctgcctggcgtgcacacagtatacaagcacatacgcgcatgcacttagggcacactcaggggctctccagagtcagtgcccaccacctggaggcgcgtcggtgttactgtctccagtcagcactggcgggacttcacgggtgcagcccgtgaaggtgcctgctggctgagatcctgggactgggtgcagcccgtgaaggtgcctgctggctgagatcctgggactgggtgcagcccgtgaaggtgcctgctggctgagatcctgggactgggtgcagcccgtgaaggtgcctgctggctgagatcctgggactgggtgcagcccgtgaaggtgcctgctggctgagatcctgggactgggtgcagcccgtgaaggtgcctgctggctgagatcctgggtcttggggtctggaggcggctgagccgtttggtgccgctggaccagagccatgtagatgttgactgtaatcggaactaccttggtaatggtggcagacgttaataagcgcgcaccacgtgccggctgcagcgtttttctgtgcatctccccttattctcacagcagcctggcaagggcagggctgttcacacctgtttacatctggggcaggtgaggtgccaggaggtggatgacctagacctagccctggatccccacctgcgtcttctgccaaaggttggcccaggtggattgggaaggtgctggttcctctgtggagaggctcggcgtcatcctttacgtgcccaggtgactgccagggccattttctcaggtagtgacccgtctggctggtgttggagggagtcgagagggccgctgctctgtggaaggaggaccctgagtggagaggtcctcggcccagagtccttcttagccagcacctttgacctcttaggactgtcatcacaggtgtggtgacaaccagaaatgccccaactgagaatcattgactgagggtcactagcctgaaagattgaattgcctttaagacatgatattacaaaagcatcgtcatatgaagtggtgatcaaataatacgcagccagaaggcagggaaagggctgtcctggaggcatgctaggcagttcgttaggagaggtattcttgttttagagttttttatgtttatggtatttgccagcttttaaatttcatagtttgttctgatttttttctaagtaagcacctacctgcactcccagttttgaactcaggtcttacgttctttttctttctaagagaaggtttccacattgtgtaaccttcagggcttacacagcctgggtcggcctcagcccatttgagagtcagcggagtggattatctgaaaagtaggggttgactaggaggccacggtgtggggacgcactggattgctggcctgtcccatgctgttccttaaagcaggggttgactgggggctgcggcacggggatgcactggattgctggcctgttccgtgctgtcccttaaagcaggggttgaccaggaggccatggcgcagagatgcactggattgctggcctgtcccgtgctgttccttaaagcaggggttgactgggggccgcggcgcggggatgtgctggattgctggtctgtttgtgctgtcccttaaaacaggggttgactgggggccgcggcgcggggacgcactggattgctggcctgttccctgccgtccctttcacccagggctcctcgctgtgttctcgtgctgctggcttgcctgataacctccaaacccgttcacgctagtccttgggtggaattgttaaaagggttgatgaactctctctctccccagctcagagtcctgccatcaggttgaagcctttgattacagttgctagatagaattgatgaagagacagcagaagagacgttagaaaaaaatctataagctttattcccgaagagagaaagcccagacccgtggctcctttgggccaggccaagaaagcattggcaactgttatctctaatgtcctcaccacccatggcacaactcaatctccaccccaggcagccggcaccgatgccgctctgtaatcatccagagataatcaaattggattagctttcagagtgggctgcaggaattgatttagactgtgttacaggacaggcagcgagatggttcttcctgatatgtggtccatgactcggtggccctttcttgatggggcggtgggaaggctttgcctgccgggacacaggaggtctcctcatctggaggatgggacgccagggctgggggatcttcccacagaccttgttccctcctctgtcgtctagctgcagaggcggctctgacacaggtcaagaggctaggagagggctgtctgcccacccggaaacctccacccttttggatgacacacattcattcattaattcacccgttcatttgaaaaataccacagcccaccggctggcccatgagagtggcagttacatggagattgcactgacatggttggggagagtgggaagacacagcgtcaggtgagagggaagggccgctgcgcagaaggaaggcagccagccgcccagcctgagtccagaagggcgagggaggagcagcggctccagccaggtcaggcctcggcgggtggcgggcactgtccatcacggggccaacaaggagacaagggagggctccgccacctgcagagggctaaggagcaatactaaaccaactcggagtcggtctgcttttgctataatcagttgccaagcacaggcaatgccagagattaaatattcctccccgtaaaaggtgttttgttctcgtaaaaaccatttctgtgactcctgttaccttttaataacagatgtgtaaggctcaagtgggtgtgttttgctgacttgaccttgagtggatcctgctgccggcctggtatatagcatgtggtggtctgtcggagggctccccagggggctgcggtcctccaacacacacacgttctgcacccacctcctgggacatcgtgaggacccaggggtcacacatagtgccctcagagaggccttggggcataggtgcgccctgctgtttccatccgggctgcatttggccttcttccatccatacgttggtcgcacacagagcatttgcgtttctggcagttctgatgtggtgggacagggccgggctgggagtgagccccgccgcagggctcctggtctgtccttaagggtaggagcgggtccagcagtgagcacaggtggcctggctgcactgtctgcggggagctgtgcccagtggccaggagggaggatgggactcagagccagcggggagctaggctgtcggtcctgggcagaggccggaggcccagcctggggaaggatgggaagtggaggccactgagggcttggcatgaagctgggaccctctagtctgtgaggctgtgctgctcctgggagggctggggaagctccccaccaggctcctccttcctcctaggacagtgccagggaagagactctcacaggcccttgatcccagaggtgcctcagggtgggatggagaccagagtcaaagcacaaaacaaagctggtctgaactgatgaaaaatgaagcatctcaacagaggcaaaataaattttagaaaaccagccccgagaggccaccaccccatcggacaggtgggattcccgtggataaagtgcccccggcaggtgtgctcctgccatagtgacaacgtctggggaaaacctgtcacagagagaggcacctcccaacacagggacctctgcagccgctggacgaggaattccagagaaacccaaaagatgtaaaaaaaaaaaaaaacagaagcagagaagagagactatatggcacgagaaaagaacagttggattttaaaaatagaaatcctaaaaaggaggatgtgcctaagagagtttggtgatcttggttgagagaacaaatgcccactcggaatcgcttgagaccctggagttgggtgcgtctcaagggcctgaacagagtcccctccctggagtccctcccccggggttcctttcctggggtccctctctcttgggctcctctcctggggcccttctcccaggattcctctcctggggtccctccctcccctgggttcctctcctggggtccgttcctctcctggggtccctccctcccctgagttcctctcctggggtccctccctcccctgggtcctctcctggggtccctccctcctctgggttcttctcctggggtccctctctcccctgggttcctctcctggggtctttcacttggggatttctcttgcagtgcctgcctgtgcttcagggacccagtacctgacccagccttgccacctcctggctgtgctcccgcctagccacagcttcccatgtgtcccttcatgcaggttctagggggccacggcttcccatgtgtcccttcatgccggttctagggggccacggcttcccatgtgtcccttcatgcaggttatgggtgtgagtggacgagtaggcagagataagggagagagtaagtgtgggagtggaggaaggaagctggcatttgtcactggccgccgagtgattggtgcccgttgttggtccagtcccctggggctggggtcacatggctcgggggcccttccagagctgcagtcagggctggaccgcagatgtgtccgtgacatgtcgtggttgggggacaggctctgctggcctgtggaggtgagctcacggcccggcggcggcaggaatcacggacgctcacatctgctccgtggcatcctgtgcggcctccatttatttccctcaaatggctttcaaaaccttctaaaaataggagcttaatgagacgtttagcaaaatgccacacagtatttatccctgcacttggctgcattgttagttcttccaaagaaaaagctctcccgtgtatacagcgtgccacccccacggccacaggccaggctggctgccgagaaggctggaggaggtgggcgggacagagttgtgatgggaccactcccccgcccaggtgggcagctttgtgaggactagtggggaagggacacgaccaaggccaccagccctgccccgggagctcacagaggccggaaggatggcagagccggcagggctgcagggaggtacccgcagtggcgagtcagggaggaaggttctggaagaaggggctggcactggggccgagatggctgaggctcttgggtttttagaggcttgttctttggaggatgtgatgtcctcttgggaaggtttcctgatgatgtgtcttactcgttgtggactggggtgattgtcacctccaccttaatgggatgccttgggccttttggcctagccctcatctctggtctctctggggtatgaatcccatcctcagcctcagatgaaccccttcagagaggaggggcctcctctcccatagcagaaaccccacagcactgactcctcaggggcagcggggctgggcctgtgcaccaggagcagatgggccaggggctgggattagcccctctggtcttactgttcctgtctataaaatgagtggactgcatttctccaagcctgttagagtccatgaggaaaggatagcgaagggccccacgcggcacggggcacagtcactggtgcactgtaaacgcccctgagatcagtggcagccacagtccggagcaccgccacgcccattcaggcaaagcaggaaccaaatactgccaaccagaagtcagatttggagggcactggggagtgggcggccctcctggctgcactcacagtggggtggcgagggctccaggcagcttggagccggcctctgaggccccccgagttcatcttttggacatctcaaaagtccgcaaacacgtgacccaggactcaccctgtgtgctcccatctctgctccaggagtgtcccagttccgtctagaacagctctcgagcccgcgtacacctgaggcggtctgggtggccgggcttgctgggtggcaccggagtccctgtgccacggtacttctgccgagccgcctctgcacctgggtgcctgggccttctcgccgagctgtctgctcgttggcttgcccacttgtgggccacaagcacgtgtgccacagctccacaagagcctggcatgggctggtgggctgcagcgctagctcaaggccagtacgcggtctccccagcccccttctgagccagacccttctctgtgggtcaccaagtgccccactcccacccccagcatcgtcccctgcacccacggggctcccgtgcgtgtgaccctcccttgggaccagatagctagagacctccgcccccaccaccctgctgaatgatggtgccattctcttccttccgtgggaactctgtggccctcacgtggcgtgcatgtggctgtgtggccagcacagaggccttgtgcttctgcctcaggcacctggcgtgactgatggccttgctcttcctgctgtgatgctggggccatggggtctcagagaggatgtgggatccgctgtggcccctcagaggctgaggggcctgtgagctgcgtggggagcaacccgctccgcttaaaggaaagggacctagacctgctgggttcgtgcagattcctgcgagcctggctgtgcgggcccagagcctcaccagactgttgatctgaacacacttttaaacgctgcgtggtgtggggttctgtgtgacactcagcgcccacccgtgtactctccaccttcccgggtgaggcaggccagcggcttcccggcgcactcacgcagaaccgacctttccagatcgcagccccactgcatgccttcctcctgccctcccaggcagcagaaaaatcaatgtgagaacgcagacttgaacaactcgggaaattgaataattttcacaatgtatattacaaggaaaaagatcattttgctagtgaatctatgaaatcaacttgaaaatcaatattgctacatgtttaaaggtagccttggaagcttggtccatggctgggagaggctctggtacctgggctccctcgtggcccctctccagggggcctcactgggggtcctgagcactgggctgtgctggctgctgagccagggcttcttcctgtggggctcagggaggttccatgagtcatttcccctgaagctctttcagacctgtgtggtcaccagtgaccttactctcctggaagccctgcgtctgctctggggttgaagaagacccctgggggaacggagagcataaagccaccatgccggcctgtcgggaaagagcagcgtcacccaggggacggggaggaccccttcgcggtgtggacgtggcagtgcagcccagtgacctgcacttttcaagctgatggggccagcaatgtcacctctggggtctcagcttctgaagatagaagggcccactgcagagggccgtgtgcataggagcgtgtgcggccgtggtctgggccttactctgctggtggcagcccgtgtgagggttcctctgggctgtctgcctgcctggacctcacccactctcctgcgtgtatctgactagaacccggtcctagggctccacggttctctttttattctgaagacctattgcttcctggttaagtgctctgagataaattgttactaatgttgggaagcagatctttttgtcctcaggttgggttgaccaatacaaggttatatctctcagtcatgcgttcaaaacaatgggttcaaaaatccagactgggtcagcgcagtggattcctcttccctgggtgagaaaccaccgcagcctcctacggggttccccccctggcccctgggggcaccgtgtcagatcagcgcaagctcagggtccccaggccgaagtgggttcctcctctgcttgtggctggcgggcgtcggtggctggtcatggcatctcagctgctccccgcttccatgggatggtgacccctcagcccacaggcacattcactagagagtttctggccggccacaaccccccacgtagctggtcctgacgaggctgtcgcagttgcgctctctgtcgcttctaagtcccaaagccacacttagggccactcttggtggctctccttgcttatgagatggaactagtatttactgagtgtgcttggcccatttatatttgtcatctcatttaactctcgtgatgagaaaggtggcgttttcccattttacaggcccgggcacggggcctctgagagagaaagcatcggccgtggcggcagagcagaggagggacggggtccagatgtctgtgacccttcgggggagacgcaggatgccagggtgggtcacgggaagcttgctggaagggagaccccctgagagcgttagctgtgggagaaaagcactcgggctaattggaacgaggattgactgaataggacaagaaaaggaaaaaaaaaatcacagccgatttcattctgatattaaaggaggtccgaggcaggcagttccaggctggaacagcagcctcggtgctttcagaaacacagtttcctttctgtcttctctgctgtctgtggcttccattctcagaggcacctcgtggcctgagatggctgctgaaactccagccattgcatccatagtccagcctggcagcaggaggataaaaggcacctttccctgccaagacagcttcctctataagcttctcctgaattccacccactgcttccaaatgcagctcacgttcatgaactgagtcatgtggtcatatctgacttcaagggagcccgggaaatgcagtattttagcagggcttgtgcctcctttcatgaagaaaattaaagttctgttcctaaagacggggagggtggctgaatggctgttgagtggtacttggcagcccctgccatggtgctccaagcagaggaaacagcatgggcggtgacccaggggccaggagaggctgcaggcagaaaggcgtgagagaagggggcccggtctgcctgggggaggtgggttcgagggggaaagaggtaaggaggcggccatgcaggtggacgggcaagggaaaagggaggagctgtggccgtcgtgcaagcgaaagatgagagataccacccaggagtgagccgggaagcaggtgcgtttgcaggatgcctaggaggtgtgcctagaacccgcagggtgtggtgacagattgcaatggctgggggagggggcacagggcaaggtcagagaagaaggagaagaaactggggacgatgtctgcatttgtttattgggtgactggccgagtgctgtcgccagagatcaaggtaaagacccacaagggcaaaggcagcttgacaggggtgacgatgagtcccgtgtggaggcggggagtggacagagcctgtgggaggtccggggacactggactggcctgtggctctgaaggtccgcagaagtcactcttgggcatgggagggtgggcagagagtaggaggaggtgtgagtggctgtgagagagtaggaggagatgtgagtagctgtgactgcgagtggatgaggagggccaggaagagggcgcgtggctggcgggagcaggggagctccgggacctcctgggcctccagcactgtctccaggccatgacttctccttcctgctgttgaggaacagacatgtccccggagcagggcggtcctgtgtgcccctgtcaccctcccctccagcccacctcctcacactctgcgcttttgagagctgttcctagtgtcctggtatggccctgccacgcgctgagtgagtctgagccatgagtgacctgctcaccctctgagctctgtgtcgtgacgtttggcttggtttcatctctgactgaccgtagctgcagcctttacttgtcacgcgcgggacactgtcatggcctggaaatgcccccccgcttgaaattacgactctttgactgcagttttcccccttccttaaacatcacctagtatggggctggcaatgtgcagacactgtccatcccagccccaaacccgacagcgtgccaggctggctccctgaagccctcaggaagctgggggaccccagcagtgcctgtcctgtcagcctgccctggagcaggtagcggttgcctttagcaggcaatgtgcccggagctgtccgagttcagacggcagctctgttaggcagggagtgatggcggctgctctgggacatgtgcccaaggtccgggatgccagaaacacagcccacacggctgctcttcccctccccactctcagcggccccctcctggtgatttctgctttaggagcagaagcagcctggcagacctggccttgtcctctggcgttttcactcgggatcgctgtgggaagagccttgtagataagcacctgactgagggtgcctcctctagaagtgggcgtccttccctgctgcccgctgggcatttcttgagcggcatctccagggatgacgtggccacagcatcttggccccaaacaccgcaaggcaggaagtcttcacgggctgaaaaagacgaagggctgcgccaggatttgcagtgtcctctgtgtgttgatcagaagtctcagccgtgtgcctagggatgaaatggaagggcagcgtgatggggacgctccatgccgagcccatgttttcagcactgaaaggcgcttttctctttagaattccttttttggaaaaaaaaaaaatgaaatgaattacaaggacagtatacatcgctgtgccatgagagactcctcggaaggcggatgtattgaggtgtcaccttcccagggctgtcctcccggcgggctggccagctctggcagctgccaccctgtcccggctggctgtcactgtctttttatttttagccctggtttggtccagaacgtcacaagattttcaaactaataactggattgtcaaagaaatcggctatcagagcctgcactccgggctcccaggatggtctgggagtgggagagagggagggaggtgggagccgccctggggatgcccggccactgtggaccagtgaccatgttgggcagatggttgcatcgtcactgacagaactcaaaggcatgagggccggcgaggacgcgtaacacttgacatcacagcagcctgcaaaggggcaaaggaagcccctcttcccagacaccacggccgttctcccacggtctcctgtgctcacaagacagaggatgggctggcgccagcgcagacccccacccgagtgcccaccctcaggggcggtggtgcggacgggcgcagcctgacctttctgtgcggagctaccttcttgtcttctgtgtatcaggtggtattctgtattctttgatctcctagttaaaagggcactgagtgtgatagaaaggttaaaaataaggtaaataaggatgaacttttcataggcagttttcctaccaggacctctacggccctcctacgtctgtggtgtgtgcccagcgtcgtgttatgtgtgacaccgggttcatcaagtgcctcccactcagcccctccccctgctggtgagccccctccccacgtggagtttcctgtcctcccagatggctgaaggcagggcttcttatctcttggagaagctggtcagtgttgaccgcccacagaaaacccataccccatggtttcacaggctctgcggaaggtgacaggtagtgtctgggctgggaccaatcaggggctggactatctgacagcagttcaggctcctggcttccacgtgaagatgtcattctaagtttcagggccaagtagggacacatttagtggggacagcccctgtaaccctctccgagagacagggttgtatggtagtcaggtccagtggctcgagagggcagccctgctgatgggggaggcggcagccctgccacgggccggctgcttgaccctgagctgtcgctaggcttcttgagcggccgtctcctccctcggacatggtgggtgtggaggacacctcacagttgttagatcgatgcctagcttgaggctggccggagtgaacaccaggatgggcagcctcacagaggcgaccagaagagggacctggggcaggctggggaggtgagggtgggcctgaggctgtcagaactcccctccctgcacccttctcctgtccactcctgggggtgtccctctctaccctcacagcacagtctccctccccgggctgggtcacactgtcacctgatggatccgtgtaagtgcacttgcctgcgtagccatccggcagccctccccttctccggcccctcagctgctacccgggagccactgctgcccgcgccgaccacccgatgctcagcagggtctgcatgctgcacccatttgccgtctccttctgtcgtcctggccacagccccatggtcttcagtcccatgaaccttggaggcttccaaggcaccgggctgcttgtgcatcagtgtgggttgcacctggtaccattcccatccagagggacagatgtcagcactgggccctatggaggggcagtggccaggcactgggtgcccccggtgtgcaggtgatgcaggatgcagagtggccatctgggggtgcaaggcgcctcctgtgggggtgattcgtctccttgcagtgctcctgtgttggctcttttcacgtaggaattatttcagcatctgggagagcagcatgcagagtcaccgtggcacacgtgctgtagtccgcggctcctcccacctggagagagaaaccactccgggcatgtgaagccctgtgggacagagctgcactatcctgcacctctcagccgctttcccgatctctttttggtgttcgtgattcaagttcgtgactgcagactctgacaccgcacacgttatctctcattatttggcggcttggaacttgtgtgtttgtggtgtgtgcacgtgtccgtctagatgaactgaagctgtggctggggtctgctgtaggtgtccttgccgctgcacgggccaggatgtggttctcccaccttgcctacccattctgcacctggcctcgcaggacggcgggtgcgctgtggtggcccttcccacacgtgcgtcccatggctcctcgcttcagagcgtgccgtcgtgagctccgtgtggccgtgcagttgccctttccggttctggttccacagctcgctgaccctcgctccgagtctgctggtgaggcggtgtggctcagctcccagcctcaccttctcttcccaagggctgggtagggccggtgcccagatggtggcccaggacagtggggatctgtctggaggcccagctgtgagttgggggcatctatacaagtcacccaccccccaagccctcattctttctttactgagatgccagttacccctgccatgctgggtgtgaggcaggggtaactgggggactccaggcaggtgctcggtggctggatgggcgtcgtggctcttaactgggtcttccctgtgctgcccgtcaccctccagccggcaggcgtgcctgggcttcccctacggccatccttgcacccccacccctgcatctgtgagggcgcgtctcacccagcaccacggccttccaggacgccgcagctccaggagtcaggctgaggctctggctcgtgtgggttctgcacccagcccctccctgacctggggtccagtatggcctcgaccagcactcagcgtttgcatgcttctgcagttgacatactagaaacttagcaggatcagctctacgtgacccagacgcttaagcacattgagagctgcaacaataaagtgcttaagaaagtcccaggtagaggagtttgtaaaggagggttctttagcactgtcattcgtcttggatgagagtggagcacttcttcttaggaacacaaaaaaagaagaaaggggagaggagaggcactgagggcggagagaggcagcagtcctgggtagggggcagttccccccccaatctgaaaagccctgggatacccagccccgacaggttcttcacacatggatcacggcccaccctctgcacagccccgtgggcaggctgtgcccgccctcccagtcctgtgtgtgggaggagggccgggagcccaactgccagacccagcatggggcctctgctgcgtcctgctcaggaccccctgcagaggacacaccacacagctctggtttcttcggccaggtggcccgtcctgtggaagggacagggcagcggagcctcacatctcaggaagatagcatcattggtgtcaccatcctgcctcagccagaggcacctgcacagggtcccgcagccaccagccagggcaggacctgcgtccagaaaggaggcaaggcaggcgcaggtcccctccccaggccacacacacacacaccacagttaccacataaatacacatcacatgcactcaccatgtacacacacacacaccatgtatacacagacaccacacacaacacacaccatgtatgcacacagataacacctcaccatatatacacacacacacaccatgtatacacacacaccatgtatacacagacaccacacacaacacacaccatgtatacacacagataacacctcaccatatatacacacacacaccagttactgtgtacacacatcacacacaccatgtgtgcggatactacacacacaacacacaccacgcacacacaccatacaccatgtatgcacacagacaccacacacaaaatataccatgtatgcacgcagacaacacacaccatgtatacacacactacacaccccacacacaccatgtatacatacacacacatgtatacacacacaccatgtattcacacaaagcacatacactcatgtatacacacagacacaccacacaccacactctcaccatgtatacacacagacaccatacaaacacacagcatgtatacacacagacaccacacccacatgccatgtaaacacacagacaacacatacacgacatgcatactcaccatgtttacacacagcacacacacgatgtatactcacattacacacacactacacacacaccacagttatgtacacgtatcacaccatgtgtacatacactatacacacacaccacacatgcaccacataccacgtatatacacagtacacacatgcacatagacacgccatgcaccacacaccacatatacacacgcacactacacaaacactgcacaccattcatcatgtatacacactaaacacccacaccacacactcacacagaccctacacatgcaccacatacacccacagcacacaacccccacacacgcaccacactccacatacagacacaacatcctcacatagtgcacccaccatacatgcacacatcctccacaccacacacatgtgccacatacatgtgtcacatgcacatcacaaaactacacagcacacatacaaaccatacaggtgactcacacacaccccacacacacactgcacaccatatacacacatgtgcatcacacaccacacacacaggacttgcatacactcagcacgtgaggtggaggagggtgggggaagggcaggggaggccgggccgcccaaccccttccttggtttccccgccgctccttctccttcacacagcctgggttgtgcttcccgtgcagacactcagtgctgggaatcacgtgtggacaggacgtggacaccgcctgatcgaggagccagggtggggtggagctggagcacgtggtcaggatacagggtgggtgcccagcagagttctcaggttccgtgtgaggggccctcccttgccgctcactggggatccggggccaggctctgccgtccccctggaatcatgtggcccattgatcctacccgcctgggagaagggaacgtcctggtcctggtcagcgggtggaggtcttcacagggccgccggtagctgacgcagctgcagccccaagcacagggccagggcatcctgcaggccacgtggacacctgggctccggggcagtgggaggtctaggcctgcgcctccccagccccgtcctctctacctcaccccggaccacatgctggattgaatatgaaagtacaggggtcttcgctggagccgtgccatgactcactatttttaaatgtctgaaatttgaatctttgaatcatttgcaccttgacctgttctcttactaagttttccatgacacctgacacgaccaagccacggggaccgagatggcaaagggaaggagtatcccatgggaaaatgataaaaacgggcaggagatcccaggcgggtcattccctggcaccccatgccctccccccagctaccctcctcttcaggacccgcaggcgctgtggagcccagcaagccccaggaacctcctagccagtcttccaccctcctgcggtttaggagggaccccgggggccttggctgctccctgagcctttctcagttctagaaaaactgaggtttccagggtgctgggaagaaggggggcagcccacctgccacagcacatgctggtcaggccctgcctcccagctggccctggggacaccaggtgaccatggaggtgtacctccctgctggggagggagcactgccaggagaaacctctagaaagagacggtgcctggattgtcttttagaaattgaaatcatgttttcaatacatgcccttgtgaaaaaaaaaatggaaaacagaaattgaaagacgacaactggaggacagctattttccctcccaggctggcgactgtcgggggcggtccatctcctgcccaccctgctgccgtgagtctcttggtatggggggcactgggcttcccgcctggctgccacctctgcttctcagtaacctttacactcacaggagttgccagcatcgttatgtttttttcaaccacagattttttaactgctaaataaataaacatttcgttacatggatagaccaaaattgccttcaacacactagcagagttggctttttttccctctcacctgttactgtgaaaaagtttaaaatacagagaggcagaaagcatgattcagggacaaccacctagttttaacagctggcagcatttgctgtgtttgcttgagtgacctggagcaaggggctgagtgtctcgtcttgggtgcacacctggaaatgagtggcagaggcagcgcctggaccctgtgtgccagccaggtggctcctgggaaagcccttctgcgcaagtgtgtgccgtgggcttgtggacccgacagtgtgagcttgagctctctagcgtccgcgaatacccaggggcccttcgagcatcctcagctgttgcccagatgtccctggggataactgagccagccccagagtgagctgccggcgctcttgcatttttcggggtggtagcaagccccgtcttctggcaccgctgagcgcctttgcattgtgtaaggactgcagggcctcctcgctccggacacctctcctgttcctgtattttgccagttcctttaaggattttgacctgtttgtctctttcaagagctctttccatatgaatgccagcatttcctcctttctaataaaaatgacaagtgtttcttccattttttcatttatcttttgcctttatgtgtatataaatatatgagagctaccgggtgttagttttcatttgaaaggtttttttttttttttaaggttttgtgtattgaacttaccggtcttgtattcctcctggactgggagtcatagttcccaaggctttcccgcctctgaggggtgaaggactcagcatgtttcacctggtgctgtcatgttttcactttgtgcgttcaatctcaggtccccgtggcattgactgaggcccccgtggagttgccatggcgtgtggtgtgaggggagagacgactctcacttctccagtacccttgaccgagcctcctgcatagcccagggacatgtagccattggcctcggcagcttcgaggttttctttcttcctttggctgtgaacaacagtgcacagatgagcacctttctatagtcatcttcccccaagcctcaagattgtcctccaggcagagtcagaggagtgggactgtggacccggtgcagggagagtcgtgggaatgggactgcggacccggtgcagggagagtcgtgggaatgggactgcggacccggtgcagggagagtcgtgggaatgggactgcggacccggtgcagggagagtcgggggagtgggactgcggacccagtgcagggagagtcgggggagtgggactgtggacccggtgcagggagagtcgggggagtgggactgcggacccggtgtaggcacttcctcgtggtcttgatatgtaggccctcccctcgagcaggatttaaagcacacaccatgtgtctgaaagtttcagaattacagaccacaccatgcccacgcccaatctgcgaaccccacctcaggtgggaaccctgctccctagaaataccctttggccccggagaccaaaggagacggggcaagtggagctgggcctgggccaggtgggcactgaccaggcaggcgtgccagtggccagggtgggcaggtttgcctcccctgtggttccttttccaacaagcactgcccccccgcccggcccctggctgccccacccagacagagggacaggaggaccatggccatcgaaggcttgggaggcccaccctgagcaaacagcccctctttgtctggcatccagggcagaggccatgggtcccctcccaatgcctgcactcatcctcatcctctctggggaccccatttgtcttgcttgccctctccccataattcctgctcacaatagtctctgaacctttaaatgccattcttaggaggctgaaaccaaaggtccctggttgcagtgtcgagacaggcagggcctcctggagcacaggtgcatctgaaggtggtagggtcggtgtgtgcgattcagtcctcacggagtcttgaaaggtgacctggagttacacagaaggcagacgggtgaggttgcaatgggaaagggacagccatggttgctgtgggagcctgaacagccaggagagggcagagggtaggagggaagggcggtggagggaagcaaggaaagcacaggcctctgtgcaggagcctgggacaggcactgcctctgaggggtgggcacagcacggtgctgccagtgctaccagtgcctgcatgcagccggggctcatggcatctggatctcaagccacccggtcctgacacctgcaccacggggtcgtttcctcatgcacacacttgcaccactgagcagggttcatgagcactgggacgccaagagtccagtgggtcgcctgtcccaggataactgcacatatcagcaccaagttcatcattaggctgtgagcagcccatggccaccttgggaagatggccgtacttctttccagtggcaacacctccaaggcccatgcttttccttgtacgaagcagccatcaccgcgccaggtaacagagctgagccctgtgtctctgacgctgctgtgcggaggtctgagccggcttcagatgagcccgaggcctccgtgggctgcgccaagggtgaggcaaagctggcccagccacgtgaagctgcgtgtcacagagggtgtgcactggagcaggagcccctccccgcaggccgttctcatttgtacaggaaaaggcacacactctgccggctccttagacacgggcctctgtggcctcggtcaccagcttgaagtcctgtttgacaagcccagtgtactctcagcaggtcttgttagggaactgatttggaggcacttgtcacttatgcatgtccagggcagcccctcgtcacctgagtgtgaaggacaggcaggacctggggagtgtcaggttgagctcctcctagggaggtttttcggcgagggtcccagcctgcctggggcatgggacggcctgtgccttggcatggcctgtgtgtcgagtgctgggtctcccctgcccttgctgaggagactggcggtctctcggccacagagggttcctgggcctgtttcctaaggctgaatgtcagtgtcgagtcaggaatttcccagcccaaatggagacacgggaggaaggaaatggcctcattcaggaacttgaagtgggccaagcacaatctgcgggtcttctgcagcctgaagttcactggggtcgctccgctggcagcgctgacagcagcggaccttttcgccatgatttcatctcagctggtcccattccttcctctgcacatgtacgtcacggaagcggatacttcatgttgaatatggattcagaccctgcagcccctgcgcaggaggaatacaaatgctccactgtctgcagaaaggcccgggggtttgggtaggatcaacgatctttgacctctgtaatgtgtggtccatggagactgttgtcatttcgggagtaggagtgacagtgaggggccagtgagaccgagaggggcctatccggtgctcactccagcctctccacagggcagggggtggagtccaggcatggcagggcctttgttcttgttctggcctcagccctcctggcctcctcctgctctgtcaagtgtggccgtcgtcccctgtgattgccagggctcgtgattgccagggccctgtggtgaggaggatgtgtcaggggtaggggagtgactcgtgtttgcctgtctcgctccagggggtgcgcggaccccttcagccctcatggcacctgcgaagggctcctctgccacctcccaggaggtgcctgcaactcttgcagatagagggcagtggtcatgatgagcacgaaacaacagggcgagtttctggagctctttgcaccagcacgggtatcgctgcccctctcgcctgggggtggctcccctcgccatcgccatctcatagacaggggcttgtcctccagggacagtgcttggagagccaggtctagcctgctgggctctggagcaggcatgtcgcctgcctggctctagagcaggcatgtcgcccgccccactgcccccgacagtggtatggggaatgggactgcagtgtgggtgccacagggttgccgggcttgctgcatgcctcctgggacaagttgcccagcctgtccgctcctcaggttcctcacctaaaagacggaggggtcaagagaaatgcccgagggcctcctgctgggaaatgtcatgctgctgccctgccccccggaccccgggggtcctcagcggcctccccaggtggcatcagggcctccccactgcagacagctggcactccacagcacctgctgtggttagggtttctcaccaggctgcacacgcggagtgtcaggaggctgtggaaaagcaaattaaaccaattaaccctgctccccgcgtcgcatgtcaccgtggtgaatcctgtttcatctttctctgttaggggaagaaaataacaagagtaggcaaatgggccttttagccccatcgtgattaatttattcatctttgcatgttggcaatttgtaaacttctgacttgagtagcttttaagtggacctctgtgtgctctctgctgtgcccgggagcaggtgttgacgagttttgccactgcacgcacagcccttcctgctgcctgggggagccttccggtatcttcagtgtgcacagagggtccaggggagggaagcactggtcagtgctgccagcagaccctggcctggagcaggcagaggagggaggcaggatttatacctagaacagtgctgtccagaaggaatgtgtcaccagccacataggaacgtgaaaacaaagaaagaggcaggtgtcattaattttaataaaatatttaaccaacacccaaaatactatcatttgaacctagaatcaatataaaaattataaaagaaatagtttacattcttttgttcttaataaatattcaaagtctagagtgtgttctgcacagacccgccctgtttcagacgcaccactcatggcccttgaaggcgaagtctgcggtagcctgcatcccatggttccattacgcttctctgcatagtgctggacactgtctcttttcttgtttatttctccatctgttgcctgacctactggcacacacactcatacatgtacgccctgcagggctgtgggctgagtgtcctcagtgcctggagtggggcccggcatgaggcagccctgggcatgtggtcacccagtgaacacctgcagtgcctgtgagaaggtctggcatgaagggcctggacctcaggcccatttgctggaggagagaggccggggtacaggtgggagctggtgctccaggtgctctagctgcagtgtgggggatgccccacagcacctggccttctccctacccttgtaagcagagctccagcaccaggcggggcactgtcctggcagctgcccagccggacaaggaggatccagcatgatctcagagcagaccctatacttcttttattttaaaaattatgtttagtatacagctaatgcatgtttattttgaaaagattagaatttatggataagtaaaaaataaatcatcacgttttctcccaacgatgaccacgttcgtctttggctgatggtccttttggagttcttcatgcaaatgcatgtccttgaatttgcatatacacacagaaaggtaacacccaggtaacacccaggcaggtgcacagcggggaaccttcatgtgcctggctcatcgtgggcaccagaagccccgtagtggaaggtgtaaccagccattcaagcattgccgaaggcactttgcacacattcaacaacctaataagggagttattatttttctggctttttcactccagcggttcaccaagtgggaaggagtggcacccagcagcttctttgctcccataactcggcaagtgggagggagggttacagctcttttactcctgccgcccacagctcagcaagcattacagctcttttgctctcgcagtttggcaagttctgggttcttgtcccacagccaagaggaataaggtacgtggacgccagagagtaaggcagagtagaattttactgaggaacagaaagaaagctctcagctgcaagaagagacctgaaagcagggtggccatctgtgagggtaagtccagggtttttatgggctttgaatgggggagtgcatgctgataggtccatggatgggcttggaaaaagcaccattcgattggataaagggcatcattcagaaggaaccagttgaaagagagtgggtaagacggggatggaagttctcactccggtcgtggactctatccagaactggcagttaggtgctcaggctctaaaagtatccttggcttgaaggtcaggtttcactggggacccatccctgtctgtctaggaacttgtctgtctcctgttgctatcactattattatcccattttacagatgaggaaactgaggcatggagggttatgagacttgcccagggttgtgtagctaataaatgcagggctgggatttgaacgtggccgtggggcacattcagatgtgcttttagttgcttcaccggactctgcgacgttcactgcccagcaaagtgctgtgggctcagttttggggatatagggacacacagacctgttgaagtagtggtggagatgctggggagaactcactgcccagcaaagtgctgtgggctcggttttggggatatagggacacacagacctgttgaagtagtaggtggtggagatgctggggagaactcactgcccagcaaagtgctgtgggctcggttttggggatatagggacacacagacctgttgaagtagtaggtggtggagatgctggggagaactcactgcccagccaagtgctgtgggctcggttttggggatatagggacacacagacctgttgaagtagatggtggagatgctggggagagcagcagggacgcatctgcagtgctcgtggggtcaggcagcattgggggcgggctcgggcccagcactcccgcatctaatccagtgatcttgcttccctcgctgctgcccgttctcacatgagcctcagccctgggccagccactcagagctcagggtctcgagggaacccagggtctgcagtcaaccacccacccacccacccactgttctggagcctggggccctaggacacgggcttgtcaccgtctcacccttcctgggaaggcctggcacgcgggggaggtcagtgtcctccacggatggcactaggattcgtttgactcaggaaaaataaaacccttttggtaagaagtagccaaagccatggcgatatctgctcttcagtgtcaggagcctcgcctgctcttcagcatcggaagcctcacctggtcttcggcatcgggagcctcagcattgggagcctcgtctgctcttcggcatcgggagcctcacctgccctccggcattgggagcctcacctgttggaacccgcccggggcaggagtgagcggcatggcggcttctgtctaagtgtggtccactgctgtgtggtccatggggggaaactgttggaaacatcccagcttggcttcccacctccaccctgtgtcccactcactgacgttttagagagatgcctttgcctgcatggtggtgtgtgagtcagggctccacttctgcctgggtggtgtgggtagggccaacccccacccccaccggccctcaacttcaacaggggttgcctggtggaaagcgtgagcaactctgtccactcttgtgattcatgatgtgtccgagagtgtctagggcacacccaagtcgcccaccatcctgagaaccaacacatccctctccccaggccccacctcccagatcccaggtcagttgcttgggctggggccaggacaatggggcatttttttgagctccttgggtgctgatggacatgtggtcaggcctgagaaccgtcaacctccaggccatgcagcgagagtctgattctgttgcttttgatccctcactgatcacagaccccacagcctttacaaagggcccttgcagacactcggtgtccactggaaggattctcggcacacaggctgatggagaaaggcagggtgcactccacgctgccctctggctgtggctttgttgagatggtggtgccccagggaccgggggagggacggattgcagacctgacgcgaccttgacttctacagcatcagtgtgatgagcagagccttcctttaacttttagatccacagatgtggccattaattgtttatggaaaagttaagaatgaaaatgcaagtgccgtctatagttttctgggctgggccctgggcaggcctctctccacctgccctcctggacaggcagcaccgtcattgctgggagagccatgtccctgaatgtgaccgagggatggcttcgcccgtggtggcccctctgcctgcctggtgtgggtgatgcagaacagctcttggctaataaatgtgccgcgtttcccagacaggagacgacgtggcctagtgcataaataagacaagcctttttaaaaaagaaatctgtatttaaggatgtgtttggctgtgttcttctcctcccgtaaaggtcacccagatagatttttccttctttagcattgcaggctgcgaagaactgggcatttctattctccctccatccagtgaacctggcggactaaattagattctgaaattgagtgtgcagtagagtcggtgagttaccgtaatgggagggtactgcttctcaccttgcaaggagcgaggtcatgataatatgaagcgaagtggattaaaaataaaaccaaaggtatttatttatgacctgctcagaattggattggcatccatgtaagttgcatctaatggtgaaagacagcagattgatgttgatatgtccccagggacttttagccagtgaaattcgctccctgaattcaatttaaaggcccactgaaagtatccaaaatgcgaaaggaaatggaattgaggaagtgggggtggaagcccagcaactgcgaaatagcaattggaagacggtcctggtgtgtaaccctcctgatgcaggaccggagagaggacagtcctggtgtgtaaccctcctgatgcaggaccagagagaggacagtcctggtgtgtaaccctcctgatgcaggaccggagagaggacagtcctggtgtgtaaccctcctgatgcaggaccggagagaggacagtcctggtgtgtaaccctcctgatgcaggaccggagagagggcagtcctggtgtgtaaccctcctgatgcaggaccggagagaggacagtcctggtgtgtaaccctcctgatgcaggaccggagagagggcagtcctggtgtgtaatcttcctgattcggaaatggagagcgcagctccgggatggccggggggcctgcctcagtgagggtggggcaacatgcagacggcagcctccggcacagccaggatgtgagcccgggtcatctgtccaggctctgtgcctgcacagctcagctcatcctggctgtgcctatgtggagagcctgccatccttatctccagatgaagaagagtgtggcttggagagccaggcccactgcccaagaccacctggacaggaagacaggatgtgaacttcagagcccagctaccccccattcccctccatgccagtcttgctgggctgcgttttctcgaggcaggcgacatgggcatcccgagcctgtggccctccctgtcccttgtcacctgctaggagtggggaagggcagttccagcaccctgagggctcctcagccgccttcctgacttcctggatccagcttctgtttggggtgggaggtaggagaagccggggagcctgcaggtggccccctgggggcaaattctcgaggaccagagcccacagggccatctgagcagtgtagacccctccctcagggagtctgcccagcttcatgacagagcctgggcttgggctggccctgacctgatggtcccctgtttctcttctgagaacccccactgcaggaggctgtcttggccactcagccctctctgatccctacttctgccaagccctctgtgtgttggggtccccggagacctgccctgcccttggtgggctgccagcagctgtggatgtgggcgtggtcatgtgggagggcggggctgtcaggcggtggtcgtggggggtcccccgaggacctgtgcttttccttccccgttgtggcctcagtggacgtaggtcagtctccatctcctcagtgtccgcatcccggcctccagaccatgagctctggagacagtcgcccatgtgtcttttgggggtgggactcagtgcccccatagcccatctgagacacggcccagctgcaggccagaggagcccacccagcactcccagtaagcccaacgcacctgcccagtgcgcccggtgagcccagtgtgcctacccagcactcccagtgtgcctacccagcactcccagtgagcctacccagcactcccagtgagcctacccagcactcccagtgagctgtgtgctcacccagagtgcccagtgagcccagtgagtccggtgtgcccgcccggtgttcccacccagcatgcccagtgagccttgtgtgtccacccagtgtgcccgctcagtgagcctggtgtgtccacctagcatgcccatggagcccactgtgtgcccacccagtgctggctgtactgctggccgtatgtgtgttttcccagtctgtccagcagccctgacagtaatttactacagtaaataaaaatttgtactatgtgaattcaatgcaataaatgctgtgactgggaagtagaatgggagaatgaagggtacaggaggcgagattttaaaaatacacatgtaagatgattttatccacactgaacgacttataattgttgcttattccctatagttccctattttcctacttacatgcatgtcattcacctttatgtaaaaccttttacctcctatctttacctatgagaatcctacctgaattttaagagtctgatcaaatgtcacttccacagaaaggccttctttggttgtaactggaattaatttttaaatctcagtctaaggcaaataagcacattagaaagcaataaataaataaatggtggccccattttgcagaggaggaagctgggcctcggggtggagtcattgttccagggcaccaggttggacctagacctgaagctgggtttggtggagccctgcaccccaacccactggtgtgaggtggtcatgcaggaggggccagttggcgctttgctgtgctcctgggctcccggggtgggcctgagccggctccgttctgtgatcccctcgtgtgggcttcatctgctgatggtgctggtgcccggaggggtctcctggtgcacagaaatctgtgcttagtggcagttccaggggtgctgcggtacttcctgggctgatacaggctttgtgggagtgggaagctcctgggcggaggctgcaaagctgcagcagggccccgagagctgggtctccccctgaggggcaggggattcagttaaatgaagctctgggcggcccctgccacgacatctcagatgccggacttggagctgcgcagtgggcctcctgcctggctgctgggatggggcggtggccgtggggcgaggcctggggcccttctggggttgagcagggagcagctgccggctgggcaagttttcctgggtcacccaccctccactgtgggtcaccttctctgacctgggcttgtgtctttctctccagttttcctggatcacccgccctgcaccgtgggtcacctcctctgacctgggcttgtatctttccctccagttttctggggtcacccgccctccaccgtgggtcacctcctctgacctgggcttgtctctttctccccaggagctgctgctcttcctccagaacctgcccacagcccactgggatgatgaggacatcagcctgttgctggccgaggcctaccgcctcaagtttgcttttgccgacgcccccaatcactacaagaaatgagcccaggcccacccgcagctggcctcactgtcccgggtggcgcgccccacctgcctggctggtggtaggcccctgtgagctggtcccgggctgctaaaaggccttgtgaggtggccccaccctccaggggagctggtgaagatgggccacagacctggtctagggctgacaaagacagggacagcctttgttttctgagataccaaagagagccaggggagggccccgggttcggcggccagaggcaggtcaggggtcccctctccctctccctgcaatgtccttgccaaatgactgcctcctgctgcccctagtccggggcagcctaggaggccgaccctctttggagtcctgctgtctgggtgccagggccggaacgaggtagtggccatctcatacctactctgaaatgcaaaacttctattctgttgagtgaaagaataaaatgtagacaaaatctagaccgagacgttgcgctgacccggggtctctgtgccgcgaggtcccctcacagctgtatttcactgctgctggccctttccctccgtgtgttttcctgcttgcttggtttaaacgtggctgggaagctgaaggctggagtccaagccgtgagcccgccgagtgcctgggaggccgtgggaccaaaggctgggagcagagggaggcctcgccatcgccttactttccaccttgaacctcttttacaagagagaaacccccacctccctgaggtccagggccaagtggccccgccacgcaggtaggcgccggcctcagccagagcccctggaggcccacccaggctgtcgggccatgttgggctggcagacgggcagggggtcgcgtccctgtcatcaaagccctgaaccacagtgctcttctcaccgcagcctggaagcggaatgagcttttggagacttcctgggacttgctgtccttgtccaggtctgccaggtgtaggggaggtgtgactggttccatcatggaccggttcctccatggaccggttcctccgtggaccggttccgccatggaccggttccgccatggaccactcctgccctggaccactcctgccctggaccggttctgccgtggactggttcccgccgtggaccagttcccgctgtatactggttctgccctggactggttcccgctgtggactggttccttggggctctaagtgcggaagggcccagagctggtccctgcccagcgccctgctagggctgtgtccttggctccaggggccttgggactggcttcccagcgttccctcggtgtgtcacaggctgcatgacccctggaatgcgggcagggccacagccacagtctgtctgatccctgagcccaggacaggctcacgtcctcagcgacccactggtgactgacttcccagactctcctctgtccctcaggagcagccgtgtcctctcccaggccctaggacactgccagagactgtgggacatacaggcataagtgatgtgtgtgtttctgcttctgttttaaaaatccagggtcattacacacagcatggaaattagcacaaaatgctgtgcaaacgtcagatgctcccaaaccagcaaagggatgggcttgcttcacatcagatgcgggcacgccttacccctgccttccgtgtccccaccccagggtcaagggttcctcagaccagccatgcctcctcctcctgccgcctccttttctagatggggaggggattccgtcacaagaagagccgcccctcggccgtgtgcaggaagccccatgtcgctttgccgagatcagccctgggaggatccccttctctagctcagatcatgccgtgtggccagaaggctgcggacacaactgacctgcttctcgaggtggttgatgttttaaacaggaagctccacggagttcagccctgtgtgcatttcctcatgtatgtaaacgccaagactgaatgtgagaggtgttggccgcgggccttaagtctgagcagatccatctggaatgttcggggtgtgctgtctggatgtggtgcgctaaaaacacggaataaagatcagtgac

SEQ ID NO: 432 - DNA, 3647 bp, Homo sapiens
gttgctagtccctgtaatataaaaatggctgaaaggagttggggaagggggcagtgaagacgacgcctgcctctcgcggtgtgaaactggggacctttgctatatgccgtctattattgtgcatccagcacgtgtatggtgcccagcaccccccctttgatccactgttacatggcactttgctcaggtccacggccaagatgccgaccacaccagtgaaggccaagagggtcagcaccttccaggagtttgagagcaataccagcgatgcctgggacgctggggaggacgacgatgagctcctggccatggcggcggagagcctgaactccgaggtggtcatggagacggccaaccgtgtgctgcgtaaccacagccagcggcaggggcggcccacgctgcaggaggggccagggcttcagcagaagcccaggcccgaggcagagccgccctcaccccccagcggcgacctccggctggtgaagtcggtcagtgagagccacacgtcctgtcctgcagaaagtgccagcgatgccgcccctctgcagaggtcccagtctctcccacactcggccaccgtcacgctgggtggcacatctgaccccagcactctcagcagctcagcgctgagcgaaagagaggcctcccggctcgacaagttcaagcagctgcttgccggccccaacacggaccttgaggaattacggaggttgagctggtccggaatccctaagccagtgcgtccaatgacgtggaagctcctctcaggttaccttcccgccaatgtagaccggagaccagccactctccagagaaaacaaaaagaatattttgcatttattgagcactattacgattctaggaacgacgaagttcaccaggacacatacaggcagatccacatagacatccctcgcatgagccctgaagcgttgatcctgcagcccaaggtgacggagatttttgaaaggatcttgttcatatgggcgatccgccacccagccagtggatacgttcagggtataaatgatctcgtcactcctttctttgtggtcttcatttgtgaatacatagaggcagaggaggtggacacggtggacgtctccggcgtgcccgcagaggtgctgtgcaacatcgaggccgacacctactggtgcatgagcaagctgctggatggcattcaggacaactacacctttgcccaacctgggattcaaatgaaagtgaaaatgttagaagaactcgtgagccggattgatgagcaagtgcaccggcacctggaccaacacgaagtgagatacctgcagtttgccttccgctggatgaacaacctgctgatgagggaggtgcccctgcgttgtaccatccgcctgtgggacacctaccagtctgaaccggacggcttttctcatttccacttgtacgtgtgcgctgcttttctcgtgagatggaggaaggaaatactagaagaaaaagattttcaagagctgctgctcttcctccagaacctgcccacagcccactgggatgatgaggacatcagcctgttgctggccgaggcctaccgcctcaagtttgcttttgccgacgcccccaatcactacaagaaatgagcccaggcccacccgcagctggcctcactgtcccgggtggcgcgccccacctgcctggctggtggtaggcccctgtgagctggtcccgggctgctaaaaggccttgtgaggtggccccaccctccaggggagctggtgaagatgggccacagacctggtctagggctgacaaagacagggacagcctttgttttctgagataccaaagagagccaggggagggccccgggttcggcggccagaggcaggtcaggggtcccctctccctctccctgcaatgtccttgccaaatgactgcctcctgctgcccctagtccggggcagcctaggaggccgaccctctttggagtcctgctgtctgggtgccagggccggaacgaggtagtggccatctcatacctactctgaaatgcaaaacttctattctgttgagtgaaagaataaaatgtagacaaaatctagaccgagacgttgcgctgacccggggtctctgtgccgcgaggtcccctcacagctgtatttcactgctgctggccctttccctccgtgtgttttcctgcttgcttggtttaaacgtggctgggaagctgaaggctggagtccaagccgtgagcccgccgagtgcctgggaggccgtgggaccaaaggctgggagcagagggaggcctcgccatcgccttactttccaccttgaacctcttttacaagagagaaacccccacctccctgaggtccagggccaagtggccccgccacgcaggtaggcgccggcctcagccagagcccctggaggcccacccaggctgtcgggccatgttgggctggcagacgggcagggggtcgcgtccctgtcatcaaagccctgaaccacagtgctcttctcaccgcagcctggaagcggaatgagcttttggagacttcctgggacttgctgtccttgtccaggtctgccaggtgtaggggaggtgtgactggttccatcatggaccggttcctccatggaccggttcctccgtggaccggttccgccatggaccgcactcctgccctggaccggttctgccgtggactggttcccgccgtggaccagttcccgctgtatactggttctgccctggactggttcccgctgtggactggttccttggggctctaagtgcggaagggcccagagctggtccctgcccagcgccctgctagggctgtgtccttggctccaggggccttgggactggcttcccagcgttccctcggtgtgtcacaggctgcatgacccctggaatgcgggcagggccacagccacagtctgtctgatccctgagcccaggacaggctcacgtcctcagcgacccactggtgactgacttcccagactctcctctgtccctcaggagcagccgtgtcctctcccaggccctaggacactgccagagactgtgggacatacaggcataagtgatgtgtgtgtttctgcttctgttttaaaaatccagggtcattacacacagcatggaaattagcacaaaatgctgtgcaaacgtcagatgctcccaaaccagcaaagggatgggcttgcttcacatcagatgcgggcacgccttacccctgccttccgtgtccccaccccagggtcaagggttcctcagaccagccatgcctcctcctcctgccgcctccttttctagatggggaggggattccgtcacaagaagagccgcccctcggccgtgtgcaggaagccccatgtcgctttgccgagatcagccctgggaggatccccttctctagctcagatcatgccgtgtggccagaaggctgcggacacaactgacctgcttctcgaggtggttgatgttttaaacaggaagctccacggagttcagccctgtgtgcatttcctcatgtatgtaaacgccaagactgaatgtgagaggtgttggccgcgggccttaagtctgagcagatccatctggaatgttcggggtgtgctgtctggatgtggtgcgctaaaaacacggaataaagatcagtgac

SEQ ID NO: 433 - protein, 462 aa, Homo sapiens
MPTTPVKAKRVSTFQEFESNTSDAWDAGEDDDELLAMAAESLNSEVVMANRVLRNHSQRQGRPTLQEGPGLQQKPRPEAEPPSPPSGDLRLVKSVSESHTSCPAESASDAAPLQRSQSLPHSATVTLGGTSDPSTLSSSALSEASRLDKFKQLLAGPNTDLEELRRLSWSGIPKPVRPMTWKLLSGYLPANVDRRPATLQRKQKEYFAFIEHYYDSRNDEVHQDYQIHIDIPRMSPEALILQPKVTEIFERILFIWAIRHPASGYVQGINDLVTPFFVVFICEYIEAEEVDTVDVSGVPAEVLCNIEADTYWCMSKLLDGIQDNYTFAQPGIQMKVKMLEELVSRIDEQVHRHLDQHEVRYLQFAFRWMNNLLMREVPLRCTIRLWDTYQSEPDGFSHFHLYVCAAFLVRWRKEIEKDFQELLLFLQNLPTAHWDDEDISLLLAEAYRLKFAFADAPNHYKK

SEQ ID NO: 434 - DNA, 1378 bp, Homo sapiens
gttgctagtccctgtaatataaaaatggctgaaaggagttggggaagggggcagtgaagacgacgcctgcctctcgcggtgtgaaactggggacctttgctatatgccgtctattattgtgcatccagcacgtgtatggtgcccagcaccccccctttgatccactgttacatggcactttgctcaggtccacggccaagatgccgaccacaccagtgaaggccaagagggtcagcaccttccaggagtttgagagcaataccagcgatgcctgggacgctggggaggacgacgatgagctcctggccatggcggcggagagcctgaactccgaggtggtcatggagacggccaaccgtgtgctgcgtaaccacagccagcggcaggggcggcccacgctgcaggaggggccagggcttcagcagaagcccaggcccgaggcagagccgccctcaccccccagcggcgacctccggctggtgaagtcggtcagtgagagccacacgtcctgtcctgcagaaagtgccagcgatgccgcccctctgcagaggtcccagtctctcccacactcggccaccgtcacgctgggtggcacatctgaccccagcactctcagcagctcagcgctgagcgaaagagaggcctcccggctcgacaagttcaagcagctgcttgccggccccaacacggaccttgaggaattacggaggttgagctggtccggaatccctaagccagtgcgtccaatgacgtggaagctcctctcaggttaccttcccgccaatgtagaccggagaccagccactctccagagaaaacaaaaagaatattttgcatttattgagcactattacgattctaggaacgacgaagttcaccaggacacatacaggcagatccacatagacatccctcgcatgagccctgaagcgttgatcctgcagcccaaggtgacggagatttttgaaaggatcttgttcatatgggcgatccgccacccagccagtggatacgttcagggtataaatgatctcgtcactcctttctttgtggtcttcatttgtgaatacataggtaagatttcttgcaaacattaaacgtgaactttagtggacttgctgtgtgttactatgtataattataacaatattgaaaattgctactaagtgtaatgttattaatgataggtaatattagagaataatagttttctcatcaacaacagctttccaaaatgtctttaatctacatgctcaactactgaagacattaaattgcagttataatgatgaatatcttctttttaacaatatttgaagatagataatatatttggggagtgtagtttattctaaaggccatcacagtaatggcttta

SEQ ID NO: 435 - protein, 292 aa, Homo sapiens
MPTTPVKAKRVSTFQEFESNTSDAWDAGEDDDELLAMAAESLNSEVVMANRVLRNHSQRQGRPTLQEGPGLQQKPRPEAEPPSPPSGDLRLVKSVSESHTSCPAESASDAAPLQRSQSLPHSATVTLGGTSDPSTLSSSALSEASRLDKFKQLLAGPNTDLEELRRLSWSGIPKPVRPMTWKLLSGYLPANVDRRPATLQRKQKEYFAFIEHYYDSRNDEVHQDYQIHIDIPRMSPEALILQPKVTEIFERILFIWAIRHPASGYVQGINDLVTPFFVVFICEYIGKISCKH

SEQ ID NO: 436 - DNA, 3752 bp, Homo sapiens
gcgtaggcacaacttccggaaggaggcggaagagcttctcggctctaggctctggagtcccgggagcagtgaggggccacccggggcacaggaaagggccgctaggggagggccgggtgcactcggggtgtctgggccgcgggtctgagggatgaggaggggccatggccagcgacggggccaggaagcaattctggaagcgcagcaacagcaagctcccgggcagcatccagcacgtgtatggtgcccagcaccccccctttgatccactgttacatggcactttgctcaggtccacggccaagatgccgaccacaccagtgaaggccaagagggtcagcaccttccaggagtttgagagcaataccagcgatgcctgggacgctggggaggacgacgatgagctcctggccatggcggcggagagcctgaactccgaggtggtcatggagacggccaaccgtgtgctgcgtaaccacagccagcggcaggggcggcccacgctgcaggaggggccagggcttcagcagaagcccaggcccgaggcagagccgccctcaccccccagcggcgacctccggctggtgaagtcggtcagtgagagccacacgtcctgtcctgcagaaagtgccagcgatgccgcccctctgcagaggtcccagtctctcccacactcggccaccgtcacgctgggtggcacatctgaccccagcactctcagcagctcagcgctgagcgaaagagaggcctcccggctcgacaagttcaagcagctgcttgccggccccaacacggaccttgaggaattacggaggttgagctggtccggaatccctaagccagtgcgtccaatgacgtggaagctcctctcaggttaccttcccgccaatgtagaccggagaccagccactctccagagaaaacaaaaagaatattttgcatttattgagcactattacgattctaggaacgacgaagttcaccaggacacatacaggcagatccacatagacatccctcgcatgagccctgaagcgttgatcctgcagcccaaggtgacggagatttttgaaaggatcttgttcatatgggcgatccgccacccagccagtggatacgttcagggtataaatgatctcgtcactcctttctttgtggtcttcatttgtgaatacatagaggcagaggaggtggacacggtggacgtctccggcgtgcccgcagaggtgctgtgcaacatcgaggccgacacctactggtgcatgagcaagctgctggatggcattcaggacaactacacctttgcccaacctgggattcaaatgaaagtgaaaatgttagaagaactcgtgagccggattgatgagcaagtgcaccggcacctggaccaacacgaagtgagatacctgcagtttgccttccgctggatgaacaacctgctgatgagggaggtgcccctgcgttgtaccatccgcctgtgggacacctaccagtctgaaccggacggcttttctcatttccacttgtacgtgtgcgctgcttttctcgtgagatggaggaaggaaatactagaagaaaaagattttcaagagctgctgctcttcctccagaacctgcccacagcccactgggatgatgaggacatcagcctgttgctggccgaggcctaccgcctcaagtttgcttttgccgacgcccccaatcactacaagaaatgagcccaggcccacccgcagctggcctcactgtcccgggtggcgcgccccacctgcctggctggtggtaggcccctgtgagctggtcccgggctgctaaaaggccttgtgaggtggccccaccctccaggggagctggtgaagatgggccacagacctggtctagggctgacaaagacagggacagcctttgttttctgagataccaaagagagccaggggagggccccgggttcggcggccagaggcaggtcaggggtcccctctccctctccctgcaatgtccttgccaaatgactgcctcctgctgcccctagtccggggcagcctaggaggccgaccctctttggagtcctgctgtctgggtgccagggccggaacgaggtagtggccatctcatacctactctgaaatgcaaaacttctattctgttgagtgaaagaataaaatgtagacaaaatctagaccgagacgttgcgctgacccggggtctctgtgccgcgaggtcccctcacagctgtatttcactgctgctggccctttccctccgtgtgttttcctgcttgcttggtttaaacgtggctgggaagctgaaggctggagtccaagccgtgagcccgccgagtgcctgggaggccgtgggaccaaaggctgggagcagagggaggcctcgccatcgccttactttccaccttgaacctcttttacaagagagaaacccccacctccctgaggtccagggccaagtggccccgccacgcaggtaggcgccggcctcagccagagcccctggaggcccacccaggctgtcgggccatgttgggctggcagacgggcagggggtcgcgtccctgtcatcaaagccctgaaccacagtgctcttctcaccgcagcctggaagcggaatgagcttttggagacttcctgggacttgctgtccttgtccaggtctgccaggtgtaggggaggtgtgactggttccatcatggaccggttcctccatggaccggttcctccgtggaccggttccgccatggaccgcactcctgccctggaccggttctgccgtggactggttcccgccgtggaccagttcccgctgtatactggttctgccctggactggttcccgctgtggactggttccttggggctctaagtgcggaagggcccagagctggtccctgcccagcgccctgctagggctgtgtccttggctccaggggccttgggactggcttcccagcgttccctcggtgtgtcacaggctgcatgacccctggaatgcgggcagggccacagccacagtctgtctgatccctgagcccaggacaggctcacgtcctcagcgacccactggtgactgacttcccagactctcctctgtccctcaggagcagccgtgtcctctcccaggccctaggacactgccagagactgtgggacatacaggcataagtgatgtgtgtgtttctgcttctgttttaaaaatccagggtcattacacacagcatggaaattagcacaaaatgctgtgcaaacgtcagatgctcccaaaccagcaaagggatgggcttgcttcacatcagatgcgggcacgccttacccctgccttccgtgtccccaccccagggtcaagggttcctcagaccagccatgcctcctcctcctgccgcctccttttctagatggggaggggattccgtcacaagaagagccgcccctcggccgtgtgcaggaagccccatgtcgctttgccgagatcagccctgggaggatccccttctctagctcagatcatgccgtgtggccagaaggctgcggacacaactgacctgcttctcgaggtggttgatgttttaaacaggaagctccacggagttcagccctgtgtgcatttcctcatgtatgtaaacgccaagactgaatgtgagaggtgttggccgcgggccttaagtctgagcagatccatctggaatgttcggggtgtgctgtctggatgtggtgcgctaaaaacacggaataaagatcagtgac

SEQ ID NO: 437 - protein, 509 aa, Homo sapiens
MASDGARKQFWKRSNSKLPGSIQHVYGAQHPPFDPLLHGTLLRSTAKMPTTPVKAKRVSTFQEFESNTSDAWDAGEDDDELLAMAAESLNSEVVMANRVLRNHSQRQGRPTLQEGPGLQQKPRPEAEPPSPPSGDLRLVKSVSESHTSCPAESASDAAPLQRSQSLPHSATVTLGGTSDPSTLSSSALSEASRLDKFKQLLAGPNTDLEELRRLSWSGIPKPVRPMTWKLLSGYLPANVDRRPATLQRKQKEYFAFIEHYYDSRNDEVHQDYQIHIDIPRMSPEALILQPKVTEIFERILFIWAIRHPASGYVQGINDLVTPFFVVFICEYIEAEEVDTVDVSGVPAEVLCNIEADTYWCMSKLLDGIQDNYTFAQPGIQMKVKMLEELVSRIDEQVHRHLDQHEVRYLQFAFRWMNNLLMREVPLRCTIRLWDTYQSEPDGFSHFHLYVCAAFLVRWRKEIEKDFQELLLFLQNLPTAHWDDEDISLLLAEAYRLKFAFADAPNHYKK

SEQ ID NO: 438 - DNA, 2756 bp, Homo sapiens
gcgtaggcacaacttccggaaggaggcggaagagcttctcggctctaggctctggagtcccgggagcagtgaggggccacccggggcacaggaaagggccgctaggggagggccgggtgcactcggggtgtctgggccgcgggtctgagggatgaggaggggccatggccagcgacggggccaggaagcaattctggaagcgcagcaacagcaagctcccgggcagcatccagcacgtgtatggtgcccagcaccccccctttgatccactgttacatggcactttgctcaggtccacggccaagatgccgaccacaccagtgaaggccaagagggtcagcaccttccaggagtttgagagcaataccagcgatgcctgggacgctggggaggacgacgatgagctcctggccatggcggcggagagcctgaactccgaggtggtcatggagacggccaaccgtgtgctgcgtaaccacagccagcggcaggggcggcccacgctgcaggaggggccagggcttcagcagaagcccaggcccgaggcagagccgccctcaccccccagcggcgacctccggctggtgaagtcggtcagtgagagccacacgtcctgtcctgcagaaagtgccagcgatgccgcccctctgcagaggtcccagtctctcccacactcggccaccgtcacgctgggtggcacatctgaccccagcactctcagcagctcagcgctgagcgaaagagaggcctcccggctcgacaagttcaagcagctgcttgccggccccaacacggaccttgaggaattacggaggttgagctggtccggaatccctaagccagtgcgtccaatgacgtggaagctcctctcaggttaccttcccgccaatgtagaccggagaccagccactctccagagaaaacaaaaagaatattttgcatttattgagcactattacgattctaggaacgacgaagttcaccaggacacatacaggcagatccacatagacatccctcgcatgagccctgaagcgttgatcctgcagcccaaggtgacggagatttttgaaaggatcttgttcatatgggcgatccgccacccagccagtggatacgttcagggtataaatgatctcgtcactcctttctttgtggtcttcatttgtgaatacatagaggcagaggaggtggacacggtggacgtctccggcgtgcccgcagaggtgctgtgcaacatcgaggccgacacctactggtgcatgagcaagctgctggatggcattcaggacaactacacctttgcccaacctgggattcaaatgaaagtgaaaatgttagaagaactcgtgagccggattgatgagcaagtgcaccggcacctggaccaacacgaagtgagatacctgcagtttgccttccgctggatgaacaacctgctgatgagggaggtgcccctgcgttgtaccatccgcctgtgggacacctaccagtctgaaccggacggcttttctcatttccacttgtacgtgtgcgctgcttttctcgtgagatggaggaaggaaatactagaagaaaaagattttcaagagctgctgctcttcctccagaacctgcccacagcccactgggatgatgaggacatcagcctgttgctggccgaggcctaccgcctcaagtttgcttttgccgacgcccccaatcactacaagaaatgagcccaggcccacccgcagctggcctcactgtcccgggtggcgcgccccacctgcctggctggtggtaggcccctgtgagctggtcccgggctgctaaaaggccttgtgaggtggccccaccctccaggggagctggtgaagatgggccacagacctggtctagggctgacaaagacagggacagcctttgttttctgagataccaaagagagccaggggagggccccgggttcggcggccagaggcaggtcaggggtcccctctccctctccctgcaatgtccttgccaaatgactgcctcctgctgcccctagtccggggcagcctaggaggccgaccctctttggagtcctgctgtctgggtgccagggccggaacgaggtagtggccatctcatacctactctgaaatgcaaaacttctattctgttgagtgaaagaataaaatgtagacaaaatctagaccgagacgttgcgctgacccggggtctctgtgccgcgaggtcccctcacagctgtatttcactgctgctggccctttccctccgtgtgttttcctgcttgcttggtttaaacgtggctgggaagctgaaggctggagtccaagccgtgagcccgccgagtgcctgggaggccgtgggaccaaaggctgggagcagagggaggcctcgccatcgccttactttccaccttgaacctcttttacaagagagaaacccccacctccctgaggtccagggccaagtggccccgccacgcaggtaggcgccggcctcagccagagcccctggaggcccacccaggctgtcgggccatgttgggctggcagacgggcagggggtcgcgtccctgtcatcaaagccctgaaccacagtgctcttctcaccgcagcctggaagcggaatgagcttttggagacttcctgggacttgctgtccttgtccaggtctgccaggtgtaggggaggtgtgactggttccatcatggaccggttcctccatggaccggttcctccgtggaccggttccgccatggaccg

SEQ ID NO: 439 - protein, 509 aa, Homo sapiens; identical to SEQ ID NO: 437

SEQ ID NO: 440 - DNA, 74565 bp, Mus musculus
  misc_feature (1)...(74565): n = A,T,C or G
gagcgatctcgcccgcggccccgagccggtcccgagcgggtcccgagcctcccgccggctgcgcccgagtccgaaggcgccgcgccgcggggtcgggcccatgtgcgtgcggcccgctccaggccgtccgcacttcacctctgcgagcgtcctggcctcgcttgggcctccctcggaggaggagtcgctgcgacccccagcctgctgggcaggtgagtgcggccgcgcgcccaccgcttcctgcggcccggggacaggagggacacccccaccccccaccgccttcgggccgtcagcgtcctgctgtcactcagcttgtgcggtcagcgccctgtcagtagagcagcgcctttgtcaccctgcgcttcgtcagggggtcagcgcctccatcagtctgcttcccggtcagccagcactctccactgccgtcattcattcatccatccatccatccatccatccatcccttcccttccctcagcgctcacccttcttgacagtcaacatcccttttagctactatcccagctcctggcctgtcagtggtcagtttttccccactctcagaattagtctcagcctcttagtggccgcctggttctctccctcccagttgtccacctctgctcctatcaaggtccctcacctctgtcggtggctgtagaggtggggcggaccttggatacagggcctggggagttgtcagtgttccctatctcatctttgggttttttttttttttccaccctcctcatcaggggccccgctggtggtgacctttccacctatcaagcgttccctccccgctcgctcatctcctcctaccagtgcccactgccaagcgctcgctttgttattgtcctttatttccatcccattcctcttccgggtcgttccccagttgtcatcatcacccactgtctttctcccactccccccccccccccatcatcttttgcttctcccatgcgcctcttctttctgggaacttcttcacctgctactttgtatcctcacagctgactactcacttagtgaaggctgtttccaatctattacggagctcttgctgttcgctatcagctctcagtccagtcactttccccaattctcgctttctgctgtagcccctccccgcaatttgtcaccatcctcaaccatgtccctaggccttattccagacaggttttcaggttttcactgacaccttcatctgtgtcctacctgacaatgctgcttgctggcttcttaccatctcattccattccctatccccccccccccctttccgggactgttttactgtgtagccatagatgtcctggaactctggccttaaactccatagagatccgcctgcctctgcctccctagtgctggtatcaaaggcgagggctactgtcacccagcttcagtcctcattcttatctcttcacgcctctctccctttctgtttttctgagacagggtcttgctatggagtcttggctatctatgtagagcaagctggactgaaactcagagatttgcctacctttgcctgggattaaaagttttcccaaccaagtctgatgtgttcatctcttgatgttcttatgttctgggtcagccctttgacctctctggttctcatgtgagctaaataagctcttggaggcaaaaaagaggctatcgccgggcagtggtggcgcacgcctttaatcccagcacttgggaggcagaggcaggcggatttctgagttcgaggccagcctggtctacaaagtgagttccaggacagccagagctatacagagaaaccctgtctcgaaaaccaaccaaccaaccaaccaaaaaaaaaaaaaaaaaaaaaaaaagaggctatcttttgtttgttttttttctagacagggtttctttgcgtagtcctggctgtcctagaactagctctgtagacctagaccaggctggcctcagagctcacagagatccacctggcctctgcctcccaactgatgggattaaagtatgctaccattgcccagtaagaaattagctttaaggaggagggtgggagagcaggccagagcctttcaacacggacatcgggaggagatggaaagggcccagatctcttgcaggaactagataatattggtgtgtctaggttggctgagaatgtttgtcttctagtcagccttacagcttgaggggggtggggggtgaggggggtggttctaggctggagattgagttgtggggcattatgactatctggataggagggggtgttgtggttcaaacctcagtagttaatttagggaggtattttggaggaaaagctgttgaagcttcttagagccgtaagtaacaattgaagaggggtatgagagagtgagagagctcagagagagtcccagacttctcggtagaagtgaaatggctgggtagtagcatcgtctaattaaatggagaagctgggttgaggcagtgatagatatgagggaatggttacatgttagagagagcaagcaaggttttccttcggctgagactagtgggaaacttctaagaagcccaggggccattagggagaatgtatctaaccgacagatgtgaaacaggagaggttaggctgaacatacaattttgagcagggagataatatttaaagcgttgggaatagctctttacttagtgcacatgataaatgtgctgagtatttcttgtgtgccattgcatttagtattgattgattcatttatttatttggagacaaggtctctctctgtagcctcagctgttctggaacttgctatatagaccagactggcctagagctagcagagatctccctacctctgccccacaagtgctaggattcaaggcatgcaccaccatgcccagctctgtatttaatttatatgggaatttctcatctaatccttaaggtaaccatagactataggagctataatttccctgtttgagagataaagagactgatgtaagagagccagaatttgtacttacggcagtttggctctgcatccctcctctctctttctccttatggaaagggtgctgtttaaaatatttaaactaataacaataatgactggtcccagtcctaccatgcttggcaggcccaaacactttttaagtgtcttacctgtatcatcttgtgtaatcttcacaatgatgtagccatgaaattgctcttctttcaactctttacttgtttacttttttgagacaggatctaattttacccagtctgatctcaaatattactttatagattgagggttactgtaaacttctgttccccttcctctgtttcccaagtgcctggattacagggtgtaccaccatgactaatttatataatgtttgggattaaacccagggtttcatgcatgctattaagcattctactaactgagctacatctcagtccctcttttttaaaaaaaaaaaaaaaaccaggatctcatgtattataggctgacctggaacttggctaggtaactaaggccttgaactccttctgtttcacacctaaactgagattgcagccatatgctgccatccctggctagtagttactcttgacatttctattaatatcatatgagggctagagagatgactcagtgggtacttgctacataggtgagagagctgagcgtaaatccccagcctccacatagaagctgggcgtagctctgtgtgcctgtggaatatttatcctttcaaatccaactaatatttatatcaataaagacacgggaggggtaaactgaggtaaaaacttgatagctcagtgaggtaactttattttctgaactatatacaaaatatgtatttacaagcctgttcctaagactaaactgctagctctttagaaatctctctgtatctgtgtcattctacctagctagcctccctttctctggagcccctccaaagtcaagggctccgtagctctcttccctccctaggagactgttttgcctgtgtcctgccagctgcttctgtgtggttccttcaagccccgtctcctacccagagttccttctatgaagttcttccaagccaagacagtgagagggctagagagagtcctctcaaaggtccagttgctataaaagaagtctctagctcctcccctactcccttggcaggctaagccttgtcactgtcatgggagtgctccaagccaagtcataggggaacacagagccatttcacctttaccgtggagcagctcaaggccagccagctgactttgcctctggtcatagagcaaagaccacagtatctctccccagcagcttgccttaaactaggtaagaactttccattcttaagcattcttatctgtggaggcttttaggggtacaccctaacaacatctcttctggacacacctaactgcatctgacaagctatctaagctttttatattttgccagcaattaggttttctctgtacagtaatcacatgtaacatgcctgtaactcaagggctgcagggtggaggcaggtggctctcaggggtcctctgaccagtgagcctcttcaaaactggaaccaaaagcaacggtaaaatccagtggtaagcttctggcctagtgagatagcctatctttaaaaaaaagaagaaaaaaggagaatgaagaatgaaacatcttctgccctctgcattcacagatgcacgccccgaaccacccctcccccatacgtgccacaatcaaaataatcatatgagaatactgagatgcaaacaaagtatagtatttgagatcaaaacaaataaaccgaagtattgaggtttgttcagactccagagcctgtgcctttcacagctgtagtttataggtggctcatacaaatggatgatgtgacctctcagggtgcttcaaatcctcttccaaggcaattgatgttgctattttcttttgtgtcattctaaagatagtttctaactaataattctgtgtataaatttatttgagagaaagaggtatacattttatggaaacgaattatgtaaccagggatgacacacttaatcctggcagagggatgaccaaggagcatggtctacatagcaagttccaggacagccatgtgggacatactgagactgttttaattactttgtattgctgtgacaaagcacccatgaccaaggcaacaaaagaaagcatataattggggactcatagtttggtggtccagcaggcaggcatggtgttggagccagagctgagagctcacatcctgatccacagacatgagtcaaagagtcaaagagaactgactgggaatggtgtgtgggcttttgaacctcaaagcccaccagtgacacacctcctccagcaaggccatgcctcctaatccttcccaaacagttccaccaactggggtccaagtattcaaatatataagtccattgtgtgtgtgtcctcattcaaaccaccagagatcctctccaaaaaaagtaaccataaagcagacttcacacattgttctgtatcatttcattattattttaaatttacataattagtgtgtatatttgtgtgaggtcagtggacaacttgctgaagttggttctccctttccatcatgtgggtttctggggtcaaactcacatcctgagccacattgctggcccctttatgtcttgttttttaaaattattttggaaattatgttgtattcatatatagctagcagctttcatccttttagctaaactacattcttttgtttttattttgtttacagtattgtatttaaaattattcaagtatatttcatacccagggaaatcttatcttttaatttaataagttctaacaagtatgaatattaatgttgccagctgaggtggctcatacttttaattctggcaataaggagttagaagcaggcagatctctttgagttcaaagccagtctaatctttacaatgactactgggccagccagggctacctagtgagacctacctgtctcaaaaacaagcattactatggacatctctcatgtcaatatatagaacattttctaacacccttgaacatttcctgggttcttttcagtcattacaaccatcgtctcagtcttcaagtagttgatgttcttattctgtcactatagattaatttctaggtcttcagactttaaatggaattataaaatacatgcaccttgtgtggaatgacacacacctgtgatttcagcagtctggaatctgctgaataaaaggagactcatgaagccaccctggtgtgtgtgtgtgtgtgtgtgtgtgtgtgtgtgtgtgtgtgtgtgtgtgtgtgtgtgtgtgtataaacaaaataaactactttttgtttgtttgtttgtttgtctttttgagacagggtttttctgtgtagccttggctatcctggaactcactctgtagaccagctggcctcaaactcagaaatctgcctgcctctgcctcccaagtgctgggattaaaggcatgcaccaccactgcccggccaaaacaaacttctttaacccaatttgtcctgctagttttagaataagcttttaaatgtgagtgattaattttgctataagttggattggtattatatagaatctatagatcaaattcagagttaaattattggatcttttatgtatgcatttaatttgatttctttctttatttagatttttaaaaaagatttatttatttatttatttatttatttatatgtatgtatatgagtgctctatctgcatgtataccagtgtgcctgaagagggcatcagattctagtataaatgcttgtgaatgatcaaatggttactgggaattgaactcaggacctctgaaagagcagacagtgttcttgactactgagccatctctccagccctagatttttttcttagcattatttttgttttcactgtaagagtacttttttcatttgaattattttgagctgttttgtcctcttggtgatatcatgaatgtttttatatttttttaattgttgtaaaaagatatatttgctgttatattctgcaacattgtataacttattagtttccatactatatccctttggatttagataattaaatctgcaaataaagatagttttattttcccttctcaattggtatgcctttcgttttactttcttctattgcattgagtaaaagcctccaaacagagttacataaaaaggataatactgagccttcaatggtggagaaagttgcctttgtttccacattgtggaatgaaacatttattattactgtgtgtgtagtatgtgagtatgtgtgtgccatggttgcatgtattattactgtgtgtgtatggcatgtgattatctgtgtgctatggctgcatgtgttatgactgtgtgtgtggtatgtgagtatgtgagccatggttgcatgtgttatgactgtgtgtgtgtatagcatgtatgtgtgccaaggttgaatgtgttatgactgtgtgtgtgtagtatgtgagtatgtgtgccatggttgcatgtgttatgattgtgtgtgtagtatgtgagtatgtgtgtgtcatggttgcatatgttaagactgtgtgtgtgtatagcatgtgagtatgtgtgccatggttgcatgtgttatgactctgtgtgtgtgtgtagtatgtgagtgtgtgtgccatggttgcatgtgttatgactctgtgtgtgtgtgtagtatgtgagtatgtgtgccatggttgcatgtgttatgactgtgtgtgtgtagtatgtgagtatgtgtgccatggttgcatgtgttatgactgtgtatctgtagtaagtgagtatgtgtgtgtcatggttgcatttgttaagactgtgtgtgtgtgtatagcatgtgagtatgtgtgccatggttgcatgtgttatgactgtgtgtgtatagtatgtgagtgtgtgtgccatggttgcatgtgtaatgactgtgtgtgtatagtatgtgagtgtgtgtgccatggttgcatgtgtaatgacagtgtgtgtatagtatttgagtgtgtgtgccatggtgtgcatatggaagtgataggacaagttcatgaggtcagctttctccttccacttttaagtgggttcaggagaatcaggtcacctggcttgtgtagcaagtgacttacctgctaagtggtctcactggtccctggaatgttcttataatgaaagagtgttgttggatcttgtcaaatgctttttctgcatcaattcaaatggttattttacttttattgatctgtggtatgttttattgattgttttttcagatgttaaaaataactgcattcttagaataaattctgagtgatgtacaatgtacattcttttcatgtgtgtgatttgcttttgttgaggatcttgcaaacttatgaagagctatttataaatgccaagttttccttcttttctccctttcttttctttctcttctttcctcccttctctccctctttccttgtcttcatttctgttctagggtcaaaccttgtatatgcttgacagtgctgttttggttttggtgttttttttgagacaggctatcactctagttcaggctggcctgaaactcagttgtcctcttgtctcagccttcaagtactgggattaaaagacttgagcaaaatactatataaatatctatacagtcatttttggctatattggatattgatgccagggccttttgtatgctcattctatgactctggctggcctgaagtcacagggaaccttgtcagcccctggattagtgagatttcaggtgtgagtcctggtgctcagctcctggcctccttttgagctgaggttttgctcaggttgattttgggatcctcctgcatcagcttcctgaaagctgggatgtacttatgtagagtcgtgttctcctgtacgcccaggctgactttaggctcttggcagagaatgaccttgaacttcctaacttggatccttctgctgttaccgtctgagctgggcttacagcataactgttcgtttatgctggacaagcattctttcaactgatgtatattcttagaccctacctgtttcctttgaaggattcttttgctggctgtagaaatcctgtttgataactccccctgccccaagacagggtttctctgtatagccctggctgtcctggaactcactttgtagaccaggctggcctcgaactcagaaatccgcctgcctctgcctcccgagtgctgggattaaaggtgtgtgccaccacgcccggtgccgttttagttgttaaacatatcaacccaatagtgcaaaaatgataaatatacatagaatattacagttaaattaaaggggaaatatagaaactatcttaaacatagacaaaaaacattattagataaccaataatagctgacttatgacaagcagggactagaaaacaatgaaataagttctttgaagggagggccaaaaggcaaaaagttgtcaaatgctgattcagaaaggatagaacaactatgtatcagactaaagtacctttcctatagataataattgtaagttctgaacaaaatattaaaaacagatatctgaaggcactgaacatacaaaaacgaggataattagacaaccattgaaaggaaacaagtgggccggacagtggtggcgcatgcctttaatcccagcacttgggaggcagtggcaggcggatttctgagttcgaggccagcctgttctacaaagtgagttccaggacagccagggctgtacagcgaaaccttgcctcaaaaaacaaacaaacaaacaaaaaacccctaaaacaacaacaacaacaaaacaactaaaatggccaagtatagtggtatacacctataatcctagctgaaactgagacaagagaacctgaagtttggagctggactatgctaaatgagaccctgtcgaaagggggaaaaaaaaagaacaaaagttgggtagaatgacacagattgtttgctttgttttttgttttatctgtagcattggttggccaggaacccactttgtagaccaggctggccttgagcttattgatcagcttgcctttttctaatcaaaatcaggggctggagaaatggttcagaagttaggagcactgcctgttcctctagaggacctaggttcaattccaggcacccacatggcagctcacaactgtctataactccaggtccagggatccatggcaccagggatgcacatggtgcagatatagatgcatgcaggtaaaataaagtacacataaaataagtaagtctttaaaaaccaaaccaacaacaacaacaaaatgtattttttaaaggtgtcacaataactatttctaggactaaatattttcccccctaagtgagaattgagacttttttctttctttccttttttctcctttgatacaggggctcacgtagcccaggctgaatgtaaacattgtagctggtgttggccttgcctgccttctgatctgcttagtctccctcccatgttgagggattacaagtgtgttccaccatgccaggcaaagattttctattgctgtataccagcattgtgcttggtagaaagctggcaacaaaatattctgtccaattttaaaaaaagaattatttatgtgtagacactgtagctgtcttcagacacaccagaagagggcctgggatcccattacagaggactgtgagctgggaactgaactcaggacctctgacaagtgctcttaaccgccaagccatcgctccagcctcccctcctcccactttttgttttttgtttttaactgctggtattgaacagggtttcttgtgcagtgtaagcatgtactgtatcactgagctacatccccaataagaatgttgagttttagcctggtgcatgcctttaatcccagcacttgggaggcagaggcaggcggatttctgagttcaaggccagcctggtctacagagtgacttccaggacagccagggatacacagagaaaccctgtctcgaaaaaaccaaaaaaaccaaaaacaacaacaaaacaaaacaaaacaaaccaagccaagccgagaatgttgagttttgggctggcaagacattttagcaggttaaagtgcctgtcacgcaagcttgacgacctgagtcagacctcggaacccaccaaacatggaggaaaagaactaactccacaaagttgccttctgacctccatacagaccggcatgtctgcctgcactctctctctctctctccctctctctctctctctctctctctctcacacacacacacacctatttaaattttttttaaaagaatgttgaattttgtttggttaggctattaaatcatggggacagcaccttaataccatcaagacttgattgtgacctttgtcaggttgggcctttttggtttgaacataagttttaggtaccagtcactagtcatggttctcataaatagtaactcttgtgtattgaaatgaaaaattcctctaattggcagttctgacttggattcccaatatcgtctcctcagttctagatggctctgcccgtggggcagctgctctcggagtcagacatatagtatgttccacctcgggcccaccgatagccacagcaactgctttctgctttgttctttgcaatctcatctgttgtcccatctggggatttggagagaagtttaatgctaacctaggatttccttatttgttagactttctttttgttcattctgaactttgtgtgtgtgtgtgtgtatgtgtatgtctgtctgtatgcatgtgtgtatgcgtgtgtgtgtgtgtatgcatgtgtgtatgcgtgtgtgtgtgtgtgtatgcatgtgtgtatgcgtgtgtgtgtgtgtgtatgcatgtgtgtatgcgtatgcatgtgtgtgtgcatatgtgagaagacagacctaaaaaggccagaggccagattccccaggagctgggattacaggtaagctgttatgtgtaggtcctgggaactgaactcaaatcctctgggagattagtacctgctctcaaccactgagccatctctccagccccactaactatgaacttctgttttgtactctaagtgagctgagaagcactgtcaagtcaaagctattcatctagttgctttctttctttctttctttctttctttctttctttctttctttctttctttctttctttctttcttcctttctttttttttttcgagacagggtttctctgtgtagtcctggctgtcctggaactcactctgtagaccaggctggcctcgaactcagaaatgcacctgcctctgcctcccgagtgctgggattaaaggcgtgcgccaccactgcccagcccacttgcttccttccagtggttgtctaattatccttgtttttgtatgttcagtgccttcagatatctgtttttaatattttgttcagaacttacaattattatctataggaaaggtactttagtctgatacaaagttgttctatcctttctgaatcagagctctgccccccactctgtgtatgtgtgtgtgtgtgtgtgtgtgtgtgtgtgagagagagagagagagagagagagagagagaaagagagagagagagaatttttttctttttgagatgagatttcatattaataatcctggccatcctatagcttgctatgtaagtaaggttgacctcaaattcacaacatcatgctggctttaaaggtatgtgccactgtgatgaccaatcttggttgtcaacttgagtacacctcgaatcaactaaaacccaagcaggtgggtacacctgtgaaggattctcttgatcatttgtagcaggaagccagcctaatttggattatttgaggtctgaagacccaccctaaatctagaccacatcttctggtatggcctacataaaagagcaaggaagaagaaggaagcccttgctctttgcctgcttgctctcactcttgacagccgccagctcatctgctctgctgaggcagtagtatggtattcactgctattagaagctacttcagaattccaacttaaagatcagccaaggcattcagctactggactcttggccagccattgatggcctagtcagatcacagtaagccattcgaataagtatacctttaatatatagatagattcactctttgattctgttcctctagagaaccctgaatacagccaccacacccaactttttgttttaaaagagatagaatcctgctctgttgtcaggctggccccaaactcctggtctcaagtgaccaagtgactctgctaggactagactctggcccccatttttattttttcccctaagtccacaacatttgtattattaacctaaaggagcggaccagacagggtgctgacatccaagagttgcggctttgagttgagttgaatcctgtgctctccaatatgacattacacacatggcacaaagagagaaggaagatgaagactaagcagagtagaggctgagcaggagtagccctgaggctggaggaggatgtgatgtctaagaattcaggcaaggcaaggcaccgggactggagagatgtctgtgggacatgtgtcacatgaagatgcgtgtgtgtgtgtgcatgtgcgtgtgcatgtgtgtatgtatgcactagaggaggaggagagactagagataatgatggaaaggtctcagatggagcagtttgggaagacatagagatggagtggctggtctcggatgggagcagggttctttgtgacagaaggaaggttagggaacgtgatggatttgatagagttgacggaggggagaggagaggaggtactaacacgagagaccgtttgctgtgaattaagggaatgaggatattagaaagataagggaagactgaaaggattaaggtgttttatgatttatgttactgtgtgacaacccatcctagtgattagtggcttaaaacaagattatttttaggttatgagtccaggttggttggttggtagtgtgtgccgtgcgcaggattctcatctcttctccacaaagccatcttggtttactcataggtctggctcaggtggatgtttaagcctctctccagggttttaccatcattagggcggcctgaggaagcttcttcacatttagtcaatgatctcaaaggcattgagtgaagctgtgaagcctcttggggatcaggctctggcacccatcttgttaactttgttggttacggtgggttttaagagctgctgagcatgaagggaaagcgaagaaactttgactctttatttttagatagggtctgactagcctgtgctaatgtcagaattgctatattgttcaggctatctcaaatccgtggcagtcctcctgtctagtctctggagtgttagaattacaagtgttgagggtatgagccagtattcctggcttagacttcacatctagaggcaagagctgtctgtgtttaagcttatcgccatcattataagagagggaaaccagcttcctaacgagagattaagaatccaggctacattaaacgattacttaattgaggtttgtggttatttagaatgagtaggggccgagctagattattcacagaagccttctctgaccagtgcttcccctaccagccttcctcacccatgactaaagacagttactgacgtttattatgggtttacagtgctgggcatatgttgggcactttatataaattacatattttggtttgtgtttggagtgtgtgtgttttctagatacagttttactccaaacctaggctggcctgtaacacaatgtgtaactcagactggccttgaaatcaagctaactctcctgcttcagcctctttgagtgctaagatttcacacttggctccaggttatcttgtgaggtatatactttcatgttctaaatcatgtattagagggcacaaacacaaaattgaggacttgaagaacctaggaatggctgacggcacaatccatgttttctcaagaaggtagccatattctagtacacttaataaaaggaagagaagtgttcaaaggaagtgtaaaagaaatgaccaagatggtgaccttccacttttggcctgtgaatggaagtcacagcagatagcactgagtagtgctgagctctgagtgactggccgtctcagtgcccacgcatagcaaagtccatacagcgctgggcttggcgatgcttctcctcacggtggctgagatggtcctaaagtctgagctccttggcttagttcctgtgctgctgtttgcggttcagctttgcctactgccccactttcctccctggtgctttttagtgtcatgttgtggcactttgggttttaacttttattttattattttgaggcaggctgaccttgaactcacagagtcaatctgactctgcttccccagtgttgggattaaaggcgtgtgccacccccaagcccccaaatcactcttttgactggttgatgatagcacacttctttaattccagcattcagggggcacaggcagggcacaactctgagtttgaggacagcctggtctacagagtgagttccaggtcagccagggctacacagagaaaccctgtctcaaaaaaccaacagggctggagagatggcacagaggttaagagcactggctgctcttccagaggtcctgagttcaattcccagcaatcacatggtggctcacaaccatctgtaatgggaactggtgccctctgctggtgtgtctgaagacagctacagtatactcatatacataaataaataaattaatcctacaccatgcctagtctgtagtaatttttttgtattgttgttgttgttattattattactactacttatttgaaacaaagtctcactgtggagccttagtagcctggaactcactgtataaaccaggctggcctggaactcacagagatctggcaccctttgtctccagagtgctgggattaaaggcatgttctaccatgcctggctgttgttattgttacttttaattaagtgtatatgtttgtggctctgtgtgtgtgtgtgtgtgtgtgtctgtgcctgagagtacaggtgcctttggaggctggaggcatcaagttccactggagctagagttataggctataagctgcactctgtgggtgctaggaaccgaactcaaatcctctgcaaaagcagtgttagtcttttgtttgtttgtttgtttgttttttttttgagacagggtttctctgtatagccctggctgtcctggaactcactctgtagaccaggctggcttcgaactcagaaatccacctgcctttacctcccgagtgctgggattgaaaaagtaggccaccactgccctgcatgcattagcgttttgcctgcatgtatatctttgtgagggtgtcagatctttgagctgttatgtggatgctgggaagtgaacccaggtcctctggaagatcgatcagtcagagctatctccccagccccagttatgtgttcttaaccattgagctatctctctaaccctggtaatggtttttttttttttttccaaatttgtctttagctgttttcccctaagagcagccacagtatgccctctcctgctagccttagccaaaggttcccattctggttctgaacactgctgtactgagaacaagcagagagtgacaactctgtccctagtgagtaggttagtataatgtgtctgtggctctgttattgcttgggggtgactgatggcataacatctctgtgtcctggaaccgtgtgctcttttctattcaccagtcacattcaccagtcatttttctaagactgcaaacttgatcagtgacagaaactggtctgtaggcagggggtattctgctatagtctggcctgtttactaccagttctatggctggttggggtcattgtttgatttcatgatgagccaagtctctcaataccagtcgtgagaatgtgtcttcataatgtcgagcagctctgtccttaattggaagaactgccagttaagagttaaggttttactttttatcgtgccttcatcatatctagcagataagatgctcctgtgaaaaccaggggacactgagagcctggcagagcccttgatgcttttgggacttagtgttgaagttacctttctgagattttgctgggatacagactactctctcgagagttagacgacccaggagcatgcaaccacaagcaaaccaagcctaggacagcactgagtgctgccagctgcccggtgcttagtcctcactctggagcacaaggcaggtactgtgctctaacccccagcctaatcatatttggaggtgagtctttaagagatgattaagctaaatgaagacatgaggataggactctcaaatttggattagctaagatggcgccatctgtactaggactagaacctaccagctccttgattttgacttctactagattctttttttttttgttttttcgagacagggtttctctgtgtagccctggctgtcctggaactcactttgtagaccaggctggcctcgaactcagaaatccgcctgcctctgcctcccaagtgctgggactaaaggcgtgcgccaccacgcctggcttttttttttttttaattaggtattttcctcgtttacattttcaatgctatcccaaaggtcccccatacccaccccccaattccctacccacccactcccccttttttggccctggcgttcccctgtactggggcataaaaagtttgcaagtccaatgggcctctctttgcagtgatggccgactaggccatcttttgatacatatgcagctaaagacaagagctccccggtactggttagttcatattgttgtttctactagattcttaaaatatgagaaataactactgttttaatgccccaacctaagtgttttaacaagttgagctaagataccagtcagtggaggacttaaagtctagtgggctgagatcaaagggtaggcaggaaaacatgatggcagaaaagggtgtttttgtttgtttgcttgttttctcttttctttttttttttttttttcgagacaggatttcctctgtgtagccctggctgtcctggaactcactttgtagaccaggctggccttgaactcagaaatccgcctgcctctgcctcctgagtgctggaattaaaggcatgcgccaccaccacccggctactggcagaaaagtcatgcatactgaccccacgtcctgttggcttcagagtgcatcctgcaccgtactggcctgggcagggctaaaagtgaaaatggttacaccaatggagatgtggagctagatgtggggctcatacctgtgatcccagcagactgaagtagaaaattctagtttagatccagcctgggttacattgtgagttcttggccagtctaggatatagtaaaaacagacaacatcaacaaatagatttggagattatgctgggcatggtagtgcccacctttaatcctggcactctggaagcagaggcaggcagctctccatgagtttcaggctagccagggctacacagtaagtagtttgtagccaaaccaaaaataaacaaaaactttggagatttaaaagatatatcagctgggtggcgatggtgtatgcctttaattccagcactatggagacagaggcaagcagaattctgtgagttcaagcccagcctggtctataatgtgagcttcaggatagccaaggccacacaaggaaacccggtcttgaaacacctccttcaaaaaaaaccaaaccaaaccaaatcaaaccaaaccaaaccaacaacaaaacaagctttcccctgttgattgtcttctacatggtgtttctgtaggtgagcatctatcatgtccagcagcctcatcctacctgtcttctccatccagcttccttccttctgcttacactatgttctagagtgactgttctagaaccctgtgtagagcaatgagggagtgaagaaaggatagatactggagccaggtaggttgtgtgcaccaactaccaatatgggggagttcagcatgtttattttgtacagcacagtggggaagagttaggcaggaagtatctgtaagagatgcagatgcctgagacttcaggctgtaaacatctgggaaaagagaagttccattgctagggtttttttgtacttactggtcagttgtttgtaaacagaggaacttggaccaggagccagctttgcctctcttagctgacccaggggaaggcttttccaacttcccatgaatcctaggccttggtccctgacatggcaggctcatatcaaacaatccctcagagctgttcagggtctcctctgttccctacactgccccatgccaaagggctttgtgttgcagtgcttgctttaggaagtgacaggaggatcaacagttgggtggctggcacttttttattgcctcagtgagaaaggtttgcattacagaggtctagaattgtaggatgctcacttttgactgaagctggtatccccgttttccctttctctttttcgtgtctggagttagtctacactgtgctgtgcttgctcctggacagatacgcagacaaatttgttcctcaggcagttctccatatgctttataaggattttaagttttcacttaatttatttgtggagatgggtctccactttgtagatctatgcctctgcctcccaagtgttgggattaaagctgagcatcactattcctcactcgattttaattttatttttaattatgtctgcacatgaatgataatgttcttggaggccagaaggatcaaatcctctggaattggacttacaggttgttgcggtcactcggtgccactcagtgtagaggctgtcaaccaatcgtgagtcttgggcaagaccagtatttcctcttaatagttgaggcctctcccaccccaaactctgtctgacacactcatagacataggtgcacacacacacacacacacacacacacacacacacacccttaatgtaatttatttttgagataaagaccatgcctgacctaggcttacttgtagattaggctggccttgaacacagagatcggcctacctctgcctcccatgcactgggattaaaaacttgaactgctactacacctgactggcaggtctttaaaaaacaaattaaaaaaaatagcacaaggcttctaatttaaaattctgggctagagagatggctcaatggttaagagcactgattgctcttccagaggtcctgagttcaattcccagcaaccacatggtggctcacaaccatttatgagggtatctgatgcccctttctgacatgcaggtgtacatgcagcagagctgcattagatagacagacagacagacagatagacatagaatattggactgggcatgtgccttaatgtcagcatttgggaagcagatgcaggaagttctctgtgagttcaggacagtcagtactatatatagagaaagaccctgtctcaataaacaaacataaataaacaaaataaaatctcttaaacatttttatttatcgtgtatgtgcatgtaaaatatatgtgttgggcaggttgtgagggagtgtttgcaggacattcatacatttggacaactttttggagctgttgggtttttttttttaggattttatttatttaatgcatatgagtacactgtagctgtcttcagatataccagaatctgttacagatggttgtgagccaccatgtggttgctgggatttgaactcaggacctctggaagagcaggcagtgctcttactcactgagccatctctccagccccctggagttgttattttttttccatctacttttttttttctttctttttttcaagatgggcttaccgtgtgtccctggatacatagcttggaatttgttctgtagatcaggctggcctcaaattcacagcgatcccaccctgctccccaacttctgcttcctaagtgctggactaaagagccgcatccccctgcccagcctctgtccatctgcctttccgtggcttctggggacagaactcagtttgccagcttgacagtaaataccttttacccactgagctgttccggccctactacattcaaattctatagctacttaacccttagttatttttgtaagtaatagaataaaagataatggcgtgtatttgcgtattactattctaaagtgtttatattattattattactattataatttttttttgagacagggtagccctggctgtcctggaacttgctgaacctgactgcccttgaactcacagatacccaccagcctttgcctcaccctgcccaacacccgagtttaggttagtgatgaattagtgatactcctattgcagcctaccaagtagctgggctaccaatttcaactaatttttacttagctgtaataaaatatatgtaatatgaaatccaccactgtagcagtctatactatatgtcaaccccagaactaaaaaacaaaacaaaacaaaacaaacaaacaaaaaaaacgaaacatttttttacagaacttttttttacctctttactcttttgccccctgaagtagaataaggtaggaaaggccagttaccacacattggtttgctgttatattcagtgattcactcagagcactgctcgaactgccttttgccaagcatgacttcatttgctacatggaacagctgacacagtggatcccgagaacctggccagtcttgctcacttgccccaccttatggtttgagaatatgaaatgagaaggcaaactgagcccagtacctttcaggagctatctgggctttcaggagctatctcctcctcctcctcctcctnnnnnnnnnnnnnnnnnnnnactggatagccgagagggtggttagtccggatagcagctttgcgattcgcttctgtgggaaattctatgtctgaccagtgcgcgtggtgggatctctagcttcctgatgctgttacgggtactctctcgtttcgtaggccggttgcggtcaacgagggtgagcatgcgcagttcgggccgtgtcgcggtgcacggctagggaagttggtttgatagggaagaggctccccctcccctcccctcccctccttctctcattggtgttggagtgcttattccagagagattccagagcacctgtgatgctggaacttgcacccaggaattaccacatgccaggcaagcaccggtcacagaatatacaagccagccccatgtgctgacctttctgtctttgacactaagtgctttaatttcctcatgtgattggaactgtgtggtatttgggttttaatttaaagacaaggtttctctatgtagcccggctgtcctggaacttgctttgtagccaaggttggcctggaactcacagagatccacctgcctttggatttcctattgaatactgagcactgttccaccgttcgtttatacacatgttctttggtgttggggttgtatgcatgctgtatccatgctaagcatatacttttccactgagctacactcctcagtgcctgtgtcttattttgtctattctttcggctgttgatgcacactgcagttgtttctgctttttgtcttttgtctttccgtcaggtttttttctttttttgagacaggatcatttcactttttaattttttttttaaagatttatttatttatttatttaaagtacactgtagctgtcctcagacactccagaagagggagtcagatctcgttacggatggttgtgagccaccatgtggttgctgggatttgaactcctgaccttcggaagagcagtcggtgctcttacccactgagccatctcaccagccccactttttaattttttagttgacacacaggacaattgtaccttgtttattattcatgtttcattactttcccatgtcctccttcctgctggtctccttcttcctcccatatagtatcctcttttactctcacacctttatgtgtgtgcatatttgcattaaatacataaatgtctagattctatgaggaaacatgctaggaagatcacctgtgaaaatatcttgcttatatcgtgtattcaattcaagaaaaaatcgaaaaacattgttctgttttgttttagtcttttttcttctttctccctctctctgtttctctctctctgtttctctctctgtttctctctctttctttctttctttctttctttctctctctctctctctctctctctctctctctctctctctctctctctctctctctctgtctctgtctgtctctgtctctgtctctgtctctctctctctcccgtctggccttgagcccctgagagctgcctgatgagtgctgagattacaggtgtgtgccagtttgcccagctgcttttattttattaatgtacatgcaattctacatatttttactgcagtccttggagttagttatgtctttgaggaatgtgtattgtttgaggtagctaaagagcacagtttatagtgcttttcttctacaagttgagaggaattatcagttagcttgtgctcaggtgtgtcctgttgtttccagggagtaccatggccatggcaactcttataaaagagaacatttgactgggctggcttatagtctcagaggtttagtccatcatcaccatggtggggagcatggtaccactcaagtcaggcatggtgctagagaagtagctgagaactttacattctgatctgcaggcagcagagagacagggacactgggcctggcgtgggatattgaaaccgcaaagtccaaagctggatgtagtgttgcaggtctttaatcccagcacttgggaggcagaaacaggcagatctctgtcagtttgaggccagctttgtctactcactgagttctagaacagccagagctctatagtgagaccctgtcttgggaaaaaaacccaaaagccaaaaacaaagaacaaacaaacaaatgaaggaataaaagaaagaaaagaaagaaacctctaatgaatgcacagatgaaagacagaaagaaagaaaagaaaagaaaagaaaagaacctcaaagtccacctccagtaacacacctactccaaaaagggtgccctccgaatgctcccaagaagtttaccaactggtggttacatgcaagtctgtgagcctacagggtccgttctcattcaaaccaccacaccaggaatgtgcatttgttaatggatttccagcactgttatgaaactggaaagttccttgcagtctttctcatgccctcaggttctttttatttttttaaattgtacatgattaccaaaagccactttaatgcaagtctattaatattctttgagcacattctctctatcctctgctgcaattttcttttctttcctcactcccctctgtccctctagacaatcttgtttctatgtatctataaacttcaggacctacaagggaaagaaaacatgcaacattgtctctcttagactgacttagttcatttaatacctgtatctccagatgcaaaagaaacaaaacaatgtcttctagtgttgcccaggctggcctttaactcttggcctccagagatcctttttctcagtcccctgagtacatgatactgtaatcacactcacagcacccattgtctgtggattgtttggggtgacgttctagccacggacccagttagtcaaatagaatggattcatattaatactaaattatttttgtttttcttccagacagggtctcactctgtagccctggctgtcctggaagtctttctgtagaccagtctggccttgaacttacagagatcttcctgtctctgcctcctgagtactcagatcaaaggtgtgtaccagcaccgccaaggcaatactaaatttttgaagaataagtagcatgagtttttttagttccataattatgaaatgttctggtgatttggatactaactaaaggtaatgtgtcaggtttatgtcagtgtgaccagataatgacaccagataatgtgaccagctgagcaaaacaaaccaagggtagaaagatgattctgggctcacagtcagtttcagaggctttaatctatcatgtcaggtatggtggaacaaaaagtagttacattgtgctggcaaggaagtgtgtgtggggggggagaaatgcctatatacctatactagcttgcttctttctccgcctctcccccccttaccccgttttttttttccccagacataatttctctgtgtagtcctggttgtcctggaactcactccgtagaccaggctgtccagagacgcagagatccacctgcctctgcctcccaagtgctggaattaaaggtgtgtgccaccactgcctggcttcattttctccttttattccatttgtattcctagtgtaagaattggtgctgtctattccagtgtaggtcttaatacacttaattaacgttctctaaaaacacactcagacacaaccagagtgtgtttaactaattctgaccactacaggtctatcccttgtcaacttgttatccaaacacatctccttaaactgtaataatccatttttgactcccaaaagtctcatgttgagagtataatgcaaatctatctttaagaggtctggtagttttaatagttctttccagtgttatttaaaattctaaatccaaagcttattctaaaactctgaaaattctaagctgtaagttctgtaaagtaaaaaaaagtcacagccgggcgtggtggcgcatgcctttaatcccagcactcgggaggcagaggcaggcggatttctgagttcgaggccagcctggtctacaaagtgagctccaggacagccagggctatacagagaaaccctgtctccaaaaacaaaaacaaaaacaaaaagtcacatactttcagtatacagtagcgtagattcttaataatgtcaagtttttcaaatatttccaaaagaaaggaattggagaatagtgaggatgtatctgactagagttgggcaggccacagttaaatcttgtagatgttctcttgcttggctagatggcttagtgcataaaggcacttgctgccaaacctgacaactgagtttgattccagggacccatatacaagtggaaaggagagaactgacaaccacaagttgtcttcacctctccatgtatgccatggcatgtacacacacacacacacacacacacacacacattgatgtgtgtacacaaaccctgtagctccatgcattgatgtgtgtacacaaaccctgtagctccatgcctggcatttggagcaggtgtgaggtgtgatgtaagttcccaaggctgggtcctgaacagcttatcacccctgtagccttgctggttataaccaccggcctttttttctcttgggctactctgttcacttgctgtagttttcccagcacacattccatgtttgtgacaactctgacttctggagttatttctttattttatttttagttatgcacataggaaggaggtatacgtatatgagtgcaggccttcataaaggccagagacatcagatagccctggagttacaggtggttgtgggctgacagatgtaggtgctgggaattgaacccttgtcttctataagtgtagtgtgtgctcttaactgttgagccatctcactagccttatttatttatttatttatttatttacttacttacttattacttactgtgtaatccatgctggcctcaaactcactgtaatcctcctgcctcagtcttgccagtgctgggaatacctatatgagacagcacatttggctcctggagtctccattgaatcttggccttacctttacagagttaagcatcactctctccagggcctttctttggggatccagaccctactacacattgcctgaccttccagacttttctttgaaaccagaatggaagcctcagtaattttatgccttagagtttctatagctatgatagaacactgtgaccaaacgcaatatggggaggaaaggttttattttgtttacacttctgccttatagttcatcactgaacacagggcaagagcctggcgggcggcaggagctggtgatatagaggatatggagtggtgctgcttctggcttgctcggcctggtttttgtttttgtttttatagcactcagactaccagccctgagcatcatatgggcagtgcccagtctgccgccagcttggtcagtagctggcaccccttggaccatgggtgcttagacggctgaatgtgcgggaaacactttcctaagtgcctgagcatgagtcggatgcctagagctgtctttcaaaagacataaaagctttctgcctcaactaaagtgatagtggccggttcctattgtcctgatgccaagtacttggcttctttctaagcacctctgcctttccaacagccacacttccccaggcccccactttccatggggtgctttgctgagcaagtggaaagctttcaggcctttcttctgccgtgggtctgctcatacccatgctgtgagcttctctagatagcgcagccacttatatccatgcttcagcctgaacgccagcatgcagtgagtttcctgtgctagataatcagctaattcatcacttttttaagatcatggttttgtcttcttcaggttcctttctgatcctacttactcaacttaatggttttgtttttttctgtctattttcaaagaaacaaacgaaacaaaaaaaacaaacaaataaacaaacaaagtcaagaaatacaattcctcctacaaaacaaagataaaaaaataaacaagcaaaagaacaataagacaaaaaaaatattcaaagcaaaatgaagcaataagtccacagggaagagctagggaggctgggatctgcaccaagagacagagtcctcagtgagtggagacggcaggaggggggagctcttgcaggtaggctgctacaggactaagactaacccacacacacacacaccacacccctgaaagatcagcagcggggatagacaggaaggagagtgaaaattgcctttcgttgtaccagcccagcatgccactgggaatccctggtaaaaagagtttttgaggactgctggctgacacaaaggagtggagaagccagaagggaaagctgaatctgaaccaagaggcagaggcctcaggaaatgagtagggtggaggagcctctgctgagaggctgtggtagtataaagaggaagtctggagagacaggaatgaaagggcttgggagaccctgggcctgcaccagaagctagttgttcacctttaacttagccttcaaggagctagagggattgctcagtggttaggaattctgactccttatccagaggtcccagattcaacttacagcacctacctggtggctcacagccatttataaatccagttccagggcatccaatccccagacacacattcaggcaaaacacccatacatattaaaaacaaacaaacaaataaacccagcctccacacagtctctattcactgacagaatatagacgaattttccccctgcaatgtaatacaagtggcctgtaatccagttcctaatatagatgttgcttctatatagaattgctctttctttcccacacccctgtcagtattctgatcttctgagatcccagcagaattacatagaaatctcatcttgtagcatcctaaagtctttctaatgtctttctccaagctgttccaaatacctccaacaatcacatgagctctggagtcttaagaacctcattgtggctgggtgtggtggcacacacttttaatcccagcatgtggacggcagttagatctctgagtgtgaggccagcctggtctacttagtgaatgtcaggccagccaaggcctcattgtgataccctgtctcaaaaccaaaacaaaataacaataaaaccttacactgtgaatctggatatggtggggcatgcctttaattcagcacagggaggcagtgaaagaactttctgtaaggccaccttggtctacatagtcacttccaggcctgccagggctacataaactgtctttaaaaaaaaaaaaactctcaaaatacaaagaaccctattgtttagtcatgacagtgcctactccccccgaatcattttaatttaaatgagtattttgcttatatgtgtatgtctgcatgtgttcatgtgtgcatgttgaatgactgtggtgaccagaagagggcatcaggtcccctagaactggagaattggatgtgggaattaaacccagatcctctagaagagaatccagtgcttataacagtagaaacacagtcccagcccggctggtgtgttggttttacatttctgtgacagaatacccatataaacaacttgagagaagatgattttgtttcataggctgagcagtcttactctttcacagtggggagaccatggcagagcagaacagctcacgtcatgggaaccaggaaggatagaaaagaatgaggggaaggagggaaggaaagaataagacaaagaaaaagatagaaagctcttagctagcctctccttttttctgctattcttttttcaggccctgagcgtattagatggtatcaacaatacattcaaggcagatctttccaccataatcaatcatctcttggatgccttcagacacacccggaagtgctttatagcttcctaggtgcttctcagtcccatcaagatgacaatcacaataatggctcttgatttcttttcttttcttttcttttcttttcttttcttttcttttcttttcttttcttttctttttggtctgacattttcgttagtgtgataacattgtcagctacttgacaggattagaatcacttgggaaatggccatgtctgcagactattctgattgcagtgactgaggtgggaaggcctgcccactgtgggcggcgccattctgtgcgcagaccttagactgtgtgaggagacggtgggctgagtacaggtggtttttgactgcttgcccccagttccttctgaagggcctggaacggagagctaaaccagcccttccttaagttgttcttgcattttatcacagaatcaggaaaagaaactaagatgcaaaattaactctataaaggaaaattaaatactttttcttttattttcaggtaaaccagccaaaactattccctgaatgaaaacacctttttttaaagttgcatatatacacaagaaaaaaccgaaatgctttttattttgcctgaatgcaagatttaaacaaggtattgccatagaaggtaaggtaatcttttcaattaaattacagtttataatgtacaggttactcaaatatattttatagatggacatttgtaggtcagatgataggatctcactatgtagacaaaactggttggttgtttttggttttaagacagggtttcactgtgttgcctgttgtggaactagcactttagaccagacaggccttgaacacaccgagctatatctgcctcttgtctcccaagtgccccacccccacccccacccccacccccacccccagctgctaaagttgctcttaaacttaggattctccagcctctgtgtcctgaatgctgagattacagctgaacatcacacacctggttaatgccatttcttgctagcattttgttgtattagacattaagataatacccaaagggcgagagaggagagaggacactgagcattatgacggctctgttctgctctgtagtgaagaacaaagcatgctctgggcattgcttccttttctgtcactgtgataaaaaaccaaagacccaggtccacagatttaaggagcatgttttatcccaactgataggaactgaaaaggaaaagggctggcagcatggtttgatgggtaatagttcttactccaggagccggatgacctcagttggatccctggaacccaagttggagggagagaattgacccccaaacattggtttttggtctctagatatgtgccatggcatatatgcgcctgtactgacgcacattacacacacacaataatgataaataaagcttatttgtttattctttaaattgaggcaaactctgtctatgtagccctggctgtcctggaactcactatagaccatgctggccttgaattcacagtgacctgcctctgcatgggccaccaccacacttgtaattgataaattgtaaaaagttaaaatacaaaaaagtaagagctgatttgtggctgggtcaatgatcagttgcagtttagattctaattctctcttggcaacagtctctaccacagagtgttctgttggaccctttcatggaactgtagcatcatatgggcgacacttgtgtttgaatcctatcctctgtcttccggttctgtcaccctgggaaataaagaagcaggacttgaggctcctttcactcattcgctgctgggtaagcgtgtagcaggcttggccgtatcttgttgttctttacagtctggaaggaatctcaaggacagtagtcaaagtgggaagagcatcctgctgtgtggatgtactaagtccaaagctggcttatggacaaggatgctctcagtggtaacctgccagtcatcagtggatagttaagcatctctatggaagacaggatgtagagatcaggcatagtgtttgacacctgtaatcccaggatttgaaaagctgaggtaagatgatcaccataaaccgggcgtggtgccgcacgcctttaatcccagcacctgggaggcagaggcagtaggatttctgagttcgaggccagcctggtctacaaagtgagttccaggacagccagggctatacagagaaaccctgtctcaaaaacaccaaccaaaaaaaaaaaaaaaaaaaaaaaaaaaaagaaaaaagatgatcaccataagtttaagaccagcttgtatacttagactctacttctattaaaacaaaacaaaacaataaagtttgaaaaagaaatattcaacaattggacctacaagatggctcatcagctaaaggcactggtgaatttaacagattaaacatatttaagacagaattagtgaatttaataagtatttgaaaaattattcagaagttgaactgagagatgggaaatagaagttgagattaagtaaaaatagaggttacaataaaaggacggtaagtggatagtgggaattccactgtaaaaattgagaagatggagcattataaattttaaacttttcaaaaacttgtaagactgaagtccatatagatttaagaagtgtgctgcatccgctgggcggcggtggtggtgttcacagctcgtgaggaggagagcggtgcacaaatccctgtgaagagagagctgccttcctcccccttgggcagtccggaacccagggacgagctgcccagtcggtcttcccactgacctgaagacgctcactccctcacagtgtgctgggccttgtctcctaggggattctagatcctcttagttaacagtattaatcaccacaccgtcctctcacttctaagttttaaaaaagttttatttattttctgtatgtgagtgttttacctgtatatatgtctgtactattcgtattcctggtgccttcagatgtcagaaaaagacaaggatagaagataccccagagctagagttacagactgttgtgagccaccatgtgggtgctaggactcaaacccaggtcctctgcaagaacaattagtgctctcttaacccctgcgccctctcctcagcttctgtctctagaactgtgtccttgttgcttgttctttgaggtagggtctttctaagcagctctggctcttctggaacttgctatatagaccaggtgaaccttgaactctcagagagccacctgcctctgccttccaaatgctgtgattaaagttatgtcgcttctaaaattttatcatctaaaatgttatactggagctaggcatggtagtgtactcttaacctttcaagaggctgaagtgggagaattgtttgagcccaagaggtttaagatcagtctgggcaccatagtgagactatatttcaaacaaataaaacaagcaaagcaaaacccaccaagttgttaattggatcatagagtgcaatcttttggaaatgatctattttgcccagtaataattttctagacacttaatcagttttttttcactcaccagtatttcctttgtggaactgggactataactcagttggcagagtgcttgcctgatgtgaatgaaagccctggacttgagcccccttcagcagcaggaggcagaggtggaaagactaggaggtcaaggtggctcttagctgtggagcaggtctgcggctattctggcaaacaggacactctggctcaaaagcaaagttttcccaatcataaaacacctcattcacttacatgaacttaacacataggttcttttttttaaaaaaacatttatttatttattacatgtaagtacactgtagctgtcttcagacactccagaagaggacgtcagatttcattatggatggttgtgagccaccatgtggttgctgggatttgaactcgggaccttcggaagagcagtcggtgctcttaaccactgagccatctcgccagccccaacacataggttcttgacagcggtgcttggaattgtacataaaatttttcatatgacatgaaacaagttatttccttgttaactgtttctatagcatatgcatgttaggcaagaaaataaggaaagattcatgaatttttatatcttccttgcatggggccatgttagtctagcttagtatgtgtattaccaaagtgggcatagataggcctttttgttaccccattttccttactatgttggtactacgtgttgtgctatagcctgcattttgaaggctgtccaggtagatcccagccttcctcacacccctttttggttagcatacaaggacatgaacttcattatgtgagtctagctttgttgtttagtgggtttgttttatttgatacagggtctcactatgtagccctggctgtcctagaactcactctgtagaccaggctagcatcaagctcagagagctcttcttggctctgtctcctgagtcctgagattaacagtgtgctctgatgctattctagcttttgactgttacaaattaaactgctatcaacatttatgtgaaggattttatgtgaatttaaatttttgtttccctaggatcaatgtccagggccaaggcagttttatttgtatggatttctgtttactgctgcattatagaggttgcagaatcccttaaggtttgtatgtttatcatgcttggatcttttctttcttacctgtataaaacagtgcctcttattgttttgtttttttgccgtaaagttatttatcaaatattaacagtgaatctcagcttttggtttatatttgcccactgtgtgtttcagttgtcgtatttctgcctctctcagtttttaaagtatatgttgtttgtttgtttgtttgtttgtttgaaacaaggtctctgtgtgtccctgactgttgtggaactcactctgaggttcaggctgcttgaactcacatagatctgccttcctctgcctcccaagtgctgggaccaaaagtgtgtgtcatgacacctggctaaagtatattgtttatagtaaacattgttgaaatgtttatatccagtccaagagacttttactttggtaggtttatcctgtgtgtgctgtgctcactgatgttattagtgctggttcctgtcattttaatgttttctacttactgattctttagttttgttttcatttcttgtttcctagttttgttgacaagattatgggaggtgtttcattttggccttttcttttgtttgttttattgctcttctcttagttatgtattccttttgtcatggatattaagagatttagtaataggtgtaatcccagttacgtggcttttatctgttctctttccactgtaacatagctataactatataactatataacataactataacatagctataactatgtaactatataacataactataacatagctataactatgtaactatataacataactataacatagctataactatataacataactataacatagctataactatataactatataacataactaacatagctataactatataacataactataacatagctataactatataactatataacataactataacatagctataactatataactatataacataactataacatagctataactatgtaactatataacataactataacatagctataactatgtaactatataacataactataacatagctataactatataaagtaactataacatagctataactatataacataactaacatagctataactatataacataactataacatagctataactatataactatataacataactataacatagctataactatataactatataacataactataacatagctataactatataactatataacataactataacatagctataactatataacataactataacatagccccttttccttgtcatatcaacaggaagagaaatgcctatttagtcattctggccacatgaatggctatatccaaagaatgaagtttagttgatagagtaataaattgctattggatgtggtagtatacatctgaaatcctagacttttgtggatgctgaagcagaggaattttgagtttgaggccaactttagctatactggataaaccaatcttaaaaaagagagagagagagagagagagaccaaaaccaaacaaaatacttgattacttgaaatgaacttgacgggccaggtgttactgttgtgctgtttttacgtcatgcagattgtgttgtcttgtttctttcccttatctctatctctttctgagacaagctctctgtatgtagccttgtttgggctagaactggccatgaggattaggctagtctcagactaacagaaacctgcctgcctgtagtcctggctgtcctaaaactcactgtacagacgaggctgaccttgaactcagagatctgcctacctctgcctcccaagtactgggattaaaggcatgcagcaccattgccaagctcaggcccatagttagttttatgtcacctaagctagaggcatttgggaagagggagcctcaattcagaaaatgcttccaccagattggcctgtgggccaatcatttttttgattgatgtgggagggcccagctcattgtgggctggtagtcctgggtgctataagaaaacaggttgagcaagccatgaggagcaagacaccactaaagagtgttccagcaaaggcttcatcttcattcctgtccttgagttcttgccctgccttccttcagtgatggagtatgatgtggaagtataattgagataaacccttttcactctggtttgcatatgatcatggtgttttgtcacagcaatagaaatcctaagatggattggtacccggccatgggatattgcaatgacagtcctgaccatgtgtttttgggagattcatgatagcaattaaactttgggctgtgtactggatggttttgtgtatcaacttgaaacaagttagagtcatcagagagaaaggaacctcaactgagaaaatgcctctatgagatccagttgtagggcattttcttaactagtgatcaatagggaagggcccagcatatggtgggtggtgtcctgagttctataagaaagcaggctgagggctggagagatggctcagcggttaagagcgctgactgacaggacagccagggcgatacagaaaccctgtctcaaaaaaccaaaaagggggctggtgagatggctcagtgggtaagagcacccgactgctcttccgaaggtccagagttcaaatcccagcaaccacatggtggctcacaaccatccataacgagatctgacgccctcttcttctggtgtgtctgaagacagctacagtgtacttacatataataaataaataaatctaaaaaaaaaaaaagaaaaaaataaataaaaagaaagaaagaaagcaggctgagcaagccatgggaaacaggccagtaagcagcatccctcccccatggcctctgcgctagctccctcctctaggctctcacttcctccagtgaggactgtgatctggtcgcgtaagacaaaccctttcctctccaactcactggtgtttcgtcacagcaatggaaaccctaagacaggctggaaaggccattgagtgctcactgctccgtgggctgttctctaggaactcaaaaggtaatgctgagagctccgctggtgacaaggcctggcttgtgaagtttcagaaggaagcagagactcaaggccatttttgtgatattttggattaagaatctgtggttctggtcagctgggactgaagaattggctgtgattaaggagagactttgttttggaatgaaacgttgttttgatataaatcgatgctgattagctggagctgagaaattagtggtgattaagaagagaccagccaggcgtggtggtgcacgcctttaatcctagcacttgagaggcagaggcaggtgtatctctgagttcaaggccagcctggtctacaaagtgagttccaggacagccagggctacacagagaaaccctgtctcaaacaaccaaagagagaaaaagaaagaagaggccggtggcattgagaattgtaagatgctctgtacagagggagctgaggctgcggctgggcacataagaaagcaaaccgagtaaaccagggtggagtgagccagtgagcagggtttctctgtggcctctgcatcagttcccaccatgactcctagtggactgtgatgtggaagtgtaatctgaaaaagaccccttccttccagagttacgtagggtcagggtgctttaccacagcagtagaaaccctaagactcaggtaaactgtgacctcactcaagacctgactctaatcctagcctctatgttaccccacattccccccatcgcatgtgttagtctgtgccatatccctggccctgagcagcctctggtctccttgcctcgggtctgttttacactttgtgaattccatatgaacggagctatcggccttcttgccctgtcactccctgtgctgtgcttgttctactcagggaggaagggtctgttatatgggaggtaactcacctgttgacagtcatttgagctgctccctgtgtgtaactgctgtgcatcaggctgccaaccttctctcaggtttgtataaacataggatttaatttttcttacattgaccctgagagtaaaactggttgatcacatggtaagagtacacctaactttatagcttttatacctttttagctgtcagattcttttcaaagtgtgtgtgccacagtgtgctcccttcctggaagtggaaaggagtcagttgttgagctcctcctcagctcctgggcgcctttttgatggtagcggtagtaggtatgcagtggggcttcactgcagtcactattgactacggtgaccctagtgtcatgaacttaccactggcgtgtcattttgagacaagatcttactgtgttgccaaggatggctttagatgcatggtcatcctgccttatcatcccaaattcctggataaaaggtgcaaattggcatctgtatctttctatcttttaaaatgaagaatctccattttgtttgtttttggagacagggtatctctgagtaacagtcttggctgtcctggaactcgagctgtagaccaggctggccttgaactcacagagctctccctgtctcagactccctagtgcttgaatcaaaggcgtgcttcactactgctcggctataaataatgtttagtatgtttatgaactgccaagctttgctttttttttaagcactttgtcatattatcttttgttattgatttgagatagtctcaccatgagggtctgactggtctggaactccttatgttgatcaggctggccttgaactcacagcaatccacctgcctttgcctcccaagtgctgggattaaagacatgcactactgagtctggagaatattacatttatttatatttctctctctctctctctctctctctctctctctctctctctctctctcaaatgcatgctttgatttgcatgtggctatcagaggacaacttatgggaatggccctctccttttaccatatgaggtccagggattaaactcacattgtcttgtgtggtgacaagtgcctttagtcactcagtcatcctgctctggcctttcctttgtagcctccctcctgcctctgtagtgctgggaaacaaacctaaagcccctttatatggctttaccactgtgctgtactccaaacactgtcctctagaatttaaccttgtagacttttgattaaacctgtgatgtatatcatgttaatttggggtctgacgtgaagtaagtattgaacttcagggtttttttttatgtatattttgttttctggcataatatgttgaaaagacttacatacttttcttcatttatttgattttgtacatttattgaagatcaactgaatatatattggtatcagaggctgctgtgtcagggcttcactggtagctcagattcacaaacaaataaacaaacacatttaagaactgcagccagtcgagctggagagatggctcagcggttaagagcactgagactgctcttccagaggtcctgagttcaactcccagtaaccgtatgtgtgcagtggccacacaggtcagaaaatggcattatatggagtctggagttacagactgttgtgagtgatggtttgggtactagaaaccgatcctcagatcctttgagtcaagagccaggactcttaactactgagctatctctttagccacagtcttttagattttttaaagtaaaaatactaagtaagataagcccctcaggttttatcataggtttgtaaataacttcctatgacattaaaagagtggtcatttagaccagtgacatggcttgctgggttagggccgtgggacccacatgatggaaagtaagaactgactcccccaagttgtcctctgacctctacacatgtgtgctttactgtgtgagtgtgtgcatgtatgtacacatacacacaaatacatataaaaataatttaaaagatctgtcatttgaagataagctttctctttgttgaagatgaagcttcatgttttctttttgttatcagaacagtgaaacctgttagctaacttgctgcggcctgcacactgacagtgagcctccctgggacagacagctcaagctggaaggagggttggggaggcagaggaagggccgggctagtggtgatcttcccattgctgtggcaagacttcatgcacagtttgtatgcatgcgaaagagatggttgtctcctgggtagccctcgacagtattcagcaagattgccacagtaaactgaggggctagatggcagatgaccacagaaaatgacaggatcaagcaatgtgctgtcttttgtttggcttgctacatgtagcctctgagactattccaggaacacatgtccagtgttcactcaggagggattagacactgggaggatgggttcctatccttttcagggcggggagacattcctggtgctggtacttgggagacagatgtgtgggcctcacagagccatgagcaaagtgagagcccctagggactcaagcactgtagtgggggagaaggtaggtcagataaggggcacagaggaaaggaccccagggttgcttgtgtgtgtgttggggatgagccccttggactttgggtacatcatggctgagggtgggacgagcgagctgcttttgtccttgtttgcagctctgcgaccgccatcatgttctggaaatttgacttgaacaccacgtcccacgttgacaagctcctggacaaggaacatgtgaccctgcaggagctgatggatgaagatgacatcttgcaggagtgtaaggcccagaaccagaagctgctggacttcctgtgcaggcagcagtgcatggaggagctggtgaacctcatcacacaggacccaccccaggacatggaagagaaggtccgattcaagtatgtactgaggctgttagcgaggctgtggttagtgtctcaggacagctggagccaggctatcacctcatgagacatgaggaggctattgtacagttggttggttggttgtgcgctgtaagagttctgagtctcttgtataaatgttttctcattccgagttgtaaatgagtttatattaagttggcctgtgttggggcaattgagagacactgctgaaaggccccatgatcaatagataaataggttcctgagactgcagagctgtgccacgtcattagagttggcaggtgcattagaggtttgatgtctgacttctgagccccaggaaatgtttccttttaggctgtttagttaagaggaggatgttgttttcattagtggcactaaacctttagaaatttttcctagaatgttttacttccagtttgagcaggatgttgggaggtgacaaaagggaggggacagtgtcatcacagaatggagctttgaggaagtacagtctgaattgggagggcagcaagaagtcaggccacaccttcaggccaaggtttggcttcctaaataggccgcatggtccatagtgtttctgggaacagttaaggacatctaacacagcagacagatgtgggtgcgtatgaggaagtccactgtacacaggtatggtaggaaggtcttagagtaggatcagtaggtcatgatgcatggttgtcagtccttccagccccccagcctatgacacaaagactcgctgtgttcacatactggtctgactttcacagcctcccatgcctggcagcttcacatttttaaatgttttaacaattaagagagaggactttgttacacatgctcaggtcttttgggtgtcattggcatgccgcactaatccatatacagtcagagtccagtcacaaaagagactcacaaaaatatctttaatttgtcccttcacaacaaatcttgcctgacatttgtcctttggaagaagggcaggcctggattttgaggcagcctgtggggggctgtcagtactttctccagggtagtcagtctgtctctgacaggggaaatcacgtgataggaagagcagaggcctgctgtcaaatgagccatggcttcatggagagggtaaccatagctggaggctgtcatggtctcagtatcaactattcacagcctacctgcatcttacttccatgtgtctcccagtttagatgacacatcagaacaaagtgacaggggaggggatatttaaggggccaagagagagattctcagaacagcactaatgactcgggagccttgcagagtcagagtcagaaattaccaatgcatgagtgctaaggtgaggcagagaaggccatgaggaagcgcatggctctcgggagccccatacatggtcagcaggtggacggctgtgtgctcatcgtaacatacatatgtatatggtgtacgcatgcctggagccctctggagctgtgtaacttaaacccttaccttcatgctccatgagcacctgaggttgtgcttggtctactacagtgtgtttccctcttctttccttcttcctacccatgcctggtatgtggtcatgtgacttacttcagggtctcctgcatgccagacactaggagggcactgtactacaacggcttctgcagccagatgctcttcttacctttaactcagcacacttgaataggagcagaataggaccaggctagcctggtctacacagtaagttccagacagccagggctatgtagagagatcctgttctctgtgtagacaagatgacttccctgggctctgaaaatgtttcaaaatgctgtctgtagtttgcttcattgcctcaggatcaagcaatgtgctgtcttttgtttggcttgctacatgtagcaaggatttgagctcctgtgctgccccagtgggttgtgtcttgtggggtcctttggagcatcactgtggccctcactgcagctgacctggccctcttcctgctctcactgggctccctgtcctcagtggccatgtgttacccctacactaaacgcttgtgcagggttacagcaaccccatgaggtggggccctggctgccccacttcacagacaaggccagagaggttagccagaaagaagtaatcccagaactgacttaatccgtaggtcccgcccacacgcagcctgtggggcctgaacgctgaccattctgttgtcctgtccaaaggcctgctgttttgtagtcctgctgggcctctgtgactgacagaccctttttggctctgaaggctgctcccttcttgcaggctgagaaggagtgtctacatcacatagccagtggagagctctttgtctctggggcattgattgtcttctgtcctatgtagaccagctgctaacaagaaagcctggaatcacacatactgggctaagggttactttgttgtcatttttatcaaatgaaaagtatacttgtacaaactagcatttcttaagagtaaattgcttgcttggagtctcacagcagatgctgttcatagctgcaggcatttttcttgagtttagaacagtgtgggcctttgcttactgatttgaaggcacagagaggagagagaggagcaattttccaaggatgcctgggactcagcctcactgcaagtggggagataagcatggcctacagagagaatccaggagaaagaggagttttgtttaggtctggtctggtaggtagtacacacttaattacagagcttgggaggtaagagcaggaggaggaggaggcctcagggtcagccttgggacataatgaatttatggccagtccagactacaggaaattgtgcttgtttgcttgtttgtttgtttgtttgtttgtttgtttgttttttaaaataatgttatttacagaagagaagtagagtcagaaaaaaaatgtagaatatcagagtataggatatatggaacccataaaagatggattataaacttggaagttccaatagttagagattcaagttgtctcgtgccatgttcactctgttctgaggtctgttcagtaatttgctcttttcacgtgggtctgcttcctcttgctttgaaaaatgtgtttattttggattatgtgtgtgcgtgtgtctaaatgagagtgtgccgttctcatggatgcctggaaacaagatgtgagagcccctcgaggatgtaggtggttcagccacccgacatggacactgggaactgaactcaggtcctcaggaagagcaggacatactcttaaccacggagatagagctccagccctgacgtgtctgctcctaagcatcagtttacttaaacagtttcctgagagttggagaagtctaatttcacatccagtacttggactgtgcccttttagatacccaaacacagcctgtgagcttctgacttgtgatgtgccacagatcagcgacagactaggcgaggacgagagtctgctgaaccttctctatgacttcctggaccaggagccgccactcaaccctctgcttgccagttttttcagcaagaccattggcaatcttattgcaaggaaaactgaacaggtaatgatgtgtgaagacaaatgtattggacaaccactattgatactgtgcaactattaccaggctcctgggacagcactttgttagtttaacagaacacagatgaacagtatgggtggctgatatgtgaactgtagtgtaagttgcgtggctttccacagatgtttctggtaaccagctctggagtaagcaacacttgttgccctccctgggtgctttgcaagccccagaccaggcatgaacatgagggcctatgacatgccctcactgtggagggatttgagacatctgcattttggggtctttgtgagtagcatggctgtgtgtccagaacagtgattgctttaaagcaaagataatgttagaatcaggcttttgtgggtaaagaaactcctatttcccatgtaccactgtccttccctggtcttgtttaaccttgtgtgagtgtagctgtgcgtggggagtgaaacggcagtccgtgcctcctgcagggatcagtgtccgtctcatcccctcacttaccagtccccagtggataatttcagcacacagcttagatgtcttgtttaatgttctactatgtgtttaagttataaggacttttctctttttaatactggtaggtattattatattcctaaaatactggcagtaatttttttggtctcatacaacaaaactatattttgtctatgtcttgaatcctgggactgtggagggctgtttcatctcacattgttttgaaacagcagagatgaagagtgatagtgctgtgtgtgtgcgcacgcgcgcaagtatgcatgtatgtgtatgagtatctgtgtgtctgtgtgcatgtgtctgtgtgtctgtctctgtgtgtatgtgtgtgcatatcccgttctcacttgtatgtgcagtgttggggcattactggagggaaagcaagcaattgccctaggagaagaaaggtgctgtggggtcttcattttgagtttcagagactgggtgtgtgaatctcctcatttactgtacactgatcatattcttttgccactttagattttctttacaattttactatctcatatatccccctttcttcctttatctggtgctttctgcattagagcaataggaaatgagctccttaacacatttcactgccaggtggtggtgggtgcagcagcgcacacctttaggaggcagaggcaagtagatctgtgagtttgaggccagcctgctctacagagtgagttctagtacagccatggctacacagagaaacgaaaagaaaaaaaatattgtgcagacaaacatgtcacatttatgtggaattcaagtaagaaataagcatataggctctgcactccctcagtagcgagcagatgggtgtgagttctcagataacagtaccattctgagtactacaagttgcttttctaatatacacataagtcttgtgtgtcttttgttatagaaatacctgcttcattttgacagttccttgtatggctctaccaaaattgctctggaaaatttggtcatcagtcaccaggagatggcctattcctagggttagctgtggtagacaggccagaagagggcgtcagatatcattacaggtggttgtgagccaccatgtggttgctgggaattgaactcaggacctctggaagaacagccagtgttcttaacctctgagccatctctctaccctgggaggacaacttttaagacaggttctctctgtgcagtcctagaacaatggctctcatctcccagcacttctttctatgcctttgccgggcaaacctaagctagcacatgcccagtggtgattctgcagtaattcgcactgttgtccagttagcagcagtgctgccctgtgcttgcctgtctggggagggatgtttttcacatagcctttccttggtctttctgtcatttcttctcggtatacttgaaatttaatgatttttctgatgtgaggggttgtttttgtttttgtttttctttggtttttgagacagggtttctctgtgtagccctggctgtcctggaactcactttgtagacctggctggcctcaaactcagaaatccacctgcctctgcctcccgtgtgctgggattaaaggcgtgcaccactacgcccggctggtgtgagcttttaagggagtgtccctccctgtcaggggccagccctgtttctttctcaggagtgtttgattgcaggtgatcatgttcctgaagaagaaggagaaattcatcagccagctcctgaagcacataggcacctcagctctcatggacctgctgctgcgcctggtcagctgtgtggagccagttggtctccggcaggaggtcctacatgtgagtgccagggcgtgagtgtcaatgtgtgggagggtgtaccaggccaggctccctgggttaggagcaccagatacccagccttgggcttttcacccagtccctcggcaccacttgcttatgtctgtatttttattctgcttaggccacttagaagcaaaggtagaggttccttctccccagcatacggccccttgctagctccagaaacaaaagtgctctttcctgcctttccctcacccaggccttagagccaattcatactgagctgtgtgctccaaacctaggtgctgcctggaggtcaggaagggtccatctctcagtctggagtgtgggtagctgtgctgctaggaaggatgttgtagcagtccctgggaagaagaacaggacgcccagcctggagggtgaggttttgctgctatgcaaggctttgcttgttccccatttggaagtaaaacaaaataaagttagacctttgtccattttctccctctgagaagcaagagtcatttaaatggctgttctcagtgggcatggtgattgaagtcggtaaccccaacaaccgggaggcagagctccaggccaccaagggctacgaagtgaaaccttgtctcaaaagcaaattaaagatgtgataatggtttttgttttattatagtttatgttatatcttgttatctcttagaaacctgttcttttctaatgagagacccaaaggaagtggatccagtgtgaggggaaggtggggaggagctgggggaaacagaagaaggggaaactgtaatcaggatatattgtattaagaaagaacctgtttttggtgaaaggggaaaaataaataaaagataaaataaagtggtagttgttctaactcttaggctcataactttccttacggcattatagagagaatcagaatgcaccttagctattaataagtcttggtgaaagctaacttacttacttttctattgttggtttaaaacactgtattagtcagcggttactagagtaacagaacttacagaatgtgtatatatgggatttattagagtgatttacaggctgtagtccagctaatccagcaacggctgcctatggatggaagggccaggagtccagtagcagctcagtccacaaggctgggagtctcagctggtcttcactatacactggggtcctgaagaagtaggctctaatggcagggaaagggagttgacttgctagtaaggagagagcaagcagacaaagcaagtaagcgtctttcttccgtatcctttatggaagcttccagcaggaggtgtggattgaaagactaaaggtggatcttcccacctaaaagctctgtattaaaggtgtcttctcatcgcaaagatccagattagaaatagatcttcccacttcaaattaagtttaaaaaaatctcataggtgtgatccatttttttttttaggattacattgacaaccaaaaataatcattacaaataccatgaccaaggcaattcctttcctctcctctcctctcctctcctctcctctcctctcctctcctctcctctcctctcctctcctctcctctcctctcctctcctctcctctcctctcctttcctttcctttccacgtctcttctcttctatttgttttttttgagacagtgtttctctgtgtgtagtcctggctgtcctagaacttgctctgtagaccagacagggatccacctatctttaaattgccattgaccatggcaatttaaaagaaatttaaaatttaaaattgggatttttggttctagagggttagagtctatggtgttagaacaaaggcatggtggtggggccagctgagagcacacatcttgaaccacaagtaggagtacactggggatggcaagagtatttcaaaacctcgaacccacttccaataatacatcctctttgaaggcctcctaatcctttacaaacagttccgtcaactgaggaccaagtattcaaacatcgaatcctgtgaagtccattctcattgaaacctccatggaagaccacccagcttttgcctttcacctctcacggcagcactcacactgtaaagcgtccctgcagggccagcatcttgtctttgcatgaggactctgaggtgcagagcacaggggtagaatcagcctgcaggggatgctgtggcctgacaatctcactgagtcttcattgctttgaccctgaaaagtgtcagcgtcagccattacagtattcctacaggtacaccagggactttgcgttcctccagctcctaggaaggccctgatgctacagagctgagggttgtctcattttcatacccagctggcccctggactgcattctttccttttttttttttctcttttttttattaggtattttcctcgtttacatttccaatgctatcccaaaaagtcccccatacccaccctcccaatcccctacccacccactccccctttttgaccctggcgttcccctgtactggggcatataaagtttgcgtgtccaatgggcctctctttccagtgatggccgactaggccatcttctgatacatatgcagctagagacaagagctccggggtactggttagttcataatgttgttccacctatagggttgcagttccctttagctccttggatactttctctagctcctccattgggggccctgtgatccatccaatagctgactatgagcatccacttctgtgtttgctaggccccggcatagtctcacaagagacagctataccaggatcctttcagcaaaatcttgctggtgtatgcaatggtgtcagcatttggaagctgattatgggatggatccctggatatggcaatcactagatggtgactgcattcttttcattctgtactctaggtttcgtaaaccctgtgtcctgaaagcagagaaagtgtgcactgtttaagacaggtggaaagtatctcagccattcccaaagtttactgtgtcattttggttctttctgggacatgcatgtcagacaggcatgccagagtctattccaggagacctgggcacaggagtttctgctgtaccaaaggacttgtttccattcgcttagatgagcagatactgaactggactttccccccttttagtggctgaatgaagagaaaatcatccagagaattgtggcattgatccatccccaccaggatgaagatgtgagtgcgatgctcacagagcccaccttcttacacggacacacccacccaggctcttggaaaacatgctgctgtgtgaagggggcaagtcactcctttcctttgaagaggaccattagatactttctttaaccaaatgctaatgtctgggtaattttgtttttactgaaaacaaatgttggacaggcatgatggtgcatgtctttattcccaacccttgggtagcacaggtaggcagtaagaccttgcctccaaaacagttatttataaataaaaaaaataagtaaataagtaaatacgtaaatatataaaataaatctagtatatagtatgcatacatatatctacatacttatatacatacaaattatttcacataagcatataattaagtagttgtaacagggttgcatggctgaatgaccgatcacccagtagctgagttgtcagtaacaagtaccctttatctttatcagtatcggtttctctggtcaggaatctggccatggtctgttggcttctctgctcagggtctctcgtaagattacagtcattccaggactcagccgaaagaagatccactttcactggtggctcagcacattcaattccgtcgaggcttttagtcctggtaacccctcaggcgggtgcagtgtgggcttctgagtggacaacagggctcacaccaagctagctagctttgagaagtgagctggactcacaccagacttctataaattcagctcagaaatgatggccctccttcagccttcttagtgctgcgaccctttaacacagttttcatgttgtggcgaccctcaactataaaattactactgcttcagaacctgattttgctgctgttatgagtcgtgatatgcgggatcgtgtcatctcaacccacaggctgagaaccactgctctaatgcattctgtccaagtctagggttcattcaaggacatggacttacaagggcatgaataccaggaagggttaattagggttcttctggaaacttcccagaagcatgtaagacagtcacagaaagaaaacctaactgccactcagtgtctcccactgagctcactatacaagcccacttctgatgcaggtgagcagtaaggcttctcaccctcaggccaagcagtcagttctcagagaacaccagccagacaccctggagttcaggtcattcctgacacttgctgggtactaggagactacagattggagggcttagtccccaagaccaccccaactgtgctgccttacatctgtgcttttggctgacactggatcctctatacactcttcaagatttctggtttaatataaagaacattataaatgatgcctatgaatatgaagaggtgcacagtataatgtatggaaggatgggtgtggagcgtccctgtcttttccacgtgtatttttctgcaggaatcttcatgtggtttgctattcagaaactccctcaatccagtctttatgaggtagtttgtttgtttgtttatttatttatagacttgattgcacaggattattactaatagactttaggagaaaaacccaataagacctgtctggtcagatgtgcagcattacccattccaggtcatggggcaggagccctctgggatgaggaggatattataatctactgtcagagtggaccgtgagcccagaactgtggacataggccaaaaaatatatgtcagcatgtcataggtgacacaagttttcagccatcttcatccttcctatagaaatcactgctgagggtttgagttttatcctacgcattctaaatattcacacacagatacactgccatcagtgaacatttgacaggtggatactgacatcagtacttgacacgtgtccgaaggcctcagtgctgcctgaccatcctgttttggcctctgtccacccaatgagcacactagacggcggggaaaggaattgttgaagactagaggatttcctatagtagtgttccaaaaggtagagcctgccatgaaatgagtgttatagagtgactagcctgtctctggtcctgaaggcaattatggccaaagagccaacctggctaccttcattttccctgaaagccttgcgagtttttttttaatcttagttttttttttaatttttaaaaaattttactgtgtttatgtgacattacaaagatcaagctgtctctctcgtgattactctcctctccacccactcatgttctctcgagcacacatctgagctgggggtggggctcagcactcgcgtcctaggaatgttgagttctccagggtctcttgtttctttcagtgacttatcctgctttcccaagcccacaggactcactgtaaataacagtaactgtctaatactgcatttaacatgcagaataagatggttatgtattcagtacattttagaatatgaatcaaaggtataaaatagacacaaagtatataacatacttggctattttgggtctcatttttaattcctgggatgtgtttagtatgtcttttaaaaaaatctagcaggatccatatcttgatgatgggcaaagcagacacacactactttcaaatgaaccatttcaggaatctttatagaaaaccggctcaggaaattcattagctggattgacgtggctgatgggtgtgttttgctgaggggagcctgtttcccttgtcttttcagaggcagtcaaatgcttctcaggcactctgtgacatcatcaggctgggcagagaccagggcagtcagctgcaggagactgtggagccagaccccctcctcataacattggagtcgtgagtgatagtgggtcatgataatggtgggcctcagtctggattatggacatgtcttggagcctgttttgaatacaggagatgacactgccatcactaattcagaactggactaactcctcaggttcagagcccaggaagggctatcaatcactagaagccctggtggtccagggagttggaactagtgggcttgtgtgttatgcaagcttggagtacttggctttgaacctgaacaaagccagaatgaaggcctcacctggctcagggtgctgtggtagcctctggggaagacagtgtccttgaattatgtatgtatgtctgctctgccaggagtgagtgacctctgcatgtgcccaacaggcaggactgtgtggagcagcttctgaagaacatgtttgatggggatcagacggagagctgcctggtcagtgggatgcaggtgctgcttgccttgctggagccaaggcgtgttgggtgagccttttctttgaaaaagcaacatacactgttcttaggccagaggacatgggtatctaggaagagccaggacatgctgtttttaatttttggttatacaagttacaatgtggctagataccctggttgaaaggtctcctttgtagctgtatcgaggtctgaggtcctcttcgaccctcactagcaggcatagtttcaccctagcctggtggcactcagctgctgccagtttgtaacatgcttatagatgagtatggaatacatgtggttttctctaggtactgctttggccagtatgcacaatgcatgagtgtgtgtgcatgtgtaccccctatagggagggcttctactccagcatgtagctgcttgctctctatatgtttatctcccatgctagaaaaggaagcacgctgtgttcatctttgctaagtgttcaataagacactttgtttctgggatgtccttcacttctttggtttttgttgttattttttgagatagggtttttctgtgtagccctagctgtcctgaaactctttgtagaccaggctggcctcaaaaggcactggctaagatgtatttatttctgtacatgaatgtttgcctgtgtgtgaatgtatgcacactatgtgggtgcagtgcctgaggaggccagaagaggacaagagcttcccagaacctgagttacaggtggttatgtgcagccatgagggtgttgtcaaccaaacctagtaagtgctcttaaccactgagccatttctccaggccctcactgtccttcactgctttttcatccatcagttgctatttgaatacctagcatggagtcctaagagacaaagacaagcaaaatatggcccccttacatccagtgttcctgtctgttccaaaagatggtacaggttctactcagtgtggaaagtctgtgtgggcctggaagatagagtcctgtggtcagggaggttttctctgagagtccccatttagtcaaagataattcctgactagaagaagatcccagtaggagcaaaagcatagagccatcctatgggtaaggggctgtgaggcttaaagatctacactgttctcaggattgctattggaagccagttgaatcaggaaccataaagggacagttctaagacaggagagggcaggagacaggagttggtatagaaagctgaatctgtttgagaattcaagtggtcttaggatccaagtttaaattctggaaagtgaagctttctttggggctcaggctggccctgggatctcagcaggttagatgtggtcacagccacttaaacaaagacagcctgtgagccacagatgagagaacagatgtggggagtcagcagcagcagagcttctttgccccggaccccatggaagggtgaccgtgccacacaggaggtgatgggtggggatcttgagattgctaggcactgagctcccagcctccctctcagtgggccttgaagctccatcagtagatgaaggttctccgcagccagtggaccgtgttgaaaatgatggatgctccaattctccttcaaggcacttgccttatgaccacatgttgagaagaacttcattatctcctggtgctgaccttgttgtgcttttaaacacaaggttatgtttaaagtgacaagagattgggtaaatcattttctagaatacctcagtccatcagtattagtgcattgcctaaaaatgagtagctattttctctacttaagcaactagaattttaatttctttaacaaatccaagccacctaggccacctttgaaagccaaactcagcactaaatgtgaaaatagtgagagaatagtgtaaaatttagaaatccagaactagaaccaggtatggcgggccatgcctttaattgtactagtgagggggggtgggggggtgnnnnnnnnnnnnnnnnnnnntttttttttttttttttttttttttttttttttacgtgggttttttgagacagggtttctctgtatagccctggctgtcctggaactcactttgtagaccaggctggcctcgaactcaagagatccacctgcctcttcctcccgagtgctgggattaaaggcgcgagccaccacgcccggcctctttcaattttttaaagaaaaaggcaaaatagaaatagtccactacttgtctttaatttttttattctctcatacatcacacctacatctcataatcaccccgtcctctcctcccagctcctctcccacctctcctctctcccaaatcctctgcttccattcaaaaaaatagtttcctttaaaaagagagagaaagagaggggagacctcccagggatatgaacaaaacatggcataaaaagttacagttgttaagtaaaggatactctctttaatttgtaggattttctgcattgattttgttttattttgattaattggaaatatatttaaatatatatcaaaggaatttttttaaaaggcaaaaaaactatgtggccagtctgtctcctgtttttcacttgaggactggggacccctggtgggattaaggggacagcaaggcatcaagtcctgtgcccctttgtggtcttggatggctaaggggccaagagtatgccagtcagcaagtggtgtgaagaagtctcgagtaatgttccttttcagacatggttttgggaagatgcttaatagaacattgacaaaatgaatggggtatgcacgggacacagcactctgccacgcctttattcacagaacagaaggcttggtggactccttttctcagggactggaaaggtcacactccgtcagcagcagcatccttcgtggcatcgagccatggctgaagaatttccatcagctcctcctcaacccaccaaaggtaaacagagcagttagaggtgtggggtggcatggtgtagaggacaggacagagtatggaaaacagtgtgctttgatgttgcccttcgaggtgctagctggaaaaccactgggcagatgttaaaatagactattagctagaaatagccaagttgcctccactaggagaggcctgggcatgggcatggcagaaccccctgaactaagcatgaggtcacctggcctcttggtcaggggcgtgactcgccaagggtggctcctggaggctgagctcccaggggaactttctgttcagtcgacagctcaggggagttcttgggttaggccaaggacggtaaaattcacaaaggtcctcagctgcctcctgccctccagcctcacattactgtccttccccacacacagttccagcctttttcctggtacacccatacttactgacttatttattgtcttgtccccccactaatacgtaaggattcatggaggcaagaactctgttttgccaaacacagatggatcagaaaatacctgaatccaatagaatgaagcaaacctggggccatgagatggctgagcaggcaaaatgctttctgtgcaggcctcatgacctgaccttgcttcctgggaatcgtataaagatgaaaggagaagatcaagtccacagagttgccttctgaccttcacacctgtactgtggtatacatgtgcccaggagtgtgcagacacatgcccatagtacactcacaagcagatacataatatatacacatgataactgtttttaaaacttgggggcttcacttagcatctcttagctcagaatcctcctaagaattccttgggcatacacagacaagcaccatgtccagggctccagcccttagttggatcagcttgcttcagattggtactgctagctccatcatgaacactggacacatttcatatgccatagtactgctcctttggcctagtgggcctgaataacagtccaggagccttatctactccctttggtcctgaggggacaaagtgggtccttcatcttttggattctgtcacttctcgtaggaagccctgtcttgatcataccccattctctttaggccaggcatatcataggtgagtgcccctgttggttacaagactccagctgggtgtgtcttctatgtttgcagaaaaaagcaatcctgaccactattggtgtgttagaggagcccctggggaatgctcgtcttcatggtgcacgcctcatggctgcactgctgcacacaaacacacctggcatcaaccaggagctctgccggctcaacaccatggacttactgctggtgagtcagcgctgtggcgagttctgcctgtttgtatgtggcctgcatagtctgcagttgaacatggagatgagtccatcagggcaggcactttagcatctggacaaaaagacatgccaaggggaggtgccagtatggaggacttgatcatggatctctggtagagcaacacagagatgtacctcagtcttaggctcatagtatcctgccagaggctcttcccaatggcagaggatgggtggtcttggtttctcttaagtcacagtatcttgagaggtgaatatccatgagtactaggccagcctggtctacatagtgaacaccaggatagccagagcaacatagtgaaatcctgcctcaaacaaaacaataaataaataagcgaaagatagatagatagatagatagatagatagatagatagatagatagatagatagatagataaaaaacagaagggtcctgagtgagaagggtcctgagagagaaggtctttatcttctaaaatagtcatccttatagttcttgttaaaaccagtagatgaatggtcagaagctatccagtggctgtagattactgatcttaccgtgttctttaccgccctggagcagcaggtctgataaaagatggaatggacttttgaagacacagttacagttaggtggcagcagccttgagggctaggcaggattctccagaagatgctgtatgcttggagtcagtgtcggtagccagggttcacgggtcatggagtcgagggtagaaaggaatacttctgctcactatcacccactgggaacgtttctctgacctgttctggctagaacttttggcttcagagtagggaatgcttctgccaggagccacaacaaatgttccattgagctggaagcttagatttgcccctggccactttgagcttcggacacccttaagtcagcaggctaagaacagaaatgacagtgacaggagggtgattgatccaggtcaccatgggggaagctgggttgcttccctacaacggaggtaagaaggatcatggctggagtgccagagatcctttagagcatctcttagtactaccgtgtcctgtgacttaaaatcaatgggaaatgcaacaacctaatccaggcaggataagaaaaggtatgaacccatcagaaatgaaggtatgggccactcctccaggaaaggagctaagacctgctgaggtgcttgcagagggtgaaggacatacaggaggggtagtagagaaaggttgtagccggacctttggctactctgtggatagtagttaggacagactaaaggacaggggccgtgggtgaaatcattcgactacttcctgctgattaggggcatagaattccttggggcaagtttgatcttcgacaccaggatatctagtatcttctttttgtctctatgtgtacgactgctatatgaatgactacttgactaactgcaaccagcagcatccaaccaccaactagccagctaaccccttctaccaagaccctggcattttattcattcattcattcattcattcattcattcattcattcattcaatgtatatgagtacactgtagctgtacagacggttgtttcatgtggttgttgggaattgaatttttaggacctctgcttgctccggccagccctgcttgctctggtcggccccactctctcagtccctgctcactctggcccaaagatttatttattattatgcacaagtacactgtagctgtcttcagacaccccagaagagggcgtcagatctcgttacgggtggttgtgagccaccatgtggttgctgggctttgaactcaggaaggaccttcagaggagcagtcagtgctcttactgctgagccatttcgccagcccgagactctggcatttatatatgtccaacagtccaaagcagccccacacctgggattaaaatgaaacacattcttaaaatatttctatgggttttttttttaaaagaagccaaatttctcactatagaaggtagttagaaatatcaactaaggccacatggccagttacagaaataaggattataattgacataattgcttctgccatattttataagaatgtgtttgtatagatatttgtgttttctttcctctgtttctttatcatacagtgtaacatcaattaagagaatatcagtggtttttccatttgtttaaatagatcttctttgggactaagggtatatagcttagtgacagagttcttagataatgtacaaagccctgttcacactagagatggctcagtggtttagagcattggttattcttccagaggacctgataggtggcttacaaccatctataactctaggcccagaaaatctgatacccacttctggcttccaaggacatatgtgtaaaacaaacacctgtagaaattaaaaaaaaaaacaacaacaacaaaaaacaaagaaagcataacccagcaaaaccctgcaattcctaatgtcaaaaataaataattacatgaatctggtcttcagttctgtcagcgtgttttgtagatttgtttgtttgtttgtttgattgggttttttttgttttgttttgttttttaagacagggtttctctgtgtagccctggctgtcctggaactcactctgtagaccaggctggcctcgaattcagaaatccacctgcctctgccttcctagtactgggattaaaggcctgcgctaccatgcccggctctgttttgtagttttgagtacactggattttttggttttttgttttgttggtttgtttgtttgcctcgttagcttactctcaaggactttattcttttgaatgttaccgtgccttacatctaaggattggcttccttttccagctggttattgctcctgtgtagaaatgcaattttgtgtgtgtgtgttgactttgcatcctacaatattagtgaattataaataatttcttacctctaatagtttatgtgaaatctttagattttttttctctttgagatggggtatcactatgtagccttagatggcctggaacttgctatgtagatcatgctggcctagaactgcagagacctgcctgcctctgcctcccaagggctaggattaacagtgtgcagcagtgcacaatcagaaagggattgtggggttttttgtttgtttgttttgttttgttttgagatgtatatcaaacagataatttcttagcttgatgtaacctttggtataaagaaggggcccagacttataccccacttctctacctagcacacacccttttgtgtgtagctgggtctgggactgtcttctgccctctgtttactcaggactgctgtaaccacacccctccctcccttccccgtatgtgggacacaactgtagtgggaaggtcaggagctgcggcctcagggtgccttccctgctctcctgctttggtctggaaaaggctttgtggtagacagggtatctttaattctttgtattccagaggagaccctggactgctccttgcctagactttgtcagtgataatccagccatactgcagtctcttgttcctatggaggagacgtatgtggctcgctcagcctgggtttagcatgctcgggttactgcttagagacaaagtaatgaaggaaaatgccagtgcctagagttgagtaataatttcaaaactactgtgtagtaagatatataaagtgtagagtataaattttataggaaaataaagacaccataaaagaaaaaaatactccaaattatttaagcttctaacttaaagaacaaagaataaatccacagaaagtagaaggcagttacttggatgagagggaggtcattgagacacacagagtagcaagcaagagggcgtcggtcagccccagcacaccagtaacttgtgaaattagcggatgaagtttgagagtggtttcttctttaccttggtacttctaaagcctgtcttctgtcctctgtttactcaggacttgttctttaagtacacctggaataactttttgcacctccaagtggaactatgcatagccgctattctttcccacgctgctcgggaggagcaggcagaagccagtggatccgatggcaaggtggagcctctgcagggcagtggagatgggaatgggaagctggagaccaccccatccatcaccagccctcctgagaacacaatggtgacccatgtaagtccaggccatgtggggccgtgccacctgcagccagcacttcccagactccagcgtgttagctcctaaccctcacatgggtccgaggtgctgccatctttgacccacaagaacacaaaattgtaaagaaacattcagttggagaaggcaagccattgtttgcaaagatgatcttgtggttgtgggttgtgtctgtgtaggcatactggatactgcagtgacaccccctcccccatggctgtactcacaagtggcccctgctttgctcaatccatctttataactaaacacaaaggaaaacacaagagttaagttctcatgagaaagctttctggaaccttagacctcgaagcccggtgcccctgctttctccgtgacttctcttattctccagagaatggccatagttgtcacctcatcccttcccctgtgtaggtcaccctagggttagagtctgcagctcaatttctttttgacatcggcacttaacactgtccctgggacagagcagccctaatgaatgtctgacagggaaaaaagggtcaagcagcttgggccataagctgtacctgcgccaagacctgctgtgactgctacccacttctaaagtgggaaagaacattctgggccaagtgggctgacaggagggcagaggtttgggagagggctgctgggtctctgtcccagtgtctcatagacagcagtgcttgactgggtttagaaggtctcagtgctacttgcatggggtgtgtatcctgggaacctgggagcaaatctggcaggagctaagactggctaagatgcatttagtctggcccacagtttatggcccaaccatgaggcttgcaattataatggcaagagctacctagggacagggaacgttattcagaggccaacagggaccatggatagtgacatggaggtgtgaataggggtctgtaacaaacatccaagaaaatagtgtatgtgggggaaaagaaaatgttgagggccccaagagctggtgggagagtgctcagaggtataggtgggggcccataggaggaggggaggcagaagtcgtctagcatatcagaggagcatagagtgcctttactacagtgctggtcttcattctcaggccattcagtaacatgagcatcagtgatgtcattgccacagggtcttcagtgctgatttgccagttcactacctgcagcacctaggaggcagtgtgaaccttgggctccctctcacactgcttgccgctctgctctcacagctgttccagaagtgctgcctggtacagaggatcctggaagcctgggaagccaatgaccacacacagtaaggactctgaggaacccccttgtccgactccaggccccttgtcaggcatcagcagtgtctaatgtagatatgtgcctgggactgttctagaagggatcttgctactgggtatacatcaggaagggggaggcagggaggcctggagaggagggttatactgagtgacagatggccaggccactgtgagggtcatattgagtgacagatggtcaggccacacagtggtcggtaagtgaccccttcctacttgtctggcttgttctttatgttcttgtgggttttattttttgtttgtgttttttggtgtctgtgtgacagggtctcattatgtagccctgactatcctggaattcaccgcatagccaaacttaaactcagacatcctgaggagcctgctgttgcctcccaaatgaatgctgggattaagggcatttgccactagaaccagccaatagtttggtgttttgaaacagtcttacaagatagcccaggctggcctaaaacttttttttaaattatttatttattatatataagtacactgtagatgtcttcagacacaccagaagagggcatcagatctcattatagatggttgtgagccaccatgtggttgctgggatttgaactcatgacctttggaagagcagtcagtgctcttaaccgctggaccatctttccagccctggcctaaaacttctattactgctgcctcagcttcccatgtgctggctacaaccattcttttcttttttcttttaaatgtattattttatgtgtgagtgttttgcctcatgtatatttgtgcactatgagtatatgcctggtaccctcagaggccagatgatggcactggatcccctagaactggagttactggtggttgtgagctaccatgtgggtgctaggattcaaacccagggcctctggaagagcagccagtgcttttaactgataagccatttctccagccccagctgttcttgcttttactaaacttggagcacactttgttggcgcatgtacacagggattcatgttagcttttctgcagcatctgttggagccttccctccactcaagaagcaatgctctgtgtttctcagggataggtggccaccctcattcatgtgttgtgctctgagaacaggctgtttctaggcagtttgagcagcactcatgggagcccaaggtgtgtgagtacagttgtgggactatcacccaggatctgtgagaggcacaagtagaggctagagcagctcacttggtgtggaggccctcccaagctccagcagtgacagtgtcccagaaacagtgtgcccagcacaagctgtgccgccatcagtcctgactcagctgctctgtcactactgcctctggtggaacttgggccagcactgagctgtctgcttccatcttcatgtccatccctgggcacggagtaagcatcagtgtttctaggtgcgataggggaggagtgactgaacttacgcatagcagatgctccttacccaccagggtcctagagctgaggctgttggtcaggcccagctcttgactgcttaggttgtttccctagaatttaccctggagtgacaactgcaaagtaggcaaaggcctaggtgacaggtgaatggagatgaccttcaggaagcctgccacttggccctcccagcaagaagttgggcaaaacctggactgaacgacctgcttaatagatggtttcccttccagggcagcaggtggtatgagacgtgggaatatgggccacctcacaaggatcgccaatgcagttgtacagaacctggagcagggcccggtgcaggcccacatcagtgaagtcatccgaggtgtgcccactacgctcccttccctctgccctctgtcctcaggagtgacaactacactggtatagtcaaaccatgcagccttctttgtcatcttctcagggtaggctgggtgtcctgttcatggagcagagatctgagtataggagactcagcctgccaaggacagttcatgactcagtgctgggcctcgaaactgtgagcttctcaccaagctctcttgtactcacgggctttccagagctgtgcctgtactagaggtcctgactcaccttcctgtcttgtttccatctcacactatttagagggccttcctagttttcatatcaggaggccatgagtgtaggtgatattctgtcccctagaagtaggttgtgggcagcaaggcctgaaaccctgaactctatgccccaagcaaaagagcagagcttctcccctcagacatgacgcctactgccctgagcagttcccttatgcaatacctccccaacaagtatgagttaaggaagctccacgtggtcctccccatgacccaggaccagaggaattgttttctttgtggtatcttggaggccacttgcctgtccaccttcttcctaggtatactgcaacagtggtgaagttgagcttgctggtccatcatcactcatgatgagtgggcagcagggcagaacagtgaacaagctgaggtggctcccttgttgctagaagggaaaaagaaatgggcttggagcccagtttagggaggtgaggggtgagcagaaggttcttgtttccagttaggcccaggttctagtttcccacactccaggcctaggagtgcagtaggaaggtgctcacttcctcagacccttagggtagacatatgtaccagcaggtagtttcagaccaggcctgctggcataaactattaatcccagtactctggaggcagagataggcagatctttaggagtttgaggcctgcctggtctacatactgagttccaggacagccagagttacatggtttcaccatgtctcaaaaaacataaaacaacagaactctcatgcccgatacggtctctgtagaacaagctgaacattgccctgctcagagttgttgtagcctaaggccctggaggacattaaccctccccctttgctgtataggcttatttcctatcagcagcccctgtttgtcttgagtggactgatcgtagaagcataacttgtccctctctggaccagcccttgcctgctagggctcctgagtgccctacccttgggactcataagtcccacacttatgagggtactcacaggacttatgagtagcacttactttgcagggctccctgcagattgccgtggacgctgggagagctttgtggaagagacattgatggagaccaaccgcaggaacactgtggacctggtgaggaagctggggctccttccatggtgaccattggcagtcccatatgtaccactctgcagcacagggcgaggaggaatgcgcaagggcaggactggacatttagttcagcctctggcctgcagtctgttacatacccttgctatgtcgcagcagagctggctccctgaggatctctttgcaaagctagtgctttcttgatctccaccctccagagctatggcttatttgtgaaggactctgcttagttcccagggcattacctggaccagggaggctgggctctctttcaggaggctttggcctcagttggcatttccttgcagtgagctgcacaggcctacaggtgtcaggggattggtggtgtgggagggtatcggggagggggagactcaggctgggctgggcgggacctggggctctggctggaatggactgggtggggtctggctagctcacatgcccaccccatctggcctgtgttttaggtgagcactcaccaccttcactcctcaagtgaggacgaggacattgaggggactttccctaacgagctgtcccttcagcaggtgagggcatggccggcactctgcaccctgccgggcccttctggagcctgtgtccttggtagtgcttagttgccgtgacattgcatagaaaagagagaagtaactcatctccgagcgcatctggggagagggggctgggcgagtaccccaaagtcacgttaccgtggtgagagagacctggggacagtaagcttggaggccgactgaggaggtgctctctgtatgcaactgctcaaccactgtgagcagtcaacctctgcgaaaatccactgcctgcttcctaagaggctcctgagcaatggagtgggttccaaggagcagccaccaggcgacaacttgttccatagctgtaccctctcctcccaggccttctctgagtaccagatccagcagatgacagcaaactttgtggatcagtttggcttcaatgatgaggagtttgcagaccaggatgacaacatcaagtgagtacagccaccatgaaggctccggctctaggctagcactgccctaagcaacagcaccatagaagcagctccaagtgatcttggcaggaatgaggtccactgtccctgaggagatagcaagccctactacccgagggcccaggcctgctggagcagaggcggtactgagggaccttgttcttgcagcgccccatttgaccggattgcagagatcaacttcaacattgaagccgatgaggacagtgtgagtgatgggggccgctgcagggctgcagggcatagcagcattttattacactgctcagatagttcacagtgtccacaacttggtccttgtcacaggtggatggaaccatggggccctggccagtatatttgtgtgtcaggactgggaggctcccctctatgggagttgagagccgagcttccctccttgcctcctcccacactgtctgtcggccatgttctgtgagctagcccctctggagttctttgggaccagattctccagaaaacagctctgcattctgtcttacagcccagtgcagctctgtttgaagcctgttgcagtgatcggatccagccctttgatgatgatgaagaggaggacatttgggaagatgacgagactcgatgcgctgcccgggtgatggccagagccaggtgtgggttcactcatcctcccaaagcccccaccagcggggagcaggcaagattaagcgctgggtattcagccactgttaaaagtgctcagacacctagaggggcagtggcccttcttgcagaaaccagagcagacctgggagccaagcagtgcttattctagacaccccgtactcaaccctggtcccaattcctgagccatcacaggttctccagcattgggcatctaaccaaggctcaccaaacatctgctacctttatgtctgcccaggtttggagcccctcatgtctcagataattactcaaagaatgctttggaacatggaggccaggacaggaagactggctcagcagtagctaggaatgtgcctggattggccgctccttcatctcctacacagaaagaaggtcctcgctcagagagtgattcagcaggtagtacctgaagactgtacaagggacatgggtactgaggacagggtgtggtgacttggctgagggaccccctttgagccactgtttttccagcagttgatttcctagttccccatctacacatggtttcatgaaatgttttgggaggtctggccaccacgggttctgctgtgcactgaatcgagccaggtgttcttactcccttccactgtagtgcctgcctgtatacatgtgcacttgcacagctggtgtccattctgtttgctagggaagggaaaccccatgtaacctgtatgttgctatttgccatctctcagatgtacttgggagcatctacccatatacttcctcttagagacctctcttacctgctctggggtattagatactcaggacacgggcaagaaaccagctgtctgttaggagttgccagcaccttagctggagctggccagctgcaagggcaggaacacccacagtaggggccccccatgctgtgtgcctgctatgacctgggttgggacaggtgagatggtacctactttgtaccatcagccttactggaggacagatggggctttacaggtatctcatgaggcaccacatcagcaagaactgatgcccatacatgtgctctgtggcagtgggtagcttaataggaccctttccaggtcattcacaggtcttatgcccaagtgtcccagggtttgaagccatactaccttttgcaaagcacaagcagtgctggggagtcccgccatctctgacactcgagacagtgggggctcttctggggtttcctatgggagcatcttgcattcctggtcagctctgatgaccccgctattcatctacgtgagagatgcttctccctcgcctatcacatactaggcctgcctattcttgactgctgcgtctccttctggcaggtactacatggacagcagtttttgatgagccagtgaacccgctgtctgcaaccccaggagctgcgagggatgtgggttctagtgcatgggcggctggtccttcagttgtagaggagaaaggctgggccaaattcaccgacttccagcctttctgctggtaacaaacatcagaatggaatcttgcctgttgggtatcaggaccagtgttgtccagtgggctcagcatgtcatcttcttttctagctctgagacagggccccggtgcagctctcctgtggacatggaccacagcaatgccgagggtggccagagtccaggcccagagaaaacctgtgagtagcaacagctcagacagctgccttgactagttggcaggcctgatgcaaggctagaccctattgagaaggtgggaagtggcctcggccccaggtgtggttatgtatttgtgatgttggaatccttacatacatatgggattggagttatcatgatttgttcactgtacaatacatgaggaactttagggtcctccagctttaggggtagaaggcaggacaacatgtatgagcatgtagggtgtcctcagagccaggtccaatcaggctccatggcccaggcctgtactttacaacatccttgagtcacattgttatgtagatgagtccctgttgggatgccactatgggacttgacttggcctctctctccttcccaggcaagtggactgggtaagaacgctcctgggcattaggtttaaagtggcttctctgagcccatgtttcctcctctgagaagagcacacacatctcctatctagtggagtagtggggcagcccacatgaaaggtacatagcagttcatgtggttcctgcgaacatgcagatacacgtgcataacactcaggaagccaacatgtgccgtctctgccactcatctcacactgacttatgcaaatctgggatccctgaggccatggtatctgtgttctctggctcctctgccctcacaaatatcgcagggtttcttcttttgcagttggtcctacctcgccttgtgcctggaatgtgtgtgtcactaggaaggcccccctggtagcctctgacagcagctcctctgggggatctgacagtgaagatgacgagaaggcagcgggtgctgtggaagctgtgtgcacaggccatactggaaaggtctccccaccacccaggacagcggaggctgctgttggcaggtgtgaagggactggaaagctttcctgggaggcccagtgaacactgcatggcttctgagaacagggctcagtggccagtcttcagttccttgagaacaagtggaggttagactggaatccttgctgctgctccatggctaatgatcctgtaaagctgtctctagaaaaacagtgcctctttctaatggaaaggctgaaccagagggcttcttagacaacagtgtatattttctgttttaaatgtttcagagtagaagatagaacctggatgtcccaagagctccccagaaacttggaatgacagtctccactacaggtgccagttacagagaatacctggttttcaggctctgggactggctaacctccttggtgtctacggttgtcccagacagtggaggaaaggcctgttgcccttaactttctgtagggcaagcttaggactctggccagccctctcctgttaccccactttgtgctgtgccatttgttgtagggcacttgtgaattacagtcaggtgccctgcacgctcgcacagtaggacaaaatgcatctcagggttagggattaggtgtagtctgagccctgattgggaagtagaagcagctcgcaggtggtcaagccacagttcccctgcagtgtctgaaggccgtccctagggaaggaatcaggtatgttgtcatcatccttgccaagaggccagccactccagcaagtgcttctattttgagtggtcaagatgagaatataggaccaaggtgtcaaggagctacccagtgagtcaggggtactccacaaagctagatctctgtgttccccagggagctcagcctcctggcattcagcggtgggagagcaggtggtgaggctcaggagcataaggagttgtctgtgggtacaggatactggaaatggcttcccatacaaaggccctgaggcaggatctccacctaagttcagggtacagtagaggaagtctcagggctggaccctaccaggagacaaggtactaatctcacaaggctcttgaccttaggcccatgtgggggttttgttttggattctgcatctactcttaaatgagtatcacctatggggtttctggccttgtctctgcctacacttccaagtctgggatgtacctgacaccagcttgttcttgacacagtgggcaccagacagactgcctagcacaagttcaccatcatgcattcaggctctgggtcctaccagccctgcctcctcctcctcctcacacacagggtaggccctgcccacgtgtgtgcttcttgagggtcctctgtgatattggaacttaaggggtttccctcagctaagcgggaagattaagcagctggaatccatggttggtataacccagtggttcccaaccttcctagtgtgtgaccctttaatacagtctcacatgctgtggtgatcccagtcataaatcatttttgttgctacttcacaactagaactttggtactgtgatgaacataactgtaaagagccacagcccacagttgagaactgctgtttgcagctgggactcaaagtttcatactctgtacccatagcgtctggctgctcatgtccaaagctcattgaggccctggctcttgtgttctaggaaccctaggcaggatatcgcccctaaagcaaacaccactatatatctaaaagatttgtagaaaagcaaaaatgtagagccaagacttggagaagggttcacatggctactgattcagatgtgataaaattaactaagaggaaaagcctagactggagttccttgggttgagagtacacaggcttgtttgtgagttttgctgtgttgtggagggtggtctcaactcacaactgtcccacctccatctctttagtgatcagattaccgaggaagatcaccacatccaactaacagcctacctttagagaccttcatcctctttttctaaatccttcctagagaagtactttaaccctgctgcaaaaagacaaagtaaatcctttacaaagctattttcaaaacctgctagatagttgaaccactgccaagtttattcagcctctacaactccctccctccctgcttgtcctgcatctcatctgagaacccctccctgggacagagccaggtatctttgttctgcaggatccatctgttacttgtggttagtctaggctagctttgggtatgaagacactcagtccttatataatccctcctcctcacctcactttttttgcaaacacaggtctcactttatagccctggctggcctggaactctctatggaggtcaggatggactcaaactcagtgacctgcctacctatgtctcctaagtacacgataaaggcatggcccaccatgcctggtcatcagggaccctttagatagcgtaagggtgaagttaaatttaagcagcaacattggggccatcagtaaatgaagctccacagctgtcaggatttgagtgctgcttataggaaggattgaggtcatgatcatcatgtagtttgtcccactgtctgggactcagggctacaaagccagctgtagtcatgccacaaaagagataagcagataggagctgtgcgtatcacttggaggccctttgctggttgttgggtatctgaaataggcagcagtgaagtaggggcacccataactggagcctatttgccacacagggctgagtgtcctgacagtaccgtgttagcccctgcctgccccgcaccttcagaagtgaccatcagtcctgccgtggctaccatagcaccaagcaaggcaggctctcccacggccaccatagtggtctcttcctcagtggctgctgcagtgcccccaggaccgatcgtggcagtaaccacagcagccccagccatagttgccaccctggggacgatgacaaaggacaggtgagtagattggccaaagagggtagggtgggactggatgaaccccagaagcccacatgctgcaactctgcctcttcccccatttatgcaggaaggcagatgccctgccagaaggcgctgccttaaatggtcctgtgtaactgctgccacccggccgtggcccgccctggtcaggctgcttccttaatcaagaaaactacctggtgatgcaatttttttttttaatttaactttaaaataaatgctgcatttggtaaagctggcagtggaaccagttggatgacccagctcctgtctctcctacctgcccttggtccttttggaagacagatggacctggccactccctgtccaggtcttggtctggcaatgaggcccctgacttg

SEQ ID NO: 441 - DNA, 3579 bp, Mus musculus
gcgatctcgcccgcggccccgagccggtcccgagcgggtcccgagcctcccgccggctgcgcccgagtccgaaggcgccgcgccgcggggtcgggcccatgtgcgtgcggcccgctccaggccgtccgcacttcacctctgcgagcgtcctggcctcgcttgggcctccctcggaggaggagtcgctgcgacccccagcctgctgggcaggtaaaccagccaaaactattccctgaatgaaaacacctttttttaaagttgcatatatacacaagaaaaaaccgaaatgctttttattttgcctgaatgcaagatttaaacaaggtattgccatagaagtctctaccacagagtgttctgttggaccctttcatggaactgtagcatcatatgggcgacacttgtgtttgaatcctatcctctgtcttccggttctgtcaccctgggaaataaagaagcaggacttgaggctcctttcactcattcgctgctgggatcaatgtccagggccaaggcagttttatttgtatggatttctgtttactgctgcattatagaggttgcagaatcccttaagctctgcgaccgccatcatgttctggaaatttgacttgaacaccacgtcccacgttgacaagctcctggacaaggaacatgtgaccctgcaggagctgatggatgaagatgacatcttgcaggagtgtaaggcccagaaccagaagctgctggacttcctgtgcaggcagcagtgcatggaggagctggtgaacctcatcacacaggacccaccccaggacatggaagagaaggtccgattcaaatacccaaacacagcctgtgagcttctgacttgtgatgtgccacagatcagcgacagactaggcgaggacgagagtctgctgaaccttctctatgacttcctggaccaggagccgccactcaaccctctgcttgccagttttttcagcaagaccattggcaatcttattgcaaggaaaactgaacaggtgatcatgttcctgaagaagaaggagaaattcatcagccagctcctgaagcacataggcacctcagctctcatggacctgctgctgcgcctggtcagctgtgtggagccagttggtctccggcaggaggtcctacattggctgaatgaagagaaaatcatccagagaattgtggcattgatccatccccaccaggatgaagataggcagtcaaatgcttctcaggcactctgtgacatcatcaggctgggcagagaccagggcagtcagctgcaggagactgtggagccagaccccctcctcataacattggagtcgcaggactgtgtggagcagcttctgaagaacatgtttgatggggatcagacggagagctgcctggtcagtgggatgcaggtgctgcttgccttgctggagccaaggcgtgttggaacagaaggcttggtggactccttttctcagggactggaaaggtcacactccgtcagcagcagcatccttcgtggcatcgagccatggctgaagaatttccatcagctcctcctcaacccaccaaagaaaaaagcaatcctgaccactattggtgtgttagaggagcccctggggaatgctcgtcttcatggtgcacgcctcatggctgcactgctgcacacaaacacacctggcatcaaccaggagctctgccggctcaacaccatggacttactgctggacttgttctttaagtacacctggaataactttttgcacctccaagtggaactatgcatagccgctattctttcccacgctgctcgggaggagcaggcagaagccagtggatccgatggcaaggtggagcctctgcagggcagtggagatgggaatgggaagctggagaccaccccatccatcaccagccctcctgagaacacaatggtgacccatctgttccagaagtgctgcctggtacagaggatcctggaagcctgggaagccaatgaccacacacaggcagcaggtggtatgagacgtgggaatatgggccacctcacaaggatcgccaatgcagttgtacagaacctggagcagggcccggtgcaggcccacatcagtgaagtcatccgagggctccctgcagattgccgtggacgctgggagagctttgtggaagagacattgatggagaccaaccgcaggaacactgtggacctggccttctctgagtaccagatccagcagatgacagcaaactttgtggatcagtttggcttcaatgatgaggagtttgcagaccaggatgacaacatcaacgccccatttgaccggattgcagagatcaacttcaacattgaagccgatgaggacagtcccagtgcagctctgtttgaagcctgttgcagtgatcggatccagccctttgatgatgatgaagaggaggacatttgggaagatgacgagactcgatgcgctgcccgggtgatggccagagccaggtttggagcccctcatgtctcagataattactcaaagaatgctttggaacatggaggccaggacaggaagactggctcagcagtagctaggaatgtgcctggattggccgctccttcatctcctacacagaaagaaggtcctcgctcagagagtgattcagcaggtactacatggacagcagtttttgatgagccagtgaacccgctgtctgcaaccccaggagctgcgagggatgtgggttctagtgcatgggcggctggtccttcagttgtagaggagaaaggctgggccaaattcaccgacttccagcctttctgctgctctgagacagggccccggtgcagctctcctgtggacatggaccacagcaatgccgagggtggccagagtccaggcccagagaaaacctttggtcctacctcgccttgtgcctggaatgtgtgtgtcactaggaaggcccccctggtagcctctgacagcagctcctctgggggatctgacagtgaagatgacgagaaggcagcgggtgctgtggaagctgtgtgcacaggccatactggaaaggtctccccaccacccaggacagcggaggctgctgttggcagggctgagtgtcctgacagtaccgtgttagcccctgcctgccccgcaccttcagaagtgaccatcagtcctgccgtggctaccatagcaccaagcaaggcaggctctcccacggccaccatagtggtctcttcctcagtggctgctgcagtgcccccaggaccgatcgtggcagtaaccacagcagccccagccatagttgccaccctggggacgatgacaaaggacaggaaggcagatgccctgccagaaggcgctgccttaaatggtcctgtgtaactgctgccacccggccgtggcccgccctggtcaggctgcttccttaatcaagaaaactacctggtgatgcaatttttttttttaatttaactttaaaataaatgctgcatttggtaaagctggcagtggaaccagttggatgacccagctcctgtctctcctacctgcccttggtccttttggaagacagatggacctggccactccctgtcca

SEQ ID NO: 442 - protein, 915 aa, Mus musculus
MFWKFDLNTTSHVDKLLDKEHVTLQELMDEDDILQECKAQNQKLLDFLCRQQCMEELVNLITQDPPQDMEEKVRFKYPNTACELLTCDVPQISDRLGEDESLLNLLYDFLDQEPPLNPLLASFFSKTIGNLIARKTEQVIMFLKKKEKFISQLLKHIGTSALMDLLLRLVSCVEPVGLRQEVLHWLNEEKIIQRIVIHPHQDEDRQSNASQALCDIIRLGRDQGSQLQETVEPDPLLITLESQDCVEQLLKNMFDGDQTESCLVSGMQVLLALLEPRRVGTEGLVDSFSQGLERSHSVSSSILRGIEPWLKNFHQLLLNPPKKKAILTTIGVLEEPLGNARLHGARLMAALLHTNTPGINQELCRLNTMDLLLDLFFKYTWNNFLHLQVELCIAAILSHAAREEQAEASGSDGKVEPLQGSGDGNGKLETTPSITSPPENTMVTHLFQKCCLVQRIAWEANDHTQAAGGMRRGNMGHLTRIANAVVQNLEQGPVQAHEVIRGLPADCRGRWESFVEETLMNRRNTVDLAFSEYQIQQMTANFVDQFGFNDEEFADQDDNINAPFDRIAEINFNIEADEDSPSAALFEACCSDRIQPFDDDEEEDIWEDDETRCAARVMARARFGAPHVSDNYSKNALEHGGQDRKTGSAVARNVPGLAAPSSPTQKEGPRSESDSAGTTWTAVFDEPVNPLSATPGAARDVGSSAWAAGPSVVEEKGWAKFTDFQPFCCSETGPRCSSPVDMDHSNAEGGQSPGPEKTFGPTSPCAWNVCVTRKAPLVASDSSSSGGSDSEDDEKAAGAVEAVCTGHTGKVSPPPRTAEAAVGRAECPDSTVLAPACPAPSEVTISPAVATIAPSKAGSPTATIVVSSSVAAAVPPGPIVAVTTAAPAIVATLGTMTKDRKADALPEGAALNGPV

SEQ ID NO: 443 - DNA, 3458 bp, Mus musculus
gagcgatctcgcccgcggccccgagccggtcccgagcgggtcccgagcctcccgccggctgcgcccgagtccgaaggcgccgcgccgcggggtcgggcccatgtgcgtgcggcccgctccaggccgtccgcacttcacctctgcgagcgtcctggcctcgcttgggcctccctcggaggaggagtcgctgcgacccccagcctgctgggcaggtaaaccagccaaaactattccctgaatgaaaacacctttttttaaagttgcatatatacacaagaaaaaaccgaaatgctttttattttgcctgaatgcaagatttaaacaaggtattgccatagaaggatcaatgtccagggccaaggcagttttatttgtatggatttctgtttactgctgcattatagaggttgcagaatcccttaagctctgcgaccgccatcatgttctggaaatttgacttgaacaccacgtcccacgttgacaagctcctggacaaggaacatgtgaccctgcaggagctgatggatgaagatgacatcttgcaggagtgtaaggcccagaaccagaagctgctggacttcctgtgcaggcagcagtgcatggaggagctggtgaacctcatcacacaggacccaccccaggacatggaagagaaggtccgattcaaatacccaaacacagcctgtgagcttctgacttgtgatgtgccacagatcagcgacagactaggcgaggacgagagtctgctgaaccttctctatgacttcctggaccaggagccgccactcaaccctctgcttgccagttttttcagcaagaccattggcaatcttattgcaaggaaaactgaacaggtgatcatgttcctgaagaagaaggagaaattcatcagccagctcctgaagcacataggcacctcagctctcatggacctgctgctgcgcctggtcagctgtgtggagccagttggtctccggcaggaggtcctacattggctgaatgaagagaaaatcatccagagaattgtggcattgatccatccccaccaggatgaagataggcagtcaaatgcttctcaggcactctgtgacatcatcaggctgggcagagaccagggcagtcagctgcaggagactgtggagccagaccccctcctcataacattggagtcgcaggactgtgtggagcagcttctgaagaacatgtttgatggggatcagacggagagctgcctggtcagtgggatgcaggtgctgcttgccttgctggagccaaggcgtgttggaacagaaggcttggtggactccttttctcagggactggaaaggtcacactccgtcagcagcagcatccttcgtggcatcgagccatggctgaagaatttccatcagctcctcctcaacccaccaaagaaaaaagcaatcctgaccactattggtgtgttagaggagcccctggggaatgctcgtcttcatggtgcacgcctcatggctgcactgctgcacacaaacacacctggcatcaaccaggagctctgccggctcaacaccatggacttactgctggacttgttctttaagtacacctggaataactttttgcacctccaagtggaactatgcatagccgctattctttcccacgctgctcgggaggagcaggcagaagccagtggatccgatggcaaggtggagcctctgcagggcagtggagatgggaatgggaagctggagaccaccccatccatcaccagccctcctgagaacacaatggtgacccatctgttccagaagtgctgcctggtacagaggatcctggaagcctgggaagccaatgaccacacacaggcagcaggtggtatgagacgtgggaatatgggccacctcacaaggatcgccaatgcagttgtacagaacctggagcagggcccggtgcaggcccacatcagtgaagtcatccgagggctccctgcagattgccgtggacgctgggagagctttgtggaagagacattgatggagaccaaccgcaggaacactgtggacctggccttctctgagtaccagatccagcagatgacagcaaactttgtggatcagtttggcttcaatgatgaggagtttgcagaccaggatgacaacatcaacgccccatttgaccggattgcagagatcaacttcaacattgaagccgatgaggacagtcccagtgcagctctgtttgaagcctgttgcagtgatcggatccagccctttgatgatgatgaagaggaggacatttgggaagatgacgagactcgatgcgctgcccgggtgatggccagagccaggtttggagcccctcatgtctcagataattactcaaagaatgctttggaacatggaggccaggacaggaagactggctcagcagtagctaggaatgtgcctggattggccgctccttcatctcctacacagaaagaaggtcctcgctcagagagtgattcagcaggtactacatggacagcagtttttgatgagccagtgaacccgctgtctgcaaccccaggagctgcgagggatgtgggttctagtgcatgggcggctggtccttcagttgtagaggagaaaggctgggccaaattcaccgacttccagcctttctgctgctctgagacagggccccggtgcagctctcctgtggacatggaccacagcaatgccgagggtggccagagtccaggcccagagaaaacctttggtcctacctcgccttgtgcctggaatgtgtgtgtcactaggaaggcccccctggtagcctctgacagcagctcctctgggggatctgacagtgaagatgacgagaaggcagcgggtgctgtggaagctgtgtgcacaggccatactggaaaggtctccccaccacccaggacagcggaggctgctgttggcagggctgagtgtcctgacagtaccgtgttagcccctgcctgccccgcaccttcagaagtgaccatcagtcctgccgtggctaccatagcaccaagcaaggcaggctctcccacggccaccatagtggtctcttcctcagtggctgctgcagtgcccccaggaccgatcgtggcagtaaccacagcagccccagccatagttgccaccctggggacgatgacaaaggacaggaaggcagatgccctgccagaaggcgctgccttaaatggtcctgtgtaactgctgccacccggccgtggcccgccctggtcaggctgcttccttaatcaagaaaactacctggtgatgcaatttttttttttaatttaactttaaaataaatgctgcatttggtaaagctggcagtggaaccagttggatgacccagctcctgtctctcctacctgcccttggtccttttggaagacagatggacctggccactccctgtccaggtcttggtctggcaatgaggcccctgacttg

SEQ ID NO: 444 - protein, 915 aa, Mus musculus; identical to SEQ ID NO: 442

SEQ ID NO: 445 - DNA, 74899 bp, Homo sapiens
  misc_feature (1)...(74899): n = A,T,C or G
caggtaaagagattataaatcttccactgaatgaaaaaaattttcttaaagctgcatatactccaagaaaaaaaccacaaatgtttttctgttttgcctgaatacatgatttaaacaagagatttccacagaaggtaagataagtttctttttcaatttgattctgttttattgtgtaatttatgtaaaagttctgtacaggtggaagttcaaagatgggtcacagcgaaaaacgtagtttagaagatatgctggctgggcactgtggctcacacctgtaatctcagcactttgggaggccgaggtgggtggatcatgagatcaggagttcgagaccagcctgaccaacatgatgaaacccgtctctactgaaaatacaaaaattagctgggcatagtggtgtgtacctgtaatcccagctactcaggaggctgaggcaggagaatcgcttgaatccaggagatggaggttgcagtgagccgagatcgtgtcactgtactccagtctgggcgacagagcaagactctgnnnnnnnnnnnnnnnnnnnnnnnnnnnnnnnnnnnnnnnnnnnnnnnnnnnnnnnnnnnnnnnnnnnnnnnnnnnnnnnnnnnnnnnnnnnnnnnnnnnnnnnnnnnnnnnnnnnnnnnnnnnnnnnnnnnnnnnnnnnnnnnnnnnnnnnnnnnnnnnnnnnnnnnnnnnnnnnnnnnnnnnnnnnnnnnnnnnnnnnnnnnnnnnnnnnnnnnnnnnnnnnnnnnnnnnnnnnnnnnnnnnnnnnnnnnnnnnnnnnnnnnnnnnnnnnnnnnnnnnnnnnnnnnnnnnnnnnnnnnnnnnnnnnnnnnnnnatcaagtgattacttcttcatcagcctcccaagtagctgggactacaggcacgcaccaccacacctggctaatttttgtatttgtagtagagacggggtttcaccatattgaccagggtggtctcgaactcctgaccttgtgatccgcccgcctcggcctcccaaagtgctgggatagcaggcgtgagccaccgcgccctgtccaaagtttaattctgacaaaacaggaacagttttgcacatatttaatgaggtatatgttccgtctcacttgcagggaacatgtgagatacagcatatacactgtcacagttgccattcaaaccacacagttacgcagaaaatgaaaaggggagggaaggacctctgcttccagcaatataagatactcttacgaggctcttccattgcagttcagtgagatgctggataaattagaataaatataatttctttctttttttttttttttttttgagacagagtcttgctcagtcgcccaggctggagtgcagtggcgcgatctcggctcactgcaagctccacctcctgggttcatgccattctcctgcctcagcctcccgagtagctgggactacaggcacccgccagcacgcccggctaattttttttgtatttgtagtagagacggcatttcaccatgttagccaggatggtctcgatctcctgacctcgtgatccgcccgcctcggcctcccaaagtgctgggattacaggcgtgagccaccgcgcccagcctaatttctttattctttattttttttcaagacaaggtctcactttgtcacccaggctggagtgcagtggtgtgatcatagctcaccacaaccatgtacacctaggctgaaaggaacctctcacttaagtctcctcagtagctgggactataggaatgcaccactacggctaatttatttatttatatatttttatgtgtttttttttgtgagacagagtcttgctctgttgcccatgctggagtgcaatggcatgaccttgactcactgcaacctccgcctcctgggttcaagcgaatttcctgcgtcagcctcccgaatagctgggattacaggcaccagccaccatgcctggctgatttttgtgtttttagtagtgacggggtttcaccacgttggtcaggctggtcttgaattcctgacctcaagcaatccacccacctcagcctcccaaattactgggattattataggcgtgagccaccgcacccagcccaccatggctaatttaaaaacaatttttttagagatggggtctcactgtgttgtccagactggtcttgaactcctgggccgaagtgatcctcctgccttggcctcccaaagtgccgagattataggtgtgagttaccacgcttggccaaatataatttctgtgagcactctgatgcgttaaaaattaagatgacccagctgggcggatggatggcttgagtctgaaaggtggaggttgcagcgagacaagatcgtgccgctgccctccagcctgggtgacagagccagaccctgtctcaaaaaaaagaaacccaccaaaattcaacatatggattaaacagattaaacacagatgcagatggaattggtaaagtgaaacacagtgaaagacattatccaaagtgcagccctgagagatcagtgatggtagtaaatatgtagctggaattcctagaatgaaaaaatcaggaatattgaagagatgtattattcgaagtattaatagctttgaacttcagaaactaataaaagacctaaatcccataggtttaggaatcacaatatgtacccaatcaatatttttagaaaaaaacaaacnnnnnnnnnnnnnnnnnnnnnnnnnnnnnnnnnnnnnnnnnnnnnnnnnnnnnnnnnnnnnnnnnnnnnnnnnnnnnnnnnnnnnnnnnnnnnnnnnnnnnnnnnnccaaggtgggcggatcataaggtcaggagattgagaccatctttgctaatacggtgaaaccccgtgtctactaaaaatacaaaaattagccgggcgtggtggtgcgcgcctgtattcccagctactcaggaggctgaggcaggagaattgcttgaacgtgggagatggatgttgcagtgagccaagatcacgctactgcgctccagcctgggcgagagcgagactctgtctcaaaaaaaaaaaaaaaaaaaagagaaaaagaaaaaaacaaacccacacccatacactgaaatcgtatagcaccaaagacaaaaagaaggtgttaaggtaaagttaaaagatagattacctaaaatggaacattagctaggttgacaacagatgtctcagcagcatgaatggaagccagtagagagtagaataattcctcaaagcgacgagagcatgtatgttttattatagaatcgtgttatcaaataaattttgcaagaaaaatggcaaggttttatgtttctgagaatgttaggctaggttagactaccttctactcccccaccctccaccccagaaaaacagccacaattgttagatgaaaaaacataaataaaagaactgacaaaaaagcaggaaacttttggatcaaaatctaactgaaaataacgcagaaaggtaatttaaacaccatagaatggggtctgcttttgtcctgagggcatttgctcatgtggacaaagtggggctttgagtttagaggatttgtgaaaagaacagtagttaagctcgattcctctcaaggtaaatagcctaaaggagaccctccccacaccgatggaactctgaagggctctatcctcaaggtgtgagggcagactagaggcacatgtgcctcacaccgttccttgccctcatctggttgtctttttactaaatgtagcacaaaaagatgaaaagggaaaaaaacctgttcctgagaattgtagctctgtattggcctttgtgaggatttttagcccagttacattgcctggtagttcagggaaatcgggcatgaatttaattcaaggtgtttctagcttgtcatctgacaggaacaaagataaaacctctctggaagaagttaccttcatcctaagatacaaagaatccctgcagattttttttttttttttttttttttttgagatggagtcttgctttgtatcccaggctgaagtgcagtagcacaatctcggttcactgcaacctctgcctcccaggttgaagcgattctcctacctcagccttgcaagtagctgggactataggcgtgtgtccggctaatttttgtatttttagtaaggacggggtttcactgtgttggccaggctggtcttgaactcctgacctcaggtgatccgcctgcagatattttttaaggacagtgattaatagtacacagacaaaaatgactaagcacacaagcaaataagccactctgagttaaaaccagtacagttcaggtgtggtggctcatgcctgtaaccccagcatattgggaggctgaggcaggaggatggcttgagtccatgagtttgaggctgctgtgagctatgattgcaccgctgcactccagcctgggtgacaaagtgaaaccttgtctcaaaaaaacccccagaaaatgaaaacaggaaaaccagtagaaacacttcctcaaagacttcaggtattggaattgttagaaacagactataaaaaaagtgtactttttgtatgtgtgtgagaaggtcttactctgtcgcctaggctggagttggagtacagtggcgtgatcttggctcactgcaacttccgcctcctgggctcaagtgatccttctgtctcagccttctgagtggctgggactacaggcacacaccaccacacctggctaattctttgtattttttgtaaaaacaggtttttgccgtgttgcccaggctggtcttgaattcctggctttaagcaatctgcccacctcggcctcctaaagtactggaattacaggcgtgatctagcatgctggctgagtgtgcttcttatttttaaagaaataaatatttggctgggtgcagtggctcacgcctgtaatcccagcagtttgggaggccgaggcgggcagatcacaaggtcaggagatggagaccatggtgaaaccccgtgtctactaaaaatacaaaaaattagccgggcgcggtggcaggcgcctgtagtcccagctactcgggaggctgagacaggagaatggcgtgaacccaggaggcggagcttgcagtgagccaagatcacaccactgccctccagcctgggcaacagagcgagactccgtctcaaaaaaataaaaaataaaaagaaataaatatttaacaacataaaaatatttgtaagaaacagtaaaaggtgatatagaatatttgaaaaaggaccatgtagaacttctagaaataaagaataaaatattcagtatcacaaattcaggccaggtgaggtggctcatgcttgtaatcccagtactttgggaggtagaggtagggagatcacttgagcccagaagttcaagaccagcctgggcaacatggtgaaaacctgtctctacaaagaatttttaaaattagccaggcgtggtggtgcacacctgtagtcccagctacttgggaggctgaggtgggaagatcactcgagcccaggaggtcaagccatcattgtgcaagtgcactgcagcctgggtgacagaacaagaccctctctcaataataataataataattcagtgtgtacaggtttaataacaaaatatatacagtgaagtgaaaatcagtgaaccagaaaacaggtcagaaggaattacccagaatgaagcacagagaaaatgatgggaaacataggccagaacatgggacatcgagggcaaatgtctaatggatgtttacttaatgttctgtaaagagaaaagagagaatgaggcagatttattattagaaaagataaagactaaaatttctcagaattggtgaaagaagtctacagatttaggccaggcgcggtggctgacgcctgtaatcccagtactttgggaggctgaggcgggaggatcacaaggtcaagagttccagaccagcctggccagcatggtgaaaccctgtctctactaaaaacacaaaaagtagctcagcgtggtggcacgcacctgtaatcccagctactcacgaggctgaggtaggagaattgcttgaccccagaaggcggaggttgcagtgagctgagcttgagcgctccagcctgggtgacagagcaagactccgtctcaaaataaaagaagtctacagatttgagaagacaaatgaatggtaagcaggataaataaaaataaaatttatagctagccaaaggagagtaaaactacaaagcaccaaagagtgttcttaaaataaacgaaaaacacagatcaactttatctgagcagcagtaagaatgatggctgacttcttaagtgccacaatggaaaccagaagccagtggagtaatattttcattgtgctgaaagtaaaacaattcctgacttctaactttatatcaggaaaaattatctttcaaaaaaattatctgctgtaggctgggtgcggtgggtcaccctgtaatcccagcactttgggaggctgaggcaggtggatcacctgaggtggggagttcgagaccagcctgaccagcgtggagaaaccccatctctactaaaaatacaaaattagccagacgtggtggtgcatgcctgtaatcccagctacttgggaggctgaggcaggagaactgcttgaacctgggaggtggaggttgtggtgagctgagatggcgccattgcactccagcctgggcaacaagagcaaaactctgaaaaaaaaaaattatctactgtagttgaatgtttatgtccctccagaattcatattgaaacttaatccccaatgcaatagttttaagaggtggggcttaccagcctgagcaacatggtgaaaccccatctctacaaaaaaaaaaaaaattagctgggcctggtggggcatgcctgtagacccacctacttgggtggctgaggcaggaggatcactcgagcccaggagattgagactgcagtgagccatgattgcactgctgcactcctgcctgagcaacagaattaaaccctgtcccaattaaaaaaaaaaaaaaaaaggtgaggcctagaatatgatgaggccgtgagggctccactctcatgaatgggattagtgccttgtagaagggcttgagggagtctgttagtcccttttgccatgtgaggacacagtggaggcaccatctgtgaaaattaggtcctcatcacacactgaatctgctgctgccttggttttggatttcccatctcccagagctgtgagaaataattttctgttgtttataaattacccagtctaagatattttgttatagcagcagaaacaggctaagacacagtcctttactaaatacaattctcaagaataggggccaggcacagtgattcatgcctgtaatcccagcactttgagaggctaagaagggtggattgcttgagtccagaagcttgagaccagcctgggtgatgtggtgaaaccccgtctctacaaaaaaataaaaaaattagccgggagcggtggtgcatgcctgtagttccagctacttgggaggctgaggtgggagtatcacttgagcctggaggtggaggctgtagtaagttaagatcacaccactgcactctagcctgggtgacagagtgagaccccgtatcaaagtaaaataaaagatagaatggactttaggcagaaaacagtgatcctaaatggaagaactgagattcaaaaaagaatgcaaagcaaatatgtgagcaaattcaaattagcattggaggggtgcagtggctcctgcctgtaattccagcactttgggagggtcacttgagcccaggagtttgagaccagcctgggccacatagggagaccttgtctctacaaataataaaaaaattagctgggcatggtggcacattcctgtagtcccagatacttaggaggctgagatgggaggatcacgtgagccttggaagttgacattgccgtgatcacaccaccatactccagcctgggtggcagaccgaaaccctgtcccctccaaaaaaccccactaattgtttagtaatataataatatctatggggtaaaatcaaggtagaatttcataatacatgaaaatagtaacaaataagtcatgaaggagagtaaatgaagttaaaacattccagtctttgtagtagctgtgtcttagtccatttgtgttgctataaaggaataccagagggtgggtaatttataaggaaaagaggtttgacacagttctggttctggtaagagtttcaggctgcttccgctcatggcaaaagttcaaggggagccaaagggaagctagcttgtagagaccccgtggtgatagagaggaagagagagaaagagaaggtgccagtctttttcttttttttttttggtatttttagtagagatgggggttttaccgtgttagccaggacggtctcgatctcctgacctcgtgatccacccgcctcagcctcccaaagtgctgggttacaggcgtgagccaccacgcctgatgtttttttttttgagnnnnnnnnnnnnnnnnnnnnnnnnnnnnnnnnnnnnnnnnnnnnnnnnnnnnnnnnnnnnnnnnnnnnnnnnnnnnnnnnnnnnnnnnnnnnnnnnnnnnnnnnnnnnnnnnnnnnnnnnnnnnnnnnnnnnnnnnnnnnnnnnnnnnnnnnnnnnnnnnnnnnnnnnnnnnnnnnnnnnnnnnnnnnnnnnnnnnnnnnnnnnnnnnnnnnnnnnnnnnnnnnnnnnnnnnnnnnnnnnnnnnnnnnnnnnnnnnnnnnnnnnnnnnnnnnnnnnnnnnnnnnnnnnnnnnnnnnnnnnnnnnnnnnnnnnnnnnnnnnnnnnnnnnnnnnnnnnnnnnnnnnnnnnnnnnnnnnnnnnnnnnnnnnnnnnnnnnnnnnnnnnnnnnnnnnnnnnnnnnnnnnnnnnnnnnnnnnnnnnnnnnnnnnnnnnnnnnnnnnnnnnnnnnnnnnnnnnnnnnnnnnnnnnnnnnnnnnnnnnnnnnnnnnnnnnnnnnnnnnnnnnnnnnnnnnnnnnnnnnnnnnnnnnnnnnnnnnnnnnnnnnnnnnnnnnnnnnnnnnnnnnnnnnnnnnnnnnnnnnnnnnnnnnnnnnnnnnnnnnnnnnnnnnnnnnnnnaaaaaaaaaaaaaaaattagctgggcgaggcaggagaatcacttgaacctgggaggtggatgttgcagtgagccaagatcacgccattgcactccagcctgggtgacaggaatgaaactttgtctcaaaaaaaaaaaaaaaaagagaactcagttactccctcaagaatggcaccaaaccatttacgagggatcttccccgacaaccagaacccctcctaccaggctccacctcagcatggggcaccacacgggccccacctcagcatcacacgggcctcacctcagcaccacacgggccccacctcagcaccacacgggccccacctcagcatcacacgggcctcacctcagcaccacacgggccccacctcagcaccacacgggccccacctcagcatcacacgggccccacctcagcaccacacgggccccacctcagcatcacacgggccccacctcagcaccacacgggccccacttcagcaccacacgggccccacctcagcatgaggcatcccagtttaacatcaggcttggtggggccaaagaaaccatatccaaattacagcaaactaggatagggattaactgtagattttaataagtgcagtttacaagttctaaggaattattgtaggaatagaaactggccaggcgtggtggctcacgcctgtaatcccagcactttgggaggccgaggcgggtggatcacgagatcaggagattgagaccacggtgaaaccccgtctctactaaaaatacaaaaaattagccgggcacggtggcgggctcccgtagtcccagctactcaggaggctgagacaggagaatggcgtgaacccgggaggcggagcttgcagtgtgctgagatcacaccactgcactccagcccgggtgacagagcgagactccgtctcaaaaaaaaaaaaaagaaaaaaaaggaatagaaactgtacaatttccaaattagtgaagagaaagtagtggaccttcctttattcttgtaaggaaaagctgcaacaatttttttagcaaccattaactaaatgataatatatattgaaaacttaacctgtgaaaatggaaagaagacagggtgcatgcttttaccacttgagaatagtgatggaagtcttagcccaataaatcagaaaaaggataaaaagataaaagaatttaaaaggaagaaacaatctattattcgttggtgatactattatgtatgtagaaaatccaaaatgatccaaagctataatacagtcaattctttacccaaacagctttaaagtcaataatcttttagcaattgtctggataaaaaagtcaaacagggcacggtggctcatgcctgtaatcccagcactttgggaggctaaggcgggcggatcacaaggtcaggagttcgagaccagcctgactaacatggtgaaaccccgtctctactaaaaatacaaaaactaagccaggcatggtggctcacgcctgtaatcccaggcctgggctaggcaaaagggtgaaaatccgtctccaaaaaaaaaaaaaaattcaaacaaaaataaattacagtgtaccaccaacaaacacactgaagttaaaaagtagaattataaataaaaaatacctgggaataaaataaaagatgtgtaaaacctttatggagagcactatacaattttgaaagcaattaaagacttgaataaatgggcagaggtaccctggttttggattggaaaacttactgttataccagttcttctccaactgatcgagaaattgagtgcaatcccaataaaaaacccgagattgtcagtgagggtgtgggaaaagggtgaaatttacaagcaaatttttttttttttttttttgagatagggtctcactctgtcacccaggctggagtgcaatggcacagtctcagctcactgcaacctctgcctcccagactcaagcgattctcctgcctcagtctcccgagtagctgtgattacagggatatgccatcacgcctggctaatttttgtgtttttagtagaaatggggttttaccatattggccagggtggtctcaaactcctgacctcatgtgatctgtctgccttggcctcccaaagttctgggattacaggcataagccagcacacccggcctgatttagaaatgatatgaaaatgaaggggtccatgaatactcaaggtgtgattgaagaattccaattcattccatgtgtcaaagatcttgttttaagatgttggtgtttttatattggtagggtgcccatcagccctggtttgcccaagtgtcctggtttttcctgtggtcctggtctcattaagaaagtgttttcatttcgagtccttttggaagtcttattctgctgtttgggtaaagaattgactgtattttttagtttttaatttttgtttttagggttgcccgtgttttcccaaatacagaattctaaaccagagaatagcaccttacatagtagagagattgcttctcttttggtaggcggtggccaggaaggaacgccaggtagcattaagccttggcccccaagtatgtcttgttccctgtctctttgctttcagtgggttccttgggccttcttgtttatgatggagaatacataggaattagcctcctcagcttccttctttcttgctgtgcttaagacaagcagccatatggggctgttatctttctgccactgggaaatgagagggtgggtgctaaaaaattaacttaaaaaggaaaaggatgaggccaggcgcagtggctcatgactgtaattgcagcactttgggaggctgaggtgggcggatcacctgaggtcaggagttcaagactagcctggccaacatggtgaaatcctgtttctactaaaatacaaaaattagccaggcatgatggtggatgcctgtaatccaagctacttgggaggctgagacgggagaatcgcttcaacccgggagatggtggttgcggtgagccaagatcacaccactgcactccagcctgggcggctgagcgagactccatctcaaaaaaaaaaaaaaaaaaagaaggatgaacacctttgagctcgtgtgttagtgacatcacatcccttctttcattcatttagtaaattcaagtatgatttgttgggcacttataatatgccaggtgcattacataactcctgtggccttttgaagaaaatattattttatatgaagctcagtgtcttaatctgttttctgctgtttagaatacctgagactgggtaatttataaagaaaagaaattttagtggctcacgcctgtaatcccaccagtctgggaggctgaggtgggcagatcacgaggtcagtagaccgagaccatcctggctaacacagtgaaaccccgtctctactaaaaatacaaaaaattagccgggcgtcgtggcgggtgcctgtagtcccagctactcaggaggctgaggcaggagaatcgcttgaacttgggaggtggaggttgcagtgagccaagatcgcgccactgcactccagtctgggcgacagagcgagactccgtctcaaaaaaagaaaagaaaagaaatttatttcatatggttatggaggctgagaagttcaaggttgagaggcatatctggtgggggccttcttgctgctggggacactgtggtggcccaaggtggcgtgggacatcacgtggcaagggagctgagtagtgtactagctcaggtctttcttccttttttttttgttttgtttttttaagagatggggtgtcactctgttgcctaagctggaagtgcaggggcacaatcatggctcactgcagcttcaacctcctgggctcaagcgatcctcccacctcagcctcctgagtagcagggactataggcgcacagcaccatgctcagctaatcttgttttgttttgttttccatagagacagggtcttgccatgtctagcaggctggtctcaaactcctggcctcaagtgagcctcctgcctttagccttccatagttctgggatcacaggcctgagctactgtacctaacctcttctttttataaagccaccagttccactcccatgataactcattaattcacaaatggattaatccattcttgagggcagagctctcatgatccaattacctcttaaaggccctacctttcaatactgccacactgggattaagttttgttttgttttgttttggagacagaatctcacgccgtcacccaggctggagtgcaatggtgcgatttagactcactgcagcctctgcctcccaggttcaagcgattcttgtgcctcagcctcccgagtagctgggattacagacacgcactgccatcacgtccggctaatttttgtatttttagtagagacagagtttcaccatgttggccaggctggtctcaaactcctgacctcaggtgatccacctgccttggcttcccaaaatgccgggattacagcatgagccaccacccccagccagggattaagtttttttttttttttttccttttttgagacgaagtcttgctctcatcccctaggctggagtgcaatggcgctatctcggctcactgcaacctctccctcccgggttcaagcgattctcctgcctcagcctcctgagtagctgggattataggcacctgccactatgcctggctaatatttttatttttagtagagacagggtttcaccatgttggccaggctggtcttgaactcctgacctcaggtgatccacctgcctcggcctcccaaagtgctgggattacaggcatgagccaccgcgcccagctttttttttttttttttttttttttttgagacggagtcttgctctgtctcccaggctggagtgcagtgactcgatctaggctcactgcaagctccacctccccagttcatgccattctcctgcctcagcctcccgagtagctgggactacaggcgctcgccaccacgccaggctaattttttgtatttttagtagagacggggtttcactgtgttagccaggatggtctcgatctcctgacctcaggtgatccgcccgcctcagcctcccaaagtgctgggattacagacgtgaaccactgcgcccggacaaggttttttttgttttgttttgttttgttttttttgagatggagtcttgctctgtctcccaggctggagtgcagtggtgcaatctctgctcactgcaacctctgcctgctgggttcaagcgattctcctgcctcagcctccaagtagctgggattacaggtgcccgccaccatacccagctaattttgtatttttagtagagatggggttttgccatgttggccaggctggtctcaaactcctgacctcaggtgatccacctgcctcgaccacccaaagtgctgggattacaggtgtgagccactacgcccggccttaagttttaacatgagttttggagtggttatatattcaagccatagactcagggaagtaaagaaccttgctcaaattgtagtaaggtacaaaccgagcttctgcagcaaggaggtcccaaagaacagtggcttgagcaaggtgcaagcacatttctttctcctctaacagtctggtctgccaggtggccttcctcagcttgtggcttccactcgtggatctagaagggtctttatggtttttggtttcccaccaggcggtaaaatcagaacgaaggaagctcacaacagtaagaggttgaggttccagtgttagttacttctactcgcaacccatttacccagagtttagtcacatgatgatagctggctgtaaggagggttggaaaagttaggctgaaggagggtggccatgtacccagctgacctctattctgttgaagaaagggaaactggaaactggggacaagtagaatgtcccccacacctgcctgcagtcacacaggtggagggtgtggatccaggccctctcttcctatctgtcctgctcttccgcggtaccttactactgtttttgggaagaagcagcctttgcgaactttatgtatgtattaaattaaaatcatttatttattttttgagacagggtcttgctctatcaccgaggctggagtgaaggggtacgatcatagctcagggcagcctcaacctcctgggctcaagcgatccccctgcctcaggctcccggagtagctgagatgatagtcccacaccaccatgcccagctagtttttaaaactttttttgtagagctggggtcttgctgtgttgcccaggcttgtcttgaactctgggctcaagtgaccctcagcctcagcctcggcctcccgaattgttgggattacaagcatgagccatgtgcctcttttcacttctgattttggatttttacttaacttgtttgtcccactccaccccctttttaaagttagactctttttcctggtcttttttccccggtggactatgctcaggatcgacatagtcttgtttgttccttggttgtacaaatagtcattgtgcttcatgtgctcacgttgccatttttttccgggccaaatggaaatcaagcattcagcctatccagtggtatgttggtaaatgtttaacaacgggctttctggggaggaaaaaacctcctggtttgtaacacttgctgatttccatggcgttaatactcccaccacgttggagttgagctgccagggtgatgtcctgaaggtggaagagggaagagaggtatgagggctcaggttgggccaccgcggcgcacgccctctgtgggcacagtgactttatctctgtttccgtctctttacgctgagggtctttgagaatgaaacgtgctgggaactgttctagagcctttatgtggaataacttagtaatcctccccacaggggatgtcgatgctgcattttacgggtgaggaaatcaaggcatgagagatcatgtgagtggcctcagctcacaccgcagagctaggactttgatcataaatctttaaaagaacaaaacagtggctgggcgccagtggctcatgctgtaatcccagtgctcatgctgtaatcccagcaccttgggaggctgaggcaggtggctcgcttgagcccaggtgttcaagaccagcctgggcaacatggcaagatgtggtctctataaaaaatttttttaggatttaaaaaaaaaaacagtcagcttgggtaacatggcaaaaccttgtctctacaaaaaaagtacaaaaattagctgggtgtggtggcgcatgcctgtagtcccagctacttgggaggctgaggagggaggatcacttaagcctgggaggttgaggctgcagtgtgccaaaatcccaccactacactccagccttggcaacagagcaagaccctatctcaaaaaaaaaaaaaaataagcctaaatcctggacaaggtggctcatgtctgtaattttagcactttgggaggctgatgtgggagggttgcttaagcccaggagttcaagactgcagtggctgtgttcaggtctctgcactccagtctggctcacagagcaggaccctgtctcaaaaatacacataaattttttaaaaagggccaggcacggtggctcacgcctataatcccagcattttgggaggccgaggcgggcagatcacaaggtcaggagttcaagaccagcctggccaatatggtgaaacccagtccttaataaaaatacaaaagttagctgggtatggtggcaggcacctgtagtcccagctactcaggaggctgaggcaggaaaatggcttgaacccaggaggcggaagttgcggtgacctgagattgtgccactgcactccagcgtggggacagagtgagactccatctcaaaaaaaaaaaagaaaagaaaaaaaaatgatttgtggccagacaggtaatagggcatttcagattctaattttctcttagcaacagtctctatcacagaatgttgttttttaaagggcgctttcatggaactatatgatcatatgggcaacattctgttgcagtctaccttctgtctgacggatatgccatcctgaaaaaggaaagaagctgaacttcaagttcctttcatttagccttgggtaagaatctagaagatgttggtcatactgtgcttgacatcccagatggaccactgaggatgggagtcaggatgtgagaggagtccttaagctctgttgagacttccgatgtaaccagaaattccttaaaccaacaagccaggccatgaccacttgtttgttctgaagatgctgccagtgctgaccttgaggtcatgtagggaaggaaatggaaggccttccctgtaggtgagggccaaccaggaagatgctagcatctgtttggaggatagggtgtagttgtgcagataggagaaaacttggaaaaaagaagtatgtaatattatgttagtaaatgttctggagtcagtttataccagtttctttgacagtgaaattagctgtaactaaaccagtgccattgcagtgaactcttaaaggatgtctctgatgtgatctttttttgtttttttttttttttgagatggagtctcgcgctgtcgcccaggctggagtgtagtggcgtgatctcggctctcgctctgtcgcccaggctggagtgtagtggcgtgatttcagctcactgcaacctccacttcctgggttccagtgattctcctgcctcagcctcccgactagctgggatttcagatgtgcaccaccatgcctggctaatttttgtatttgtggtagagatggggttggccaggctggtctcgaactcctgacctcaagtgatctgcccgccttggccccgcaaaatgctgggattacaggcatgagccacagtgcccagcctgatgtgatcatttttgagtgtttcttagaatgtggggagagctgatagaaacatagaaatgttcttgttatgcggagatttttttcttttttctttttctttttttttctttttttttttgagatggagtctctcactgtcacctaggccagagtgcagtggtgtgatatcggcttactacaacctctgcttctcgggttcaggcgattctcctgcctcagcctcccaagtagctgggattacaggcacccaccaccacgcccatctgatttttgtgtttttattagagatggggtttcaccatgttggtcaggctggtctcaaactcctgacctcaggtgatccacccgcttcatcctcccaaagtgctgagattacaggcgggagccaccgcgcccagcccatatnnnnnnnnnnnnnnnnnnnnnnnnnnnnnnnnnnnnnnnnnnnnnnnnnnnnnnnnnnnnnnnnnnnnnnnnnnnnnnnnnnnnnnnnnnnnnnnnnnnnnnnnnnnnnnnnnnnnnnnnnnnnnnnnnnnnnnnnnnnnnnnnnnnnnnnnnnnnnnnnnnnnnnnnnnnnnnnnnnnnnnnnnnnnnnnnnnnnnnnnnnnnnnnnnnnnnnnnnnnnnnnnnnnnnnnnnnnnnnnnnnnnnnnnnnnnnnnnnnnnnnnnnnnnnnnnnnnnnnnnnnnnnnnnnnnnnnnnnnnnnnnnnnnnnnnnnnnnnnnnnnnnnnnnnnnnnnnnnnnnnncgtggtggttcacacctgtattcccagcattttgggaggctgaggcaggagaatcgcttgaactcaggaggcagaggttgcagtgagccaaagttgcaccattgcactccatcctgggcaatgagagtgaaactccgtctcaaaaaaaagagaagacataacaatcctaaatatgtgtcaacataataaaagaaattcagggccgggcgcggtcgttcacacctgtaatcccagcactttgggaggccgaggcggacagatcacgaggtcaggagttcaagaccagcctgactaacatggtaaaaccccatctctactaaaaatacaaaaattagctgggcgtggtggcacacgcctgtaatcccagctactcaggagggtgaggcaggagaatcgcttgaccccaggaggcggagattgcagtgagccgaggtcgtgccactgcactccagcctgggtgagagagcaaaactccgtctcaaaaaaaaaaaaaagaaaagaaattcaggccggatgcagtggctcacatctgtaatcccgacattttgggaggccaaggcgcttgaggcctagagttcaagaccagcctgggcaacatagtgagaccccatctctataaaaaatttaaacatagtccaggcgcggtggctcacacctgtaatcccagcactgtggggggcctaggtgggcggatcacgaggtcaggagttcgagaccagcctgaccagtatggtgaaaccccatctctactaaaaatacaaaaaatcagctgggcatggtggtgcatgcctgtaatcccaactactcaggagactgaggcaggagaatcacttgaacctgggaggcggaggttgcagtgagccaagatcgtgccactgcactccagcctgggctacagagtgagactccgtctcaaaaaaaaaaaaaaaaaaaaaaaaaatgtaaacattagctggtcatggtatttcttggttgtattcctagctgcttggaaggctgagatgggaggactgcttgagcctgcagtgagctatgattgtggcactgcactccagcctggacaacatggcgaaacaccatctttaaaaataaaatccaatctgacaatgtttgtctttaattgaaatgactatttgcatttaatgcatttattgaaatggttgaatttatgtctggtatcttgctgtttttttttttttattttgtctcctctgtttttgttgcttatctccttgtatttttattattagttttggtcttttggattaatccagttgttttaaattatactactagaaaaattcttctagcaggatcctatttcgtcgatggtcttttgtaatccacccaggcttccaccttctctgtggctagaaacaggaccgtccagaagtcacctgtaactgccctatcttgcaagttctgattttggcaaaaaaaaaaaaaaaagccttgacaaggttggattcacttctttccctggattgtgtgtcatccaagtacgtgagacatctggtagtgcatttcagagagaggagtatctgatatgtgtgtggaggcagccatcttttcctgaaagtccttttaggaatcattatttctggtcctctgaagtttgccgctaccactcataaatatctatccacaccccttacaagaagaataaggaagatcttaagacctagaaggaaaactgattgcagaccaggcttggtggctcagtgcctgtaatcccagcactttgggaggccaaggagggcagattgcttgagctcagcagttcgaggccaacctgggcaacatagtgaatccctgtctctacagaaaaaaaaaaaaaaaaaacccaccccaaaatcaaaactgaaggtagtgtcagtgtatatatggagtcccttgtgctgaaagtcaaagcagcttcattttggggcctcaagagctccagctctgggctcttcacctctaagcccatgggcagtgcccgcccagtggtgtgtatagatcggaggctgcagggcctcacccttagctgcagctgtcgcgtgctggggagcctgtgcaggagggtacaagtaggaaagtgccatctgcatgggaagaaaaatgcagcatccttgtagtgcggatggggtccaggagacccaggagctgcccagaggacctggtggcatgctgtagaaagcagccaggtaggtatactggggccaggagaggttttggagctgagatgagatgtgtagacatcaagtgagtttgaattagccaaagccagaggctgtgggagtgtggctggacgatggaggctcccgtgtcaggggtcctagggcatcaccggctttacagtcagacaaacctgggcatttacatctgtggtcagccttttgtttttctaagtaaaaaattagataagataaattccatctactattactataatttttaaaatgtttcatgtaacattgaaaagatttgtaatctcacagtaaagttttaactttgtgaaagatgtaggctttatgttttcactttctatcagaatagtgaaaactttgttgctaaccagccctggcctgcagaatgacatgtgagacactaggaaggactgtccagacaaagacagcaagagctgggatgtttgggaagcagaggaggggctggatcagtggtgattcctcaggtgcctatggcaagacctagtgcccagttggtgtatgtgtgaggaggtgcctgcttcagagagaaccctgggtgtgattcagcaagatggggacgatgagtggatgggccgggtggctgggggaggcagaggagtgagcgcagggtcaggcagcatcagctgtcttgattttgacttgctgagtttgctcacaaatgtgagactttcagaggggagatgtccagtgttcactcaggacagaagacatccctgacacatgggagagacacctgggcgcattcgcctaacagaactacagagcaagcaagagcattgaggggcatgtcgagcacgctggtgggtgggggacagtgtggggaaggagggcaaaggagggggttagcccagaggagaacctggggaggcaggtcctggagctgggggtgcagcctcagagctgttgagcagctgggaagtctgctaactttgtgagcccaacctggagaggtctgatgggaatggttactggggagggcccccaccatcctgagctctgggaatcttgtgtgttcatgctgcagatggacttccaggacttgggtctagtgttgctgagggtggatctgcagaggtgagagaaatgacccctttggacttgggtctagtgttgctgaaggtggatttgcaagggtgagagacgtgacccctttgccctcgtttgcagctctgcggccgtcacgatgttctggaagtttgacttgaacaccacgtcccatgttgacaagctgctggacaaggagcatgtgacgctgcaggagttaatggatgaagatgacatcttgcaggagtgtaaggctcagaaccagaagctgctggacttcctgtgcaggcagcagtgcatggaggagctggtgagcctcatcacacaggatccgcccctggacatggaggagaaggtccgcttcaagtatgtaccaaagctgtgacgggccagtacgccaggcagtgctgcaggcaggccgcaggcagtgtctgaggatggccatagttggggatttctgatgaagaagcgagccgtaaaaatccaccccatgtgagaagtgaggagggcactcccatggggtctgaggttgaagagtttggagattgggtgcagtggctcacgcctgtaatcccagcactttgggaggctgaggaggttggattaattgagcccagaaatttgagaccagcctgggcaacatagtgcgaccctgtctctattaaatttttttttttaaattagccagatgtggtgttgtagacctctggttccagctactcgggaggccgaggtaggaggatcacttgaacttgggaggttgaggctgcagtgagccatgattgtgccactgcactccagcctgggtgacaagagtgaaaccctgtctttaaaaaaaaaaaaaaaaaaaaaaaggccgggcacagtggctcatgtctgtaatcccagcactttgggaggccgaagcaggcagatcgctaggtcaggagattgagaccatcctggctaatacggtgaaaccccgtctctactaaaaatacaaaaaattagccgggcatggtggcgggcgcccgtagtcccagaggctactgtactcaggaggctgaggcaggaggttggtgtgaacccgggaggtggagcttgcagtgagctgagatcacaccactgcactgcatcctgggtgacagagtgtgactctgtctcaaaaaaaaaaaaaaaaaaaagagttttgactgtcttgtgccggcattttttcattctaagtaaagttaattttaggttggtacacgtcagagtgttttgagtggcaatatgttgggaaaaaaagactgatcccatgctagagatgcaggtgttattgcagcataaggctgtactgtcagcagggttggctccaggccacaaaatggctaggcaggagagatatgcagtatctgacctacagtcctgggacatgcttcattttagggtcttcagctcgaaggaaatagatcattgtcattcgtggtaccgtccgttctcagagtttttcctgaaacgcccattcagccctggccaggatgctaggagatgacacagagggagggggcagtgtggcgagatggctggagcctcagggccttgagtcaggacagaagggtgagcaaggatggggctggggcgagagggagaacagggcggagctggcctccagctcctcatggtgcagatctgcgaggcacacatgacccgcagtgtccccaggtgacgcctcattaggaagtgggagatacatacaggttagcaaacctcggcctgcaggtcatgtccttttccgtgtgtcctgtgagtgaagaatggttttacattattttttattttagttttttgagacaaggtctcactccatcgcccaggctggggtgcagtggcatgatctcggctcactagagtctctgcctcctggtcccaagtgatcctcccgccttagcctccctagtagctggcactacaggtgcgtgccaccatgcccggctaatttatttttgtattttttttgtaagaagacggggtttcaccacgttgcacaggctggtttcagactcctgggctcaagcaatccacccacctcggcctcccaaagtgctgggnnnnnnnnnnnnnnnnnnnnnnnnnnnnnnnnnnnnnnnnnnnnnnnnnnnnnnnnnnnnnnnnnnnnnnnnnnnnnnnnnnnnnnnnnnnnnnnnnnnnnnnnnnnnnnnnnnnnnnnnnnnnnnnnnnnnnnnnnnnnnnnnnnnnnnnnnnnnnnnnnnnnnnnnnnnnnnnnnnnnnnnnnnnnnnnnnnnnnnnnnnnnnnnnnnnnnnnnnnnnnnnnnnnnnnnnnnnnnnnnnnnnnnnnnnnnnnnnnnnnnnnnnnnnnnnnnnnnnnnnnnnnnnnnnnnnnnnnnnnnnnnnnnnnnnnnnnnnnnnnnnnnnnnnnnnnnnnnnnnnnnnnnnnnnnnnnnnnnnnnnnnnnnnnnnnnnnnnnnnnnnnnnnnnnnnnnnnnnnnnnnnnnnnnnnnnnnnnnnnnnnnnnnnnnnnnnnnnnnnnnnnnnnnnnnnnnnnnnnnnnnnnnnnnnnnnnnnnnnnnnnnnnnnnnnnnnnnnnnnnnnnnnnnnnnnnnnnnnnnnnnnnnnnnnnnnnnnnnnnnnnnnnnnnnnnnnnnnnnnnnnnnnnnnnnnnnnnnnnnnnnnnnnnnnnnnnnnnnnnnnnnnnnnnnnnnnnnnnnnnnnnnnnnaaaatcaaaggaagaatattttgtcacacacatgaaaacgatatgaaacacgtttcagtatccaccaataaagtcttgttagacacagccacactcatccacgtctcatagcgttgagcagctccagcaggggccacggcaaataattcctccctggccatttatagaaactctttgctggcctttgtcttagaaggaagataaagcaggatagtgagccagggtgtccctgtggcagggggtggtcagtacttcatttagggtggtcaggcgtcctcttaggtaaggggagcagtgctgggttggggaggagagttctagcctgagcagggccttgctgtaaggaactgagggttagggtggggcagctgcagccagaagctgctgtggcttctggtcacacctgctgtgtcagcatcactgttgacagtccccatccctcccactttcaaatgtggcccagtctggtgacaaattagagttgagagacaggtatggggcaaggagagtggggaggggtcttctggatcaggacaggaatcccagagtagcatcagtgagccgggagagtctcatagagtttgggagaaatcagtagtagataagtacagaaccaagcaaacagagcaagaggactatgaacctggggggagacttccgtaagtaagcaaagatgccctgagtaaacaacccaggtcaggatatccatttaaattaccctgtgacttcggagggagagcaagaggactaggggaagacttccctaagtaagcagagatgccctgagtaaacaatccaggtcaggatatccatctaaattaccctgtgactcggagggagggaaagggagagggaagtcgggtggtgggaaagctttgccttccattgtaggaagttaattcataatgtctaaaattggtgaacaaagaagaaatgtatgtgtgtattatttagaaacatggaggttaacgttggagaaaactgctgaaagagtccagtgattgcctctgaggagcatgacttgggatgctggggggcagggggcctgtcctcaccagccctgtcatctctgagtttttctctgaggagtgtgacttgggatgggggcaggggggcctgtcctcaccagccttgtcatctctgagcttttctctgaggagtgtgacttgggatgggggcaggggggcctgtcctcaccagccttgtcatctctgagcttttctctgaggagcatgacttgggatgctggggggcaggggggcctgtcctcaccagccctgtcatctctgagcttttctctgaggagtgtgacttgggatgggggcaggggggcctgtcctcaccagccctgtcatctctgagtttttctctgaggagtgtgacttgggatgggggcgggggggcctgtcctcaccagccttgtcatctctgagcttttctctgaggagtgtgacttgggatgggggcaggggggcctgtcctcaccagccttgtcatctctgagcttttctctgaggagtgtgacttgggatgggggcgggggggcctgtcctcaccagccttgtcatctctgagcttttctctgaggagtgtgacttgggatgggggcaggggggcctgtcctcaccagccctgtcatctgaggttttaaagcacgtgcacatatcacttgtataaaaaacatgaaagtcaggtgtggtggctcacgctggtaatcccagcactttgggaggctgaggtgggaggatcacttacgcccaggagttgaagaccagcctgggcaatatagcgagactccatctcttttttttttttttttatggtctgagatggagtctcactctgtcgcccaggctggagtacggtggtgcgatctcggttcactacaacgtccgcgtacccaggttnnnnnnnnnnnnnnnnnnnnnnnnnnnnnnnnnnnnnnnnnnnnnnnnnnnnnnnnnnnnnnnnnnnnnnnnnnnnnnnnnnnnnnnnnnnnnnnnnnnnnnnnnnnnnnnnnnnnnnnnnnnnnnnnnnnnnnnnnnnnnnnnnnnnnnnnnnnnnnnnnnnnnnnnnnnnnnnnnnnnnnnnnnnnnnnnnnnnnnnnnnnnnnnnnnnnnnnnnnnnnnnnnnnnnnnnnnnnnnnnnnnnnnnnnnnnnnnnnnnnnnnnnnnnnnnnnnnnnnnnnnnnnnnnnnnnnnnnnnnnnnnnnnnnnnnnnnnnnnnnnnnnnnnnnnnnnnnnnnnnnnnnnnnnnnnnnnnnnnnnnnnnnnnnnnnnnnnnnnnnnnnnnnnnnnnnnnnnnnnnnnnnnnnnnnnnnnnnnnnnnnnnnnnnnnnnnnnnttcaagtgattctcctgcctcaggctcccgagttgctgggattacagacatgcatcaccacacccagctaattttttgtatttttagtagagacagggtttcaccatgttggccaggctggtctcgaattcccgacctcaggtgatccatctgcctcagcctcccaaagtgctgggattacaggcatgagccactgcacccggcccccatctctatttctttatttaaaaaaaaaaacatattaagacttttttttttttttttttggaaacacagtcctttctgtcaaccaggctggagtgcagtggcgcgatcttggctcactgcaacctccgcctcctgggttcaagcagttctcctacctcggtctccttagtagctgggactacaggcgcacaccagcatgcctggctaattttttgtatttttagaagagacggggttaccatgttggccaggctggtcttgaactcttgagctcaggcaatctgcctgcctcggcctcccaaagtgctaggatagtgctaagattacagaagacactttttttgaggctagtcaaagtgcagcagtgtttacacctaattggtcacaagcagttaagatttctttcttccttcttcagtctgtctgcgtcacatgactagccttgtaaataaagtgaaacaaaaaacactttttttgagaaatagaataggggccgggcgtggtggctcacgcctgtaatcctagcactttgggaggctgaggcgggcggatcatgaggtcagaagatggagaccatcctgactaacacggtgaaaccccgtctgtactaaaaatacaaagaattagccaggcgtggtggccggtgcctgtagtcccagctacttgggaagctgagagagtaagtgcactccagcctgcatgacacagcaagactgtcatctctttaaaaaataaaaaaagatggagaagatataaatatatatgtagaccaggagttggcagactgtatctatgaaaagtcagagagtaaatactttaggctttgcaggttgtaaggtctctgttgcaacggctcaactctgaagttgtagcatgaaagcagctacagaaaatagtaaacaaatggatggggctacattccaagaaggcttcatttatacagagcagcacctgtgcttcgcgactctgctatccttgcctagtggcactgccaggttaaacaccgcctcccgcaacctgttagccttggaggtcagggttctcctgcagacctggcagaacacctccatgaccacaggctcaattatgggaggactcttcttgaaagtggagaatttgcctgagctgtctgtgctcaagagaagctgcacttggtttgggtggattgggatcaggtagcagccactgaccctgcttaattaaagccaggggctgctccagggaggtgaggcccacacgctgcctcttcctaaggcctcacatgcagctagccctgcttctgcggagcagcccttggctgaaaagccactgtgactgtaagatggctggtcaccttctggagtcagagcactgcctgcccaggccacagcagagggcgccaccccagggctggaggcagcagcagtcacatggtcagccctagagcctggggatgctcctggtcttttcgtgagctcttgtctagtttgcttgccaagatctggattatttgagaaataagacagaagagtcagtaagagacaccaagctgtcgctttcattactcataaagcagtgtcatttataactctgagctgtgggcttcctcattcctgattgcagaattagaactgctcacccagtgggaagcagcagtgggtcacagcgggcccccaggaagcaccccctgccgcagagagacttgctgcactcagggcagaactgaaagaaagacagcgtctccaccaagggaaacactgggaggaagggaactttgccataacagttcctgggccactgaccatccactccacatccattgtccatctcctgtcatggcttcttcctcttcttcggttgacttcctgtggtaaattacactctgttaaaacagcttcctgagatggagttcgtgggtggtgatgtttagggcatcgggcctgcgtgtttgagaccctctgattagaagttcagactgggcattaccccctgggctttgggagcctccgtgttgtcctctagtctcacaagtctgatgtagcaagctcctggctcacgtgtgtcacctgttttctctcctctctgagggcatttaggttcttttctaagccctattgtttctcaatttcccagtaatgtggaattattccatgggtcaggacaggggatccccaaagagcatcattgagccaagagagtttcatagtcagagcttgggcgaatttagtaataggtaagtacaaaatcaagcaaacagaaaaatattgactctaagggaaaagttgtataagtaagcaaagatatcccgagtagacaaatgaggtcaacagtggatatccatttctttcatttgttgttctgggctccctgaacccttttagtctgtacatttgtgacattagctgagggaaatttctcatattgtttctttgatattttccctcttttctctttctgggacttctaatgaggtgttagattactcaaattaatgctttccttatttttgcttttaatgttttgtactttgcctttttggcctacatctgagagacttcttcatcttttaagttctcatccttttattgacttttcaaagttctaccattattttttgtttgttttttagatgtgaggtcttgctatgttgcccagtctggactcaaactcctgggctcaagtgatcctcccatctcagcctcccaagcagttggaaccacaggtgccaccatgcttaacatctgtcatattttaaaattttattttttttttgagatggagtctggctctgtcgcccaggctggagtgaagtggcacgatctcggctcactgcaaccttcacctccgggttcacgccattctcctgcctcagcctcccgtgtagctggaactacagacgcccaccaccacgcccggctaattttttatattttttagtagagacgggatttcaccgtgttagccaggatggtctcgatctcctgacctcgtgatccgcccgcctcggcctcccaaagtgctggattacaggcgtgagccaccgcgccaggccaattttttttttttttttctgagacagagtctgtctcgctctgtcgcccaggctggagtacagtgatgcgatcttggctcactgcaagctctgcctcctgggttcacaccattctcccgcctcagcctccctttttcttttttctttttttttttgagacggagtctcactctgtcgcccaggctggaatgcagtggcacaatctcggctcactgtaagcttcgcctcctgggttcacgccattctcctgcctcagcctcttgagtacaggcgcctgccaccacgcccggctaatttttttgtattttttagtagagacagggtttcaccgtgttagccaggatggtcttgatctcctgacctagtgatccgcccgccttgttctcccagagtgctggggttacaggcgtgagccaccacgcctggcccatatttttaatttctaagagcagtttcttattctcatatattttaataaaagcttcaagttctcattcatggatacacagtcttaatgtgtcatctctgagaacattgtagtttaaaagagtttccttctgttctctacacttgctctcctccgtgtgccttgttttctgcttggtcagcaccacgcttctttcataagtggggccctagatcctgcacagagtttgggatctgcatggggcttactcaccacagcttagaggccactagttgacttttctctttgtcccattatttttcccagaaaagaatccttctagctctcccctgtggggaatggacctgtcagtatcaggagctgagttgggaagagggctgggggcaccccagtttcttttttttttttttttttaccaagttccctatttctggatggtgtctggtcaccctgtggctgtgcctggtgtccctggccccaggagccataaggaagggacatgtcccactgccctggcctgtaagttctcagcccaccctgcccttactggccgccaaatcagtgtccaggcctctctggagttctgtggcctgaattctcatctctagttgatgccccttctgtgggctcctgaaactcagccttccctgtgccaagtcagtcttcacgtggctggctgcttcagtcctccaggctggttcgtcgtttctgcctctccattcttgtctttttaattctttgtgttatttgagatggagtttgagagggaatatgaacaagcctgtgtgctccatctgctgtgtttgactggaatttctataccttgtatacatttttaaaactactagagcagcacctgtcatttgaagaataactgtaaaatgttgataaaggaaaaaagaaaatcttagtccctccatctagagaatcagtgtcttctagcttggtttgtgccatgtgtgcacacgtttgtccgtgtgtagacaagatgagtttggagctgggtgtggtggctcacgcctgtaatcccagcactttgggaggccaaggcaggcagatcacttgaagtcaggagttcgagaccagcctggccatcatggtaaaaccccgtctctaccaaaaatacaaaagttagccgagcatggtggtgcatgcctgtaatcccagctacacaggaggctgagacaggacgtgaacccgggaggcggaggttgcagtgagctgagatagcaccactgcactccagcctgggcaacagagcaagactctgtctcaagaaaaaaaaaaatcagtttgttccctgtggtattgagacacttcttcaaggaatgatttggatgtttctctgcttccttacgtttgatcttcctcctcaccccatgggatgtgacttcctccccctgcccagctcaccggtcttagtgttagagatctggtagacctggggcctcactgtggcctttgaggctgccaacctggccctcctctcctgctctctggtcctcctgccctgagggaccatgtgttgtccacttgctggccagcccctctgacatcccacagggtgggtactgcctgccccaattaacagacaaggacactaaaggccagaaagttcggctagtgaggtcggctagtgaggggatgagcttgggcctgccccagccccctgcgccagctctcaggccccctctctgcccacacatccagcttgcagtgcccctgtgccctgaccctactccatcgggccccagccaggtcctctctcccaaacccaagcctgctgggccactctttgaccctctacactccacctgcccttcacaggcgctgttcctcagagctctaaaagtggcactttcttgtctgggctgatgaggcacacccaccccccagccagccgagatcattgcgtttcttccccttccacacttggtcggctgccaggcctggccagctgtttcctatagagtctctcaaaccctggcccctccagccggtcgcgtggaccaccttggcttaggtccagtgctagggctgcctctctacctggcggtggccacatgttggcaagagaaggaaggtcatagcagctgaccttgagcacacatttgctgtgtgacaggcatgggcaggcactgtcacctgcacattctatttttttttttttttttttctggaaacaagagtctcgctctgtcacccagactggagtgcagtggcttgatctcatctcactgcaacctctgcctcccaggttcaagtgattctcctgcctcagcctccccagtagctggcattacaggcgcccaccaccacacctggctaatttttgtatttttagtagagatggggtttcaccatgttggccagaatggtgtcaatctcctgacctcaggtgatccacctgcctcggcctctcaaagtgctgggattacaggtgtgagccactgcacccggcatatattctttttttaagtcagagtcttactctgccacccaggctggagtgcagtggtgtgatcttggctcacggcaacctctgcctcccgggctcaagccatcctgcgcctcccgggctcaagccatcctgccacctcagcctcccatgtagctgagaccacaggcatgtgccacctcgcctggctaatttttctttctttcttgttttttttttttttttttggagagacggagtttcaccatgttgcccaggctagtctcccactcctgagctcaagagtgatccacctgcccaccctcccaaagtgctggggttataggtgtaagccaccgtgcccgtccttacctgcacgttcagatgagaaaacccagacacagagaggacaggtcacttgctggtgtcaggacaggcctgttctgagacagccattcctacaggacgctcccactgggtgggccctgggctcctccccagcattcccagaggcagggtcatgcaccaggccttgctatgggggctgctgttgagggctgcgtcctgggctgtggggtgtacctctcctggggcgatggctgtcacccacctctgtctaccagttacaaaagagggagcaaagtaccttattcacaggtgttggtatttcttagtcataacgttcttgcgtagtgcctcatccctcacatggttcctgagcggctgatgggtgtttctcccgtctagggatggagtggtctgtgtttgttgatggaaggggcatggcttagaaggaaaggagaggctcagtggaggggaagatggaaatggccacagatgtggcctcgcggaaacagtgtggttagactggaggtgagaggcctggagggaggcaagaggcctggcaggcgagtgcgaaggcctggagggaggtgagaggcctggagagaggtgagaggcctggcaggcgagtgtgaaggcctggagagaggtgagaggcctggagagaggcgagaggcctggcagacgagtgtgaaggcctggagagaggcgagaggcctggcagacgagtgtgaaggcctggagagaggtgagaggcctggcaggcaagtgtgaaggcctggagagaggtgagaggcctggagagaggcgagaggcctggcagtacgagtgtgaaggcctggagagaggtgagaggcctggagagaggtaagaggcctggagagaggtgagaggcctggcaggcgagtgtgaaggcctggagagaggtgagaggcctggagagaagtgagaggcctggcaggcgagtgtgaaggcctggagagaggtgagaggcctggagagaagtgagaggcctggcaggcgagtgtgaaggcctggagagaggtgagaggcctggagagaggtaagaggcctggcaggtgagtgtgaaggcctggagagaggtgagaggcctggagagaggtgagaggcctggagagaggcgagaggcctggcaggtgagtgtgaaggcctggagggaggtgagaggcctggagagaggtgagaggcctggagagaggtgagaggcctggcaggcgagtgtgaaggcctggagagaggtgagaggcctggagagaggtgagaggcctggagagaggcgagaggcctggagagaagtgagagacctgcagagaggtgagaggcctggagagaggtgagagacctggcaggcgagtgtgaaggcctggagagaggtgagaggcctggcaggcgagtgtgaaggcctggagggaggtgagagacctggcaggcgagtgtgaaggcctggagagaggcgagaggcctggagagaggcgagaggcctggagagaggtgagaggcctggagagaggtgagagacctggagagaggcgagaggcctggagagaggtgagagacctggcaggcgagtgtgaaggcctagagggaggtgagaggcctggagagaggtgagaggcctggagagaggtgagaggcctggcaggcgagtgtgaaggcctagagggaggtgagagacctggcaggcgagtgtgaaggcctggagagaggaaaagccggaagactgagaaaggttatttaaagaatgggagtagggtcagaaaatgtcagatatcagcgtatagggcatgaggagcatagaaggtatgttaaaaaactgaacttctagtagtcagaaataccagctggtcacaggtagtcacgtttttgttctgttctgaggtctgtagtgtttgtttgatcacgtgggtctgcttcctaagaagcagactatgtaagcagcttcctaagagttggagaagtctaatttcacctccagtgcttggactgtgcccttttagatatccaaacacagcctgtgagcttctgacttgtgatgtgccgcagatcagcgaccgcctcggtggggacgagagcctgctgagcctcctgtacgacttcttggaccatgagccgcctctcaatcctctgctcgccagttttttcagcaagaccattggcaatctcattgcaagaaaaaccgaacaggtaaatcacgtgcaaagcctccgtgacttggggcaccgtcatggtggatgctgacgtgtcctgctgtgagcctggcggtgcgactcatcctccggccgcgggaacagcatctgtgactcttctgcgcaacacgtggagcagtgtgtgggttttgccagtctgggagctggaatttgaaagagtgtttctggctgggtgcggtggctcaagcctgtaatcccagcactttgggaggccgagctgggcagatcacttgaggtcaggagttcaagaccagcctggccaacatgacaaaaccctgtctctactaaaagtacaaaaattagctgagcgtggtggtgcgcacctgtcatcccagctacttgggaggctgaggcaggagaatcgcttgaacctgggaggcagaggttgcagtgagctgagatcgtaccactgcactccagcctgggcaacagagtgagactgtctcaaaaaaaagaaggagtgtttcttatagctggctctggaataagcagcacttcccaccatccctgggagctgcacagtgccccaaagtaggccatcttgtgctgtcactgaccaggtggaggtgtgaggtcctggggcatcatggcaggaccttggacatccactttctcaggtctgcagcttcatctgtctgggtggcgtgtctgtctgtccagagcatttattctttcaaaacaaaggtcacttctagcattagacttctgcaaaagcagttagtgaattcatctcagccagctgtaacggggtcttcctggagtccatccttgctcctgccttacatgtgacctgacctgggcttctgcccctccaggctgtggacacacaggtagagaggcgtggtggtccctgtgcctgcaccctgcagtccgccttggccagtcttctttcctgtgtcatgccccacccgcccatccctgatgggagtattttaaaacaaatcccagacaccagattatttctcatgtaaatatttcagtatgtatgtacatttatttatttttgagacagggtctcactacgcccaggctagagtccactggctccaacacagcccactgcagtctcaacctcctcaagctcaggtgatcctcccacctcggcctcctgagtagctgggactacaggcacataacaccacacctggctagtttttaaaatattttttgtagagatggggtttccccatgttacccaggctggtttcgaactcttgggctcaagtgatctgcctgcccaggcctcccaaagtcctgggactacaggtgtgagccacgatgcccagctatgtatctctaaaataaagacttttttcttttaaatataatcagaatttcatgatcacactccaaaaatattaaccgtaattgtttcataccatcaaacattcagtcagggcacaaaccagtatcttacatctgctttgagctctgagaaagcgcagctccacgaaggccgcggttccccttgacgacattcagcatgcatgtgagtgttcagtggaatgccgtcttcccttgcgctgtaaatctgagagttgcaagggccgccaggggactgcctcacctcagctccttctgaagctgagtgtgagtgaaggtcgccagcagcagtgggtcgtgctgggtgtgaggctgctggcagaatgggagtgggagtggaggcagcggggagctgtggtgtgggccgggggattgtcgtggctgtgaggtggtagtagatgttgtaaaaacctttactacctggcccttgcagcccagtgactagatgcatgtatctcataatttgccataacctgatcttattcccctgccactttcggatattttctttataattttactgcttcatataatatttttcttccattctctcacccagtacttaaggcattaaagtaatatgaactgaactgttaaacatttcttctgttggctgggtgcggtggctcacgcctgtaatcccagcactttgggaggccgaggcgagtggatcacctgaggtcaggagttcgagaccagcctgaccaacgtggagaaaccccgtctctactaaaaatacaaaattagccgggcgtggtagcacatgcctgtaatcccagctactcaggaggctgaggcaggagaatcacttgaacccaggaggcagaggttgcagtgagctgagattgcgccattgcactccagcctgggcaacaagagcgaaactttccatcacccagcagctggcttgttctcacggccagctgtgaggcagggatgccttgagccttcctcctgtgtttcctgaaactgtgggagtagcctaaaggtggggcttcagtgaaatgaccgtccgcattttccccgcccttcattatgaattctttcaaacgtctacaaatgagagaaaatatttcatgaacccccatgtctctgtcactcagattccacatcatctgttcatggctaatcacatttcttctatatctctttatttgtttttcttcaagattatttttatgattctttgccttttgatcatgatgatgatgatgatgatttttttgaggcagagtcttgctctgtcgccaggctgaagtgcagtggcgcaatctcagctcaccacaacctccgcctcccgggttccagcgattcttctgcttcagcctccccagtagccgggtctgcaggcgtgcacccccacgcccaactaatttttgtatttttagtagagacagggtttcaccatgttggccaggatggtctcaatctcttgacctcgtgatccgcccaccttggcctcccaaagtgttgggattacaggcgtaagccaccgcgcccggccgacgatgatgatgatttttgagatggagttttgctttgttgccaaggctggagtgcagtggcgtgaccttggctcattgcaacctctgcctccagggttcaagcaattctcctgcctcagtctcccaagtagctgggattacaggcgcctgccaccacactggggtaatttttatattttttagtggagacagagtttcaccatgttggccaggcttgtcccaaactcctgacctcaggtgatctgcctgcttcagcttcccaaagtgctgggattacaggtgtgagccactgcacacggcctattttgttttttgtttttattttttttcttttctattttttaatttttgctttctcttttttattgttttagaataagcaaattttagaatgagtttgtcactttctacattctccctctccataccctgccccccaaaaataaacctactgaaattttgatgaggtttgcattggctgtagttgggtctgacaaactgtggtccacaggccaaaagcagccatcactgattgtgtgagtgaggtcttagtgtagcacagccacttccattcctgtgcacgctgcccggggctcctttcacaccacagcagcacagctggtagctcaggctactttgatttctcagaaatacactgcagttctctgtatggcagtcttaagcatctttcactagatttattcttaggtatttgatatctttgtatcattttgagtggtgtctttttttttttttttttttttttttgagacggagtcttgctctgtcgtccaggctggagtgcagtggcgcaatcttggctcactgcaacctccacctcctgggttcaagcgattctcatggattctcgtgcctcagcctcccgtctgggggatagagtgagattctgtctccaaaaaaaagaaaaaagaacctcttatttttttcaagcccataatgatcaatgtatcatattcacatacatcagtattctagttgtgatattatactggtgttttagaaaatgtcacaattggaggaaacatgtcaaagcatacaaggattttgtttttgttttcgtttgagacaaagtctcccttttgtctcccaggctggagtgcaggggcacaatctcggctcactgcaacctccgccccctggttcaagtgatctcctgcctcannnnnnnnnnnnnnnnnnnnttggccaggagcagtggctcactccacccaacactttgggaggccgaggtgagtggatcacttgagcccatgagtttgagagcagcctggccaacatgccgaaaccccgtctctactaaaaatataaaaattagctgggtgtggtggcacacgcctgtaatcccagctccttggtggggctgagacaggagaatcacttgaacctgaaggcggaggttgcagtgagccaagattgggccactgcactccagcctaggtaacagagcgagactctgtctccaaaaaaaaagaaaaaaggccaggcgtgctggctcacacctgtaatcccagcattttgggaggccaaggcaagcggattatctgaggtcaggagtttgagaccagcctggcccaacatggtgaaaccctgtctctactaaaaatacaaaaattagctgggcgtggtggccggcacctgtaatcacagctactcatgaggctgaggcaggataatcacttgaacccgagggtggaggttgcagtgagccgagattgtgactctgcactccagcctgggcgacaaaggggagactgtctcaaacaaaaacaaggcctggcgcagtggctcacgcctgtaatcccagcactttgggaggccgaggcgggcggatcacaaggtcaggagatcgagaccgtcctggctaacacggtgaaactctgtctctactaaaaatacaaaaaattggctggacgtagtgatgggtgcctgtagtcccagctactcgggagcctgaggcaggagaatggcatgaacccaggaggcggagcttgcagtgagccgagattgcgccactgcactccagcctgggccagagtgagactgcatctcaaaaaaacaaacaaaatccttgtatgctttgacatgtttcctccaatggtgacattttctaaaacactagtagaatatcacaactagaatattgatgtgaatgtgtgaatatgatccatcgatcattatgggctcaaaaaaaatagaggttattttttctttttttggagatagactctcactctatcccccaggctggagtgcagtggtgtgatctcggctcactgcaacctctgcctcctgggttcaagcaattctcatgcctcaacattccgagtagctgggattacagccacccaccaccacgtcttgctaatttttatatttttagtagagaccatgttggccaggctggccttgaactcctgagatcaagtgatccgcctgccttgacctccctcaagtgccaggattacaggcatgagccaccatgcccagcctggggttattttttcttaaatgtttggaagaatttattaggccattaaaccttctctgtatagagagcctattaattatagattttgtggagttttagtatgttctggaactattctgattttgtttcttgtcagtttaaataagtccttttttttttttttttttttttttttttgagacggagtcttgctctgtcacccaggctggagtgcagtggcgtgatactcggctcactgcaagctnnnnnnnnnnnnnnnnnnnnnnnnnnnnnnnnnnnnnnnnnnnnnnnnnnnnnnnnnnnnnnnnnnnnnnnnnnnnnnnnnnnnnnnnnnnnnnnnnnnnnnnnnnnnnnnnnnnnnnnnnnnnnnnnnnnnnnnnnnnnnnnnnnnnnnnnnnnnnnnnnnnnnnnnnnnnnnnnnnnnnnnnnnnnnnnnnnnnnnnnnnnnnnnnnnnnnnnnnnnnnnnnnnnnnnnnnnnnnnnnnnnnnnnnnnnnnnnnnnnnnnnnnnnnnnnnnnnnnnnnnnnnnnnnnnnnnnnnnnnnnnnnnnnnnnnnnnnnnnnnnnnnnnnnnnnnnnnnnnnnnnnnnnnnnnnnnnnnnnnnnnnnnnnnnnnnnnnnnnnnnnnnnnnnnnnnnnnnnnnnnnnnnnnnnnnnnnnnnnnnnnnnnnnnnnnnnnnnnnnnnnnnnnnnnnnnnnnnnnnnnnnnnnnnnnnnnnnnnnnnnnnnnnnnnnnnnnnnnnnnnnnnnnnnnnnnnnnnnnnnnnnnnnnnnnnnnnnnnnnnnnnnnnnnnnnnnnnnnnnnnnnnnnnnnnnnnnnnnnnnnnnnnnnnnnnnnnnnnnnttctcctgcctcagcctcccgagtagctgggattacacgtgcccaccaccatgcccggctaattttttttgtatttttagtagagacggggtttcaccatgttagccaggatggtcttgatctcctgacctcaggtgatccacctgcctcgtcctcccaaagtgttgggattacaggtgtgagccactgcgcctggcctagataagtccttttttttttgtttttttttttgagacagagttttgctcttgttgcccaggctggagtgcaatggtgcgatcttggcttaccgcaatctccgcctcccaggttcaagcaattctgcctcagcctcccgagtagctgggattacaggcatgcaccaccacgcttggctaattttgtatttttagtagagacggggtttcctccatgttgaggctggtctcgacctcagtctggtctgacctcaggtgatccacccacctcggcctcccaaagtgctgggattacaggcgtgagccaccgcacctggccagataagtattttttttcaaggaaatttcttttctaaatttacaaaaactggcataaaattgtttctattaatttctcataatatagcaggtgtggtggctcctgcttattattacagcattttgggaggctgaggtgggagaatcacttgagctcagaaggtggaggctgcagtgagttatgatcgcaccactgcactccagcctgggggacagagtaagaccttgtctcaaaaacataaaaacaaaactacaaacctctcataatagtttttatttctgtaggatctttggcgatgccccttgtttcattcttaatattgttatttgtaccttctgttttgtccttcgtctttctagaagtttaatcatccttttcaaagagccatcctcctctcctcctcccctaccccctcctcttccttcttccccttctcttttcccaccactccttttcctactgtccctcctcattgcagcactggggagtgaggctgaggccctgcagccaggtgggccttctctgtgttcccattgtttccagtggagggctgggtctaccccagcccccagcccagtagcctggacatagcagacacttatttctgtaggctgagttgagctgaatttgcagcgagcccagccttcacttctccactgttaccttggatccgccgtctgagcagcccactgcgtctgtgatgggtgctgtgcccccccatggcctcacgcttagctgtctacaccttgttggcactggtcatcagccagctgcaggatgcctctttttcttttctaaaacctcagtcttctttccccttcaaccgctcatgggttttggtcagcagctggcgtcttgtgcactctgtgctccctggatgtgtgttctaggcctggggctgccagtgatggccatcagctcagctcagctctgtctataccattcgtttctgttggaaaaacccgaaccagtaggtattggatggcagctgctcacggcagcctgtgctgccccacctgggacagctgtgtcctgtcggtgcagagccacaggggtccctgtgcagtggccccccnnnnnnnnnnnnnnnnnnnnnnnnnnnnnnnnnnnnnnnnnnnnnnnnnnnnnnnnnnnnnnnnnnnnnnnnnnnnnnnnnnnnnnnnnnnnnnnnnnnnnnnnnnnnnnnnnnnnnnnnnnnnnnnnnnnnnnnnnnnnnnnnnnnnnnnnnnnnnnnnnnnnnnnnnnnnnnnnnnnnnnnnnnnnnnnnnnnnnnnnnnnnnnnnnnnnnnnnnnnnnnnnnnnnnnnnnnnnnnnnnnnnnnnnnnnnnnnnnnnnnnnnnnnnnnnnnnnnnnnnnnnnnnnnnnnnnnnnnnnnnnnnnnnnnnnnnnnnnnnnnnnnnnnnnnnnnnnnnnnnnnnnnnnnnnnnnnnnnnnnnnnnnnnnnnnnnnnnnnnnnnnnnnnnnnnnnnnnnnnnnnnnnnnnnnnnnnnnnnnnnnnnnnnnnnnnnnnnnnnnnnnnnnnnnnnnnnnnnnnnnnnnnnnnnnnnnnnnnnnnnnnnnnnnnnnnnnnnnnnnnnnnnnnnnnnnnnnnnnnnnnnnnnnnnnnnnnnnnnnnnnnnnnnnnnnnnnnnnnnnnnnnnnnnnnnnnnnnnnnnnnnnnnnnnnnnnnnnnnnnnnnnnnnnnnnnnnnnnnnnnnnnnnnnnnnnnnnnnnnnnnnnnnnnnnnnnnnnnnnnnnnnnnnnnnnnnnnnnnnnnnnnnnnnnnnnnnnnnnnnnnnnnnnnnnnnnnnnnnnnnnnnnnnnnnnnnnnnnnnnnnnnnnnnnnnnnnnnnnnnnnnnnnnnnnnnnnnnnnnnnnnnnnnnnnnnnnnnnnnnnnnnnnnnnnnnnnnnnnnnnnnnnnnnnnnnnnnnnnnnnnnnnnnnnnnnnnnnnnnnnnnnnnnnnnnnnnnnnnnnnnnnnnnnnnnnnnnnnnnnnnnnnnnnnnnnnnnnnnnnnnnnnnnnnnnnnnnnnnnnnnnnnnnnnnnnnnnnnnnnnnnnnnnnnnnnnnnnnnnnnnnnnnnnnnnnnnnnnnnnnnnnnnnnnnnnnnnnnnnnnnnnnnnnnnnnnnnnnnnnnnnnnnnnnnnnnnnnnnnnnnnnnnnnnnnnnnnnnnnnnnnnnnnnnnnnnnnnnnnnnnnnnnnnnnnnnnnnnnnnnnnnnnnnnnnnnnnnnnnnnnnnnnnnnnnnnnnnnnnnnnnnnnnnnnnnnnnnnnnnnnnnnnnnnnnnnnnnnnnnnnnnnnnnnnnnnnnnnnnnnnnnnnnnnnnnnnnnnnnnnnnnnnnnnnnnnnnnnnnnnnnnnnnnnnnnnnnnnnnnnnnnnnnnnnnnnnnnnnnnnnnnnnnnnnnnnnnnnnnnnnnnnnnnnnnnnnnnnnnnnnnnnnnnnnnnnnnnnnnnnnnnnnnnnnnnnnnnnnnnnnnnnnnnnnnnnnnnnnnnnnnnnnnnnnnnnnnnnnnnnnnnnnnnnnnnnnnnnnnnnnnnnnnnnnnnnnnnnnnnnnnnnnnnnnnnnnnnnnnnnnnnnnnnnnnnnnnnnnnnnnnnnnnnnnnnnnnnnnnnnnnnnnnnnnnnnnnnnnnnnnnnnnnnnnnnnnnnnnnnnnnnnnnnnnnnnnnnnnnnnnnnnnnnnnnnnnnnnnnnnnnnnnnnnnnnnnnnnnnnnnnnnnnnnnnnnnnnnnnnnnnnnnnnnnnnnnnnnnnnnnnnnnnnnnnnnnnnnnnnnnnnnnnnnnnnnnnnnnnnnnnnnnnnnnnnnnnnnnnnnnnnnnnnnnnnnnnnnnnnnnnnnnnnnnnnnnnnnnnnnnnnnnnnnnnnnnnnnnnnnnnnnnnnnnnnnnnnnnnnnnnnnnnnnnnnnnnnnnnnnnnnnnnnnnnnnnnnnnnnnnnnnnnnnnnnnnnnnnnnnnnnnnnnnnnatcctcctacctcagcctcctaagtgctgtggttacaggagtgagccaccatgcctggcctacacttttttttcttaactgaaaaataatctatgtgtattataaaaataggacaggcgcggtggctcatgcctgtaatcccagcacttggggaggctgaggcgggccgatcacttgaggtcaggagttttgagaccagcctggccaacgtggcgaaaccctgtctctactaaaaattagcgaagtgtggtgtcaggtgcctgtaatcccagccactcaggaagctgaggcacaagaatcacttgaacccaggaaggggagcttgcagtgagccgagatcacaccactgtgctccagcctgggcgacagtgagattctgtctcaacaaacaagcaaaccaaagaacaattctaatagaattgtatcagtcgtctgtgaccgaatagcaaattaccctgaaatgtagttgcttatggcaagtatttttacctgtagcagtatcagtttctgtggatcaggcgtctgaatgtggcttagtggctcttctgttgagtctcacaaaatacagtcatctcagagctccactggggtagaggccagctccatggtcacagatggcttggcagcatccagttcctcagggctgtgggccgaggccgccctcagcattgcaccacatgggcgtctccacagggcagcacacaacgtggagctgagctttcccctcactcttaatgtatttggctctttagacctgggtggctgggtccagcccacactaaaagagatgggggctataaaggcatgaactccaggacgggattgctaggggccccctaggagccacccaccctggaagcacctaaggtgacaatggggctccctgtggtgatccctgttgagagtttggggtatatcccagtaggccttttcctagcattacacataccgatctatacatacaaccacgtgtccttggcagattggaaaacagtggtgctgactcgtgtctgaggccttcaccgctgcctggccaaccaccctactttgttctccatcagcccacagggctgatcagacagacaggagaggccacgttggcgtctgtaggaaacaaggaggccgccctgcctgatgttggcgtctgtaggaagcaaggaggccgccctgcctgagaactggagcccacccatgcatgtgggtgttgtgggctgatggcctggcctgggtcccaaaggcagacctgagagctaatctggctgctttcttttctccctaaaatactcctgtgagtgtttgctttccctcagtcttcccacagcatgtgaaccaatgctgcagggagtcaggggttgtttctctcttaatcacatttgtcttacctacagaacagccctacattgtcagcaggggcacgttcccatcacggattgcgtgttaatgtttccctagaaaagatgagtcctctgttttcttggtagcaacttccctattttcattagcttacaggactcattctgaataatagcagctacttattaccacatttaaaatatagtatcagtaacatggccacatattcagcatatttcaaaacgtggatcacaggtatagcccagtatctgcattgcatatctgaccattattagccctgttttgaattcctgaagatagttcaatgcagctttaaaaaaaagaaaactctaaccagatctacattttgacgacagaaaaggcagacacaggcttctttgaaatgaagctgttgtctggaatctttctttgtaggaaactggtttagagaaagtcccacatctttttctttttttttttgagatggagtctcgctctgtcacccaggctggagtgcagtggtgcgatcttggctcactgcaagctccttctcccaggttcaagccattctcctgccctcagccaaccgagtagctgggactacaggcacccgccaccacgcccggctaattttttgtatttttagtagagatggggtttcaccgtgttagccaggatggtcttgatctcctgacctgatgatctgcctgccttggcctcccaaagtgctaggattacaggcctgagccattgtgcctggccaaaagtcccacatcttaaaaaaaaagaaaaagtatttgaacatcacagtggtattgaacaacaacgaaagtctagcatctgccagagaagcagcaggacttgtgccctgtgtgcccagcagggctggtcctgctgtttcttctccacactgagggactctgtgtttcccttgtcttttcagaggcagtcaaatgcttctcagactctctgtgacatagttaggctgggcagagaccagggcagtcagctgcaagaggctctggagccagacccgctcctcacagcgctggagtcgtgagtgctggtgggccgtggtgctggtgggcctccctttctgggtcatggggacgtctgtgagccttgctctgagcaccaggatatgttgccacctcctctgattcacattcgaatgaaccccaggttcagagcccatgttaacttggggcctgtttccagagggaggggtctccagaggagtcacctggtgggtctagagagtgggccagcagcagcaggagtgtcctgagaaccctggcgccttgccttgagcctgagcaggttgagggttttgctggggtcctccacggggaggaaggagcatccttgcatcctttgtgtgtgtgtctgctctgccaggcagtgacctctgtgtgtgtccagcaggcaggactgtgtggagcagcttctgaagaacatgtttgatggagaccggacggagagctgcctcgtcagtgggactcaggtgttactcaccttgctggaaaccaggcgggttgggtgagtctcacgaggagaaatcgtgtagagctgaacttgacgcctcagtgatatggcagcccacacgagcagtctggattatgtcatttgtggttttaatttttgattatgcaagtaacaacatggatagattccccttgttgaaggcttgactttatggctgtggccaagtccccttagaccctcatcatcactggtgctccctctccagcctgaagctgctcgtcacgaccagttggcgatgcatttgtcgatgtgcgtggaacaggtgtggttggcaggttttccccaaggactgttccgacaagtccccacagctcccgtgtgtgtttgtgtgtgtgtcgcagggtttccactctgatgcatggttacatatacatgtgtttatctcccatgcagactggccctcacagggcaggggtgtgacactcaccgctgtctcccgtgccctgtgcacccacgggtcggcaccgcctgctgagcgtcgtgctgagcacttttttcccaggcgactctcctccattgccctttctcattcatcaggtgtcatttctgcacccactgtgcactaacacgggcccgaggagacagagaactgagacacagcccctcccctttaattgctcccagtctggcacaggaggcccgtctgtggacagcgagggtgatgcagagtggcgagtgcagtagacatgcacccagtgcctcggggctcacaagaagggacccacatggggctggtgggtggagcctcgcagtcagggacattttccctgagaggccgcatctggtcagacacagctccttggatgaggcagtgagggggtcccagtgtggacacaagcatggggcagtatgtggcagaggagagtggagcttgcttggaggtgctcctttgctgtgaccccacatcgctgtcctgaggtgcagctgtcggaggctgctgagtcacgacagtgaatgggcagagacagaggagtcagcagcagaagagtgagttcgggtgaaagttgagtttgtttgaggatataggtgctggagacccttctctgacccccagtagaaatttcaggaagtgtttgaaactgtttctctggatcatagtgtggcctagtccttccctcaagtcatagaaggctgggcactgccagagccgttcaagcagttgaaactccaaagaggatgcccatgaggcgcaaatggaaagacagccgagtggagtctgtgagggaggcattggcacaagggggtgtggttggcccgccaggtgcccaggagatcctatagggtgtgtcccaaaagggccacatcagtgtcctctgggcacttcccctcctggcctcaccctggcccttgaaccccatctctggattcaggttccccacatgccggcaggaacctgatgtctcaggacgtttccgtcgtctccgttccatcacaggctgggacgatgtctaactctcccaaggtggccgtagctcccttatttccacgttctggggagaacataattcagcccccaacactgatagcctgtgcttttttaaagtgaaagaaaaaggaacaatgagaaaatgataagaaattgacttaaccttgatagtgaggttgttaggactctctttctctctctctctctctctctgtctgtctctggtagtacctaatacatatttgttagtttattaaccagaagtagtgttataatgttaccgttttctctagttaggcaactggaatattgatattttaatcttcataaacccaggaaagctgagccacttctgaggcccaagcttaaccctgtatgtgatagaggggactgtgtaaaaatcaggaaaacagagataagccagctgtttctcttagattattgtgattattattattattattttcagacagtgtcttgctctgtcacccacgtgggagtacagcagcacgatcatatctcagcgtggcctcagagtcctgagctcaagcgatcctcccacctgtcccccccaaagtgctgggattataggtgtgagccactgcacctggctctctgatttttaaaattattttgcatattactttaaaaaatatatgattacgtattacttttacaactggaaagagtgtttaaataaatatctcagaagacttgcttgaaaacaccacagggggtaggcgcagtggctcacgcttgtaatcccagcactttgggaggccaaggcgggtggatcacctgaggtcaggtgatcgagaccagcctggccaacatggcaaaatcctgtctctactaaaaatacaaaaaggaggctgaggcaggagaatcgcttgaacccaggaggtggaggttgcagtgagctaagatcgcaccatcgcactccagcctgggtgacagagcgagactctggctcaaaaaaaataaaaataaataaaaataaaagtcgacacaggaacagtgaaagagacagggatagcagtgaaggttttaaaagtgggacagagcaggacctctaactggtgctagggccagtgagtcctgtgttgtgtcacttgccctgcctccatattctcggatgtcgcaagcaagcatctgcctgaaggtctttagtacctttctcttctgcctgtaccagtcaccagatcacgtgtggagacgctgggtagctgcactgctctagggtttctttttgggaaagttaaaagggctctttctggaagaagcgggtgcactgagttgctggtgaggttggacagggtcctggtgtccccggtctccatctgctttcctcatccacaggacagagggcttggtggactccttttctcagggactggaaaggtcatacgctgtcagcagcagcgtactacacggcatcgagcctcggctgaaggacttccaccagctcctgctcaacccgcccaaggtaaatggccgtggcgactgctgagtgcctttggaggcgtcgcaggagaggttgatttgcagggaggagaagccacagcttgtcccataggtagcagagtgtggagtgaatgtgttctaagacggccattcccacacccccacttgagaagcaccgggcaggtgccaaaacacattttcaggactgcccctcccagatctgcaaatgctcatctctgcctctgcaaatgaccccgaggtcaccataagcctggcctccaagttgggggcacctagctaaggggtgctcggctcctgagaggggaccagggggtggcaggggaggccctttgccctgctcagcagcatgttgaggggggtgaggcacacaaaggctcctcctggttcagactgccagccaggcaactccccatcccgtctcaccctccccagacacaacccgacccctgctgcatagcaccctcctgacctatagctcagttcctctcactcgccaccttggtaagatccacctgtcccactagcgagctctgtgggggccaagattctgttttgtcagctggaggtttcagtgaagagaaggtaggtgcagtaggctgagtgtgggggatcagaaaagaccgcggtccatcggaggaggcattcccgtcagtgtccccaaagtgtgttcatgggacacttgttagcttggtgttctgagattgtggccgcagagggacccccactgggcatcctcagtgaggcatcgtgccaagggctctggccttagaccggtactgctggccccatcttggacatctcacccgctgaggtgcacggctctctggccctgcaggctcagactggagtgcccgtgagcatcctgggagcactctctgaagccctgaggggagcagcaggctcttcaccccattgatgccttcatttcttctggcagacggccctccctgaggaacccccaccacatacctcgctaccccaggctgggtcccagcctagagtgatgggcatgagcccagagactccagcagtggcctcactgctcacagggcctaactgggtggtgccttctgtgtttgcagaagaaagcgatcctgaccaccattggtgtgctggaggagcccctggggaatgcccgtctgcatggcgcccgcctcatggcagcactgctgcacacaaacacacccagcatcaaccaggagctctgccggctcaacacgatggacttactgctggtaagtgggcccctcagccagccctgcatgtctgtgagtgtgccgggcatggcctgtggacttgtcaggagcagcagagcagggccccagcatttggacaaagctctgccacggggaggttccagtcccaagtcccaaggctggactacaggtctctggcggggcacagagcagcagtggggtgtgtctcagctgcaggctcatgggaagtgacgagtctaccgtagaattgccctgaaagcagaaggcggatttctaacccggtttgatggaatagagtgacacgtctacctcctttctcatgttctgactgaacaacatagaacttacacggtggttattaggtataaaatggctaaaagagaagctcctgtcgtccacagtagaaggccaacctggcagtttttgtcaaagccagcgggcagtgcctctccatcccgcagacggcttgcatgatgctccaggtggctgaggagaggaaggggcaggcggtgctggcaagtagtgccagtgagcagccctggctgtgggtggcgggctcctctgcggagagcatgaggctgctcccctgagaacgaagggcactgccctagtgggtcctgttggcagacgcagcccccgtcttctgcctggctctggggctctgctggaatctccctgcaatcttagtcccagaactgggctcgaagtgctgtctggctcagttctgtcagcgtgtggaaggtctgtccgcgtgtggaaggtccgtccgcgtgtggaaggtccgtccgcgtgtggaaggtccgtcagtgtgtggaaggtccgtccgcgtgtggaaggtccgtccgcgtgtggaacgtctgtcagcgtgtggaaggtccgtccgcgtgtggaacgtctgtcagcgtgtggaaggtctgtccgcgtgtggaacgtctgtcagcgtgtatgagttctgggcactgctttggctgtgagatcccagtctgcatcagggaagcaattacaaaagagacctactttccttttccctcttcttcttttttttttttttttttttttgagatggagtctctctctgtcgccaggctggagtgcagtggcgggaccttggctcactgcaatctccgactccctggttcaagcgattttcctgcctcagcctcccgagtagctgagattacaggcatgcgccaccatgcccagctaatttttttttgtatttttagtagagacggggtttcaccgtgttggccaggatggtctcaaactcctgacctcgtgatccacccgccttggcctcccaaagtgctgggattacaggcgtgagccactgcacccagccccttttccttcttcaaaagaattctgtcttccactttcttcctctcttttatatttactgtggtaaaatatcataacataaacttggctgttttaactattttaaggtgtgtcactcagtgcattcacaatcttgtatagccattaccattattcacatctagaagtttttcattttcccaaacagaaactctctccgttaaacactaactccccattcattctccctctccacagtctctggcaaccaccattgtctttgtctctgaatttgactattctaggtacagtttatgagtggaatcataaagtattatctttttgtgactgacttatttcacttagcactatgtgcccaaggttcattcagtattgtactgtatgtccaaatttccttcctttttaaggctgaaaaattactgtgtgggtgggccacattctgtccattcatccatccatcagtggagacttgggttgcttccagccttggctattgtgaataacactgctgtatatgtgggtgtacaaatacctgtttgagtccttactttcagttcttctgaaagtaagaagaagttcttctggataaatacctatgaggccaggtcatgtgacaattccatgattaagttttgaggccagacctttccacagtggctgcaccattttatcttcctgtcaacaaagtctcccctttctcctcatcctccccctcatcccgccgacacttgtcttccttcttctgatgctcgtcatctgatgtgcgtgtggaacggtgtctccgtgtggctgatgctcgtcatctgatgtgcgtgtggaacagtgtctccgtgtgacaagtgatgtcgagcatcttctcgtgctttttggccatgtgaatagcttcgttggagaaatgtctattcaagtcctttgaccatttttgaattgagttttttttttgttttttttttttagttttagaagttctatatatattctggatattaatcctttatcagatatatgcaaatattttctttgggttatctttttacataaaaaattttttttagatgtagggtcttgcagtacagtgatcatagcttcctgtaaccttgaactcctgggctcaagtgatcctcccacctcagcctcctgagtagctaagactgcaggcatgcgccaccacatccagctaatttttatattttttgtagagatggggtctcgctatgttgatcaggctggccttgaactcctgacttcaagtgatgctccggccgtggcctcccaaagtgctggaattataggcgtgagccaccagccacccagcctttactccttgataatgacctttgacacacaagttttaaattttgatgaaatccaattatctttttttctctgttgcctgtgctttcggtgtcatatccaaaaaagtcattgccaaatcagtatcatgaagcttttcctctatgcttccttcaaaaagttgtatgttttctctcttatgtttaggtctttaatccattttgaattaatttttgtatctggtgtaaagtaagggtccagcttcattcttttgcatggggttatccagttttcccagcacttgttgaaaagactgtcctaggccgggcacggtggttcacgcctgtaaacccagtattttgggaggccaaggcaggcagatcacctgaggtcaggagtttgtgaccagcctggccaatgtggcgaaaccccatctctacaaaaaatacaaaaattagccaggcatggtggcagcgcctgtaatcccagctacttgggaggctgaggcaggagaatcacttgaacctgggaggcggaggttgcagtgagccaagatcacaccactgcactccagcctgggtgacagagcgagattctgtttcaaaaaaaaaaaaaaaaaaacaccgtcctttcccccatgaatggtctcggcctaattgttaaaaaccagctggccggccgggcgcagtggctcatgcctgtaatcccagcactttgggaggctgaggtgggtggatcatgaggtcaggagattgagaccatcctggccaacatagtgaaaccccgtctctgctaaaaatatgaaaaaattagctgggtgtggtggcatgtgcctgtagtcccagctacttgggaggctgaggcaggagaatggtgtgaacccgggaggtggagcttgcagtgagccgagattgtgccactgcactccagcctgggcaacagagcgagattccatctcaaaaaaaaaaaaaaaacagctggtgatgtgtgcaaaggtttctttctggactctctgttctgtttcgttggtttatatgtctgtccttatgccagtgtcgcactgttttggtgactgtagctttgtagtaagtgataagtgtgagttttccaactttgttctttttccagattgttttggctattcaaagtcatcccgtgagattctgtatgaatttggggatgggtttttcaatgtttgcaaaattgctgttcagattttggtagggattgcattgaatttatagatcactttgggtaatactgtcttcttaacaatattaagtcttcaatccatgaacacagatgtgttcctatgtatttatttatttatttctatttttgagacagaacctcaccctgttgcccaggctggagtgcagtggcgcaatctcggctcaccgcaacctttgcctcccgggttcaaacaagtctcctgcctcaacctcatgagtacctgggattacaggtgcccgccaccacaaaataatttttgttttgttttgttttttttgagaccgagtctcgctgtcgcccaggctggagtgcagtggcgcgatctcggctcactgcaggctccgccccccaggttcacgccattctccttcctcagcctcccaagtagctgggactacaggtgcctgctacctcgcgtggctaattttttgtatttttagtagagacagggtttcaccatattagccaggacggtctcgatctcctgacctcgtgatccgcccaccttggcctcccaaagtgctgggattataggcgtgagccaccacgcccagccaatttttatatttttagtagaaatggggtttcaccatgttggccaggttggtctcaaactcctgacctcaagtgatctgcccacattggcctcccaaagtgctgggattataggcatgagccaccgtgcctggccccatttactttaaataggtctttaaattcttgtagcagtgttttgtagttttcagtgtacaaatcttttatctccttgacttaattcttctggatgctgtcatatataaaattgttttcttactttcctttttggattattcagtgctagtgtatggaaatgcagctgcttttttgtgtgtcaattttgtattctagaactttgctgaattcatttattagctctagcaatttatctggaatatttagaattttctatgtgtaagatcatatcaggtcaggtgtggtggctcatgtttgtaatcccagcactttgggaggcctacacaggaggattgcttgaacccaagagtttaagaccagcctgggcaacatagtgagacctggtctctacaaaataaataagaataaaaattaggcaggtgtggtggcacagatctgtagtcccagctattcaggagactgaagagggaggatcacttgagtctgggaggtcagggctgcagagccgagatcacgccactgtgtgtacttcagccagggcaacagagcaagatccttgctcaaaaaaaaaatacatattctaaaaaaaaaaatcatgtcatttgggaacaaagataattttacttttgcctttaccatttggatgccttttatttctttttcttgcctaattgctctggctgggactgctaagagaagaccgaatagcagtggtgagagtgggcatccttgcctcgctcctgatcttagagaagctttcagtctttcagcattgaatatgttgtcagctatgggcttttcataggtgcctttatcatactgaagatatttccttctattcctagtttgagtgttctatcaagaaagtatgttgaatttttttttttttttgagacagagttttgctcttgttgcccaggctggagtgcagtggcatgatcttggctcacggcaaccgccgcctcctgggctcaggcgattctcctgcctcagcctcccaagtagctgggattacaggcgtgtgccaccatgcccggctaatttttgtattttcagtaaagatggggtttcaccacgttggccaggctggtcttgaactcctgacctcaggtgatccaccctcctcggcctcccaaagtgttgggattacaggcatgagccaccgcacctggccgtatgtggaattttatcagattttttttgtatgagttgagatgatcatttggctttcgtcctttatcctgttaatgtggtgtattgattgattttcatacgtcgatccatccttgcatttgaggagcaaatcccactttatcctggtatataattcttttgatatgatgctaagtttggtttgctagtattttgcatccatgttgataaggaacattggtttgtagttttcttttcttgtagtgtcctcattcggctttggtatcagaggtaattctgtcctcacagaatgaattagaaagtattctctcttagttttttggaagagtttgagaaggattagtgttaactcttctttaaatgtttggtagacctcatcgccaggaaaggaaaaacaaacaacaaaataaatgtttggtagaatttaccagcaaagccatctggtacgggctttttgttgagaggtaggtctgactccatgttacagatgaggtgacacaggaaagcctcctccaaggttgctcaaggtcacatgggcagagaaggtgaagccaggatttaggactacgtttctgtggagaacatgaagcaaatgagcctcctgcctttctctagctccaaccccactgtgtggaacgaggagcccaagctcgaatcctggtgtggaatatacacctcaccccattcccctctccatacagtcctccttctccatggaggcagaagagggtctgggacacaggctgccgtggccctggaatgtaagagacggcagtggggggcgagtgcgtcagacctatgtccccctctctgtcctcatctggaagaagctacatgggaggtgagagatggcagctgtcctcgttcagccacctctgtcccccaggggagtatctaggtggccagaaccacctctgggcttcagcccatgctggttaagtctgggctcccttggggagtgtctgaatgtgcccctcacagtctcacgtttgtgtggtggacgatatgcacacgcctgcccatcctgggtggaatcctcatgtgcttgagagtctaacacacttccaataattcatgagaaagacagaatcataaaggaacttctcacatacttagaactgaagaatcataaaaatactacttagcaaaatgtgtagaatgtagttaaagttgattgtatacagggaaatgtagcctttaaagacagactggaaagaaaggctgcaattaatgagttgagcttccaactgaaggacaaaagaagccaggcctggtgacttatgcctgtcatcccagcactttgggaggcggaggcgggcagatcacctgaggttggaagttcaagaccagcctgaccaacatggcaaaatcccgtctctactaaaaatacaaaaattagctgggcatggtggtgggcacctgtaatcccagctaccagggaggctgaggcaggagaatcacttgaacccaggaggcaggggttgcagtgagccgagatcgtgccactgcactctagcctgggagacaaagcaagactccgtctcaaaaaaaaaaaaaaaaaagaataaacccgcagaaagtagaaaggtgatgattcagattgaagcagagaccaacagacacccacaggcaggaggcagaagtgctcagtggctatttgaagaagctccgtaatagagagatgaccctcaggaaaacgcttaaaactccttcctagctacccagagactggacttgtgaggagttaggacgccacctttaggaagggtttccctcagctttgtggtgtagccggcaggagaaaaccgatctaagaactgtcttctgtcctctgtttacccaggacttgttctttaagtacacctggaataactttttgcacttccaagtggaactatgcatagccgctattctctcccacgctgcccgtgaggagaggacagaagccagcggatccgagagcagggtggagcctccgcatgagaacgggaaccggagcctggagactccccagccggccgccagcctccctgacaacacaatggtgacccacgtgagtccaagaagcatccatcttatcagcgccaactgcgccccactcagaccgtgtccatgtcagcgctgacgtgtgccggacctcactgtgcagctgacacgggggcagggctttgaaaagggtccccaggtgtctggtcagacgctcgtagacagtggggcttgagtgggtcttgcagatctcattcctacctgccttcagcaggggtactggtgccttccacgtgcaggcctggcaagggttagcactggatgagatgagttcagtctggcctccagctggaggcccagggaataaatgcccagggagccagcagtgtcagtgatgggagccacacggtggggaggggatgctgagggacatgcaggccaaccagggactgtcacccggatagcaaggccacaggtatatcgtagtgtgaggtggagcccaggaaaaacatctcaggtacaagaagtgatctgtgtcagggcctggaggtgagagaaagtgctgagggcagacagccctagtcgttcttccggacacagagaaagagggcaggagagtggccaaagtggagggcaatggagagacggggagaaggcccaggggaagacaggggtcagggggcaattccaggagttggaggagaagggagagggtccttttctcgggcttcatctttagggcgctcagcagtatgagccccgaaccgcaccctcctctggtgtttggtgaggaccgcggaggctggggctgtgcgtgcgcagcagtcagggcctgcaaagtccacacagacgtggccgccagccagccctgcccagtccagggatgggtggaggggtgcgtgccgccttcagaccctgactcacgctgtccccctgccccgccccccagctgttccagaagtgctgcctggtgcagaggatcctggaggcctgggaagccaacgaccacacgcagtaagagccgctcggacgtggagggacccagcctggccagtcagggatgcagagacgcacctcacccaagccctggtgacgctgcgtgcaggactgcaggatcgggtggagtgtagggtgtgcgacgtggctccacgttctggggctgctgtgcaaggggcccttctactgggcggacagctgcaaatgctacttggggaggggacacagggagccgacaggaagcggtcccgtccccaccaggcacctgctctggcccccgcccagcctggctttgccctcttgtgggtccgctgtccgttcctgatcttccccaggaactcgggccctccgtcagcactcgcacacagggacgcgttattttggtctttccatcttctgcttaatgggtgctccctctggtcaggacacatgtcccgcttattgtcgtgggcccagagccatccccacccgtttgctgtcctgctgggaactgtctggctctgggcgatatgaggagggactccagggagctgggaggggtctgagtgcagctgtggggaagcagaggccgagctgggctgtacagcatggaggtcccgcccaaccctccccttggggtgctgagcctgagcttggtagctggcagcatgggctcacctcctgcgccactgctgccaccagcgggacttaggccacgccacggcctttctgcctccatttccctgtctgtaaaatggagtgagagcagtgtctgtttcctcatctgtctcagtggcacttttggtagtgaggttggggtgagcctgctgcacgtggcaggtgctactcaaacagaagtgtcctggaggagggcagggggcgcggacactgggcaggggccgggcatttgctctggaggtgaacctggaggagggcagggggcgcggacgctgggcaggggccgggcatttgctctggaggtgaacctggaggagggccgggggcatggatgctgggcaggggccgggcacttgccctggaggtgaacctggaggagggctgggggcgcggacgcggggcaggggccgggcatttgctctggaggtgaacctggaggagggctgggggcatggatgctgggcaggggccgggcacttgccctggaggtgaacctggaggagggctgggggtgcggacgctgggcaggggccgggcatttgctctggaggtgaacctggaggagggctgggggcgcggacgctgggcaggggccgggcatttgctctggaggtgaacctggaggagggccgggggcatggatgctgggcaggggccgggcatttgctctggaggtgaacctggaggagggccgggggcatggatgctgggcaggggccgggcatttgctctggaggtgaacctggaggagggccgggggcgcggacgctgggcaggggccgggcatttgccctggaggtgaacctggaggagggccgggggcatggatgctgggcaggggccgggcatttgccctggaggtgaacctggaggagggccgggggcatggatgctgggcaggggccgggcatttgctctggaggtgaacctggaggagggccgggggcgcagacgctgggcaggggccgggcatttgctctggaggtgaacctggaggagggccgggggcatggatgctgggcaggggccgggcatttgctctggaggtgaacctggaggagggccgggggcgcggacgctgggcaggggccgggcatttgctctggaggtgaacctggaggagggccgggggcatggatgctgggcaggggccgggcatttgccctggaggtgaacctggaggagggccgggggcgcggacgctgggcaggggccgggcatttgctctggaggtgaacctggaggagggccgggggatggatgctgggcaggggccgggcatttgccctggaggtgaacctggaggagggccgggggcgcggacgctgggcaggggccgggcatttgccctggaggtgaacctggaggagggccgggggcatggatgctgggcaggggccgggcatttgctctggaggagggccgggggcatggatgctgggcaggggccgggcacttgccctggaggtgaacctggaggagggccgggggcgcggacactgggcaggggccgggcacttgccctggaggtgaacctggaggagggccgggggcatggatgctgggcaggggccgggcatttgctctggaggtgaacctggaggagggccgggggcgcggacactgggcaggggccgggcacttgctctccgaagtgaacctggaggcctctgccacttggctctctgggtcgtgggtctggcaaggtcggggccaggaggccgccccgatggtgcctgttgctttcagggcagcgggtggcatgagacgtgggaacatgggccacctcacacggatcgccaacgcggtggtgcagaacctggagcggggccctgtgcagacgcacatcagcgaggtcatccgaggtgagcccccaacccggtcatccttctgctggtcgcgggcaccgggaccccgaaggagctgccgcctgagactaagctctgcccggcagcaggtgctgactgcactgacagtgagagacccatggccacctctgtcctctcacttcacacatcacatctctcctcgtgggggcctgggtctcatgtgtcagttctattgggcggacttctgtggagaccctgccaggcgtcagcgtgtggcacaagagacagtccctcccggggtagttggtgactccggagctggcactcagaagccgttagcgccaccgggctccttgcagctcagggagccctgcctggctaggctgtcctggctgtgtgctctgcactcaggtgattggagagtctcattctcactcaggtgtgagatttcgtagcacaagtctcaggggagcaggttgcagcctgtttcttaagaacgcagtgggttaggtgggcgcaggcacagcacatgtgtggcagaggcgggcccagctgtggcctctcctccctatacccgtgtaaggtgaggaagctctggatagtcctccccgcaccccaggaccatagtgaggggactcctgggttgggctccattagcccctggcgaggtcaggcctgccggctgccatcacaaataataaaagcagggcaggaggagcttccccacatcctggagggcaaagtagatgggtggaggtggaggccagggacagctccccagggcaggggcagtttaaggaggcgaggggcaagcaggaagctgttggatcattccatacgatctccagattgtgaatccttccaggactctgacctctccggaaaaacaggcaggacacgcgcccaggcctgtaggctgctgctgagtttgggcctgtgaggtggggggaaggaagctggctgctttctcagattctgttccacggcttctgcgtttctgggagttcctcagaatgggcttccacccaacagacttggaactcagatgcccactggggtttcggtaggggcagaagtgcccaccaccctgcccacaggtgctgcacctcaatctcactgtggccccaggcccctccggatacgcggctatgctgcctctttctcatccggcaaagcccctgcttcaggccctcagacgggctgaccacagtagcagcgccccatcctcccggacccaggatgcacctgccggagcccccgggtgccctgcaccatctgcacggggtctcccagggctcaccaggcagcacttcccttgcagggctccctgcggactgccgtggccgctgggagagcttcgtggaggagacgctgacggagacgaaccgcaggaacactgtggacctggtgaggaggcttggggctgccccctcggtgcacgcacggtgctgggacgccgtcagacgctcctgcctttgccctgaggcagaggccaagggaggcacaagggccgcacgcctgcctgctcctcttgactatgcggtgcccctgcatagtgtgtcctccgggctgatgtccgtaacagagaccccgtcctgtgccacacccagggctgggtctctgaggacctctgtgcagagccggtgttggcctcaggtccctttcctcccactccaggagctgtagcttgttggcagagggctccttttgcctgagacccacaacctgccccctgcacatggaggtcgggctgtcacggggccttggcctcacctaggcacctccttacacagcacggcctcctgggcccagagatctgatgagtgatgtgctgggtggggtctgggagccctgggctgggcatggtcctgggcgctgggctgggtggggtctggggcgctgggctggctcacacgcccaccccatctggcctgtgttttaggtgagcactcaccaccttcactcctcaagtgaggacgaggacattgagggtgctttccctaacgagctgtcccttcagcaggtgagggcgtggccggcacctgcaccctgccgggcccttcccggcacctgtgtgcgctgcgcttggtcctccagacgagtctgatggcatctcactagcaaaggggagcgggggctcgtctccgagcacgtatggggcggggtgggtctgaagggagaaccccaaagtcactccaccttgatgagagcactgaggacacggcagatggactcgaaagtcagagaatatggggcgtatctcagatgtgtccgcagcgagcgcgcagcctgagttttggtagaatcgtgagccctgaacagagtttactgcccacttgtgctggaggagaagctcccgaacaactagagagattgtggttcccaaagagcagcctccaggcctgatgcctcctccatgaccggtgtctgtccgtccctccctccctccctccctcccaggccttctctgactaccagatccagcagatgacagccaacttcgtggatcagtttggcttcaatgatgaggagtttgccgaccaggacgacaacatcaagtgagtctacttggagcgcactctgcacgaggcgcggctctccccgctgctgagctcccgtggaggcagctccctgaggtcttgccgggagtgccgtctgatgtccccgggagacagcaggtgttcccagttgtgtgagggtgctgaggcccccgatgagcaccgggggaggagcactgaggccccagatgagcagtgggcccggaggaacgctgaagccatcccccttgctcttgcagtgccccgtttgacaggatcgcagagatcaacttcaacatcgacgctgacgaggacagtgtgagcaagccgggctgtgtggggtgcggccacccttttcccaggcagctcaggccatgcccatggctcggtctgtcatgggcctgtgcggtggggctgggagaggcccctctgtggagctcggaacagtcgctttccttgcccctccccgtcctcccctccagcccggggctcccacatcccgaactaagcccctgtgggagctctatggggagagcggctcctgtctcccccagaccctctggaaactcaccttggcgttttactctgcagcccagcgcagctctgtttgaggcctgctgcagtgaccgcatccagccctttgatgatgatgaggacgaggacatctgggaggacagtgacactcgctgtgctgcccgggtgatggccagacccaggtgcggggcctgcccatccccacaaagcctctgccgaggaggttcagcccccagaacacctgtcagacgccctgtggttcgttagctggcttgcagagcagccacacctgtcctgccagctctggggcccaatgcagcgggtgaccctaaggagcccagagctgaggcctggagcgtctcgtgctcctctctcgagacgatctgtgctcaccctcagccccgagcctggggccgccactgaccctccatgttaggcgtccgtcctgggccaccagacatctgactctgaatctcccccaggtttggagccccccatgcttcagagagttgctcaaagaatggcccagagcgtggaggccaggatgggaaggcgagcttggaagcacacagagatgcacctggggcaggtgccccaccggcccccgggaagaaggaagccccccctgtggagggtgactcagaaggtggtgctgggcgccaggggctgggagtgtgggtatcggggacaggacatggtaccccggcctgggtgttgtggaggcttcatttggagctgaggcatttggggctcactgtggcccggagcctgaatccccagctatttcccagccgtcctgagtaggggtctgtgctgcgctgtgcccagcgcaaggtggcctcctgcccctgccttgcagttgtggtcactcagccacgttgccaaggctggtgggtggtgtccacctagtctccatcgtccgtccagcccccacacagtcaggcacaggcctgacgccctccccagcacagcagcacaggccggccgccaccttcatggccgacatctatggcaggagccagtccacctcacaggccgcatggctgatgagacccctctccttaccctgccctgggggcagcactgaggcactcaggactttggtggcgggggcagagatctctgttaggaggggctgagctcttcgctgacagagcaagggtgacaccctggggaagcaggaacatcccagataggaggaagacaccccatcctcgaggccaggaaggggccagtggtgctcggtgagctgccggctctgtgggttgcggtcctgggtaggacagggcagtggcatcacctccacactgtcagtgtcagtcctgctggaggcctgggggccctcaggcacctgactgagccccaggtcacacgccccatgggtgtcggcagcttgtcaggaccctcgagctgtcccctgttgctccttgaggggctgacgggcactgcctgggcctccctcctggagcagccccatcttcctgtcaacctctgaggggctcccggggcaggggcgctgcctcccctttgcctgcagcaccccaggcctgcccacgcctgaccactgtgtctctcccccagcaggcgccatgtggacggcagtgtttgatgagccagcgaactcaacgcccacagccccaggagtggtgaaggacgtgggttccagtgtgtgggcagctggcacctcagctccagaggagaaaggctgggccaagttcactgacttccaacctttctgctggtaacaaatgcgctggcaggagggggctgtgccaggaagtgcctgtcagggccaggaggcacctgtcccccaggactgatcctgtcctcgtccttgtatgcagctccgagtcagggcccaggtgcagctctccggtggacacagaatgcagccatgctgagggcagccggagccaaggccctgagaaagcctgtgagtaggagcagtgcaggcggcacccagccttgcccagtttaaggcctgaggccagctggcccccctccttgggggcagtgggaggaggtggccggggcctcgcatgctgctacgtctctggtgacattggggtttgatacagcaatgggactggagcagccacgtgtagatggggaggcccccagaggggaggcagcaaggccattgggctggctctgagcctggtctgagtaggtggcacagctcaggtctgcaccctggattccggacagcagcactgggaccccagcattgagatgtgtgtgggtgggttgttggcaggaagctgttctgtggcctgatcagagcccctggcccccagccccctagtcaggctcagaagctcccccagataaggctgagagctccaggtgagtgacagctggctcccaacactggtgtccccggttttggggtcctttgggcttaaaggagctgtggcaggaccacacgaggcggagtgggcccctccctgagcctctgcgtcctcctgtgagaccagggcatgtgtccctgtatcatgggggaggcaacagggttgtttgtgtggagaccccatggcaggtgcgtgagcctgtctgcctcatcatgcggctcccacacaggcacatgtgtgcaggcaacaggctgcatgtgagagggccacatgtatggggaccctatggctggagtggccgcaccctgtgacccctcctgcctcactggacagcacaggcctcctactttgcagtcagcccggcttctccatgtgcctggaacgtgtgtgtcaccaggaaggcccccctgctggcctctgacagtagctcctctgggggctcccacagcgaggatggcgaccagaaggcagcgagtgccatggatgcggtgagcaggggtcccggccgggaggcccccccgctgcccacagtggccaggacagaggaggctgtcggcaggtgtgtggggcgtggcgggggcgggcctgccgggtgcatagggcgtggcttccaggctctgtccccaggtctcagctcccctgagaggaggtgaggccaggccagggtcttctccacactgcctcccccatggccccgtgacccttcagaggctggctgaggcggcggtggtgcccacgcgtttacgtggaggccggatgggagaagtgtggggccttctttcgtggacagaacatcgtgttctctgttgtgagtggttaagacaagaagacagggcctggatgtcccagacagtcccccagggacttgggggagcagcccctaccccagatcccagttggagagaacagcccagctcttggggctctgggcctggctgagccgcctgggatctgggtaccctggtggtcggggaggggcacagacttttaagtctggcaggcgagcgggcatctgtggggctcacgcagacctcgcctgctgctccccttccacgggaggcctatgattccgagacgcctcagaagcaggatagtaggatggggggcggcggcctcaggactgcactgggggcatccaaatcctgactgagagttggaggcagcttgcaggctggcagaggcccaggctcccttgagcccccaagagccatccctggggagagagtggagagggaggctctccctgtgaggaggttggaggctggccggcccctccagcaagctgaaccccatccgtccccagggccacaggaaggtccctgggatccttcagtaaacagatacctctctggcctctggggtcagggcgtgggttagcaggagggcaggaccgctggggtagatgccagggccaggtaaacctgagggggagggtaggactgggcttgacgtggggaggagggcgcacccagcaacggcacagctgtgcaaagaccctgaggcctgagctcccagtaggtccaggcaacagtggggaagtcctcgggctggattcctctaggaggggacaaggtgcctttcacatctggtggtgcatcccagtcactcctggctccatggttgtgaagggcctgcctggagcggggtgagggtgtcccccagcctcaccgcccaatgcagctcagcctgcatgcgtcccacctgtactacccttcccccacaggtggggcaggcctgacacctcagagggtcctgctcactgacccccggcaatcctggagagtctgtgtggtactggggctccgggcatctcccccagccaagctgcaagctcagcaccaggctggctctccccgccctgttgaccagcaggccccgtctgtgctcacagctcctccccttgtttggccaccctgtcttcagggcatctgcagcaagtggggggcacagcacgggaaacggggccaaggccgtttcccgatgccggcagtcactgggaagcccaggccagagcccctcgggttgaaagtcatacagagttcctgtgtgggcttcattccttcttaaagtttagtcactgaaatttttgtttgtttgtttgtttgagacagagtcttgctctgttgcccaggctggagtgcagtggcgcaatcttggctccctgcaacctccgcctcccgggttcacgccattctcctgcctcagtctcccaagtagctgggactacaggcatccgccaccaccaggcccggctaattttttgtatttttagtagagacggggtttcactgtgttagccagtatggtctcgatctcctgacctcatgatccgcctgcctcggcctcccaaagtgctgggattacaggtgtgagccaccgcgcctggcctagtcactgaaattcttaacagtctttaccctgccaggcacagtggctcacgcctgtaatcccagcactttgggaggccgaggtgggtggatcacctgaggtcgggagttcgagaccagcctggccaacatggtgaaaacccgtctctactaaaaatacaaaaattagccaggcgtggtggcaggcgcctgtagtcccagctacttgggaggctgaggcaggagaatcgcttgaaccggtgagccgagatcacgccactgcactccggcctgcgcatgagagagactgactgtcggcaaaaacaaaaccaaaacaaacctttacccacttctcctaaacaacccctaaaaaactgctctgaaaagcagggaatatcattgtgcaaagtaagttgtttttttccacggggctgtctgcgtaaaacttgccacttagagccctgcctgcaccgtcgtcacggcccagcctgcaggtgagcttcctcgcgcccccgcctgacctgagtgcccctccctgagtcagacacagtgtcgtcgccctgcaggaagccagggggcccgtctgctgctcgtggccaggctgggccttggggtgcccgaccccctccagagcaagccccttagatgcccggcagggtcctctctaccctcccatcccctgggaggtttccccacactgtgtccagtgtgaggctgaagttgagatcatagcacaggaggctctggggtccttgaagaatgaggcgcttgatgatgagcaggatctgagtgctgcctggaggaggtttgaggtcatcaatggacaggcagcttgtcccagtacttggaacttggggcagcagagctgcctagctgggcacaacctgggccaccccacaaagggcaggagtgagaggggccaaagatggtgctcccaggccgcctggacctttttgtccagctggtccttgggcatgaggcggggtggcactgagggtgggggtgcccgtaaccggagtccatgtttgccacacagggtcgggtgtgctgacagccggctgttaagccctgcctgccccgcgccaaaggaagtgactgctgccccagccgtggctgtgccccccgaggctactgtggccatcaccacagcactgagcaaggctggccccgccatacccaccccagcagtctcttctgcactggccgtggcggtccccctagggcccatcatggcagtcacagcagccccagccatggtggccaccctggggacagtgacaaaggacgggtgagcaggttgagtgtgggggtagggggtgtggacagggcccacagcccgcacggttccaaccccaccccattcctgcaggaagacagatgccccgccagaaggagctgccttaaatggcccagtgtgatgctgctgccgcccggccacggcccaccctggtcaggctgcctccttaatcgagaaaactacctggtgatgcaatctttttttttttaatttaatttaattttaaaataaatgctgcattggtaaagctggcagttgaaaccagttggacggcccagcttgcgtctcttctgcctgagtgggcctctcaggtcactcgtgccctgctggaggacagaggggcacctcagccgcccccaagcccagagcacagcaataaggtcggcctgcaggagccggggtgggggtgggggtggggggggcaggaccctgagatgccaccaggacctgatgggccaggaagggcgtggacatggaggctgtttttacagttttttttttttgttgttttgtttttaaagaatacagaaggagccaagcttttttgcactttgtatccagctgcaagctcagggcagagtcaagggcctgggttggaaaaacctgactcacaggaatgcataattgacccttgcagctacccaatagcccttggagctggcactgaaccaggctgcaagatttgactgccttaaaaacacaaggccctctaggcctggcagggatgtccctgtgcccagcacagggtgcctggcagggggagaccacaggtatgcaggtggggggacatggtgtggcactgggggctcgaagactggtttctagcactaccggtcacggccatgtcgtcctagaagggtccagaagattattttacgttgagtccatttttaatgttctgatcacctgacagggcaccccaaacccccaactcccaataaaagccgtgacgttcggacaaaccgcgtactgtgaaccttccggccccaaagccccggcccggccaggggtgggagagtctcctccagcacctcttttgtgggcccgccaccccccagcgttatccccgtgtaatgggtggaggcggaacaggccacatcacggcatcaggtctctacagcttagcaaatactgacatttttccgtttgggggatggggggaaccacttcgcctaacgctcaaacacatcaaccccaggacttccttttgtgccagctccccctcccagaagcctgggccccaccttgtcctcagtggctgagtgggaggggcaggtggagaccagacccccaccccgccccagcgagcttgtctttccaccacggttgggggtggagggaacccgctcagctccccagaggccgagtctctgccccagctacacattgagtgccttgttctcaccgcctaccctgtgcctggcatttgtcctctccccccacagacgtggaacagggagggcagggtcctttctccccttactctgacctgtgggttttccaggtgccaggaactttggtcaggcgccatctgtccggcctgagggaagacctggctggtttcagtggctcaagtgagcccaccctcacatctcgcccaggtgtcccaacaccacctgtggggtgggggaggtggcgggaccatgctgggcctgacagggtccaaggccatccttggcttcaacgtcccaccaggggagggtcttggccccccacctgccagcactgggccctgcctctgcagctgtcatcagaaccttcccctcacccacacctgctgctcgcctcccacctgagaggaccacctgagggacccagcctctagccaggttctctgcccctcaccagcccctctggccaggtcaccagctgccactctcagatgttctcttggcctttgcagcgtctataaccctccccaccttctgctcctgcacccctggccaggcctcgtcacaggcaaggacacaacagctcagcaggtgaagccctgggcctggtgggactcaggtttgaataggaaaagagcagtgaggggccacagtgacaccaagaagggaaggacgggggccctctgagaccccagggaaaggacttttggggcagaattcccaagaactgagagggtccatcccccatgggcgttggccccttactctgccagatgctgctcgttgcctggcaggagccagatgtggtcaacctgcattcc

SEQ ID NO: 446 - DNA, 3515 bp, Homo sapiens
caggtaaagagattataaatcttccactgaatgaaaaaaattttcttaaagctgcatatactccaagaaaaaaaccacaaatgtttttctgttttgcctgaatacatgatttaaacaagagatttccacagaagctctgcggccgtcacgatgttctggaagtttgacttgaacaccacgtcccatgttgacaagctgctggacaaggagcatgtgacgctgcaggagttaatggatgaagatgacatcttgcaggagtgtaaggctcagaaccagaagctgctggacttcctgtgcaggcagcagtgcatggaggagctggtgagcctcatcacacaggatccgcccctggacatggaggagaaggtccgcttcaaatatccaaacacagcctgtgagcttctgacttgtgatgtgccgcagatcagcgaccgcctcggtggggacgagagcctgctgagcctcctgtacgacttcttggaccatgagccgcctctcaatcctctgctcgccagttttttcagcaagaccattggcaatctcattgcaagaaaaaccgaacaggtaaggcagtcaaatgcttctcagactctctgtgacatagttaggctgggcagagaccagggcagtcagctgcaagaggctctggagccagacccgctcctcacagcgctggagtcgcaggactgtgtggagcagcttctgaagaacatgtttgatggagaccggacggagagctgcctcgtcagtgggactcaggtgttactcaccttgctggaaaccaggcgggttgggacagagggcttggtggactccttttctcagggactggaaaggtcatacgctgtcagcagcagcgtactacacggcatcgagcctcggctgaaggacttccaccagctcctgctcaacccgcccaagaagaaagcgatcctgaccaccattggtgtgctggaggagcccctggggaatgcccgtctgcatggcgcccgcctcatggcagcactgctgcacacaaacacacccagcatcaaccaggagctctgccggctcaacacgatggacttactgctggacttgttctttaagtacacctggaataactttttgcacttccaagtggaactatgcatagccgctattctctcccacgctgcccgtgaggagaggacagaagccagcggatccgagagcagggtggagcctccgcatgagaacgggaaccggagcctggagactccccagccggccgccagcctccctgacaacacaatggtgacccacctgttccagaagtgctgcctggtgcagaggatcctggaggcctgggaagccaacgaccacacgcaggcagcgggtggcatgagacgtgggaacatgggccacctcacacggatcgccaacgcggtggtgcagaacctggagcggggccctgtgcagacgcacatcagcgaggtcatccgagggctccctgcggactgccgtggccgctgggagagcttcgtggaggagacgctgacggagacgaaccgcaggaacactgtggacctggccttctctgactaccagatccagcagatgacagccaacttcgtggatcagtttggcttcaatgatgaggagtttgccgaccaggacgacaacatcaatgccccgtttgacaggatcgcagagatcaacttcaacatcgacgctgacgaggacagtcccagcgcagctctgtttgaggcctgctgcagtgaccgcatccagccctttgatgatgatgaggacgaggacatctgggaggacagtgacactcgctgtgctgcccgggtgatggccagacccaggtttggagccccccatgcttcagagagttgctcaaagaatggcccagagcgtggaggccaggatgggaaggcgagcttggaagcacacagagatgcacctggggcaggtgccccaccggcccccgggaagaaggaagccccccctgtggagggtgactcagaagcaggcgccatgtggacggcagtgtttgatgagccagcgaactcaacgcccacagccccaggagtggtgaaggacgtgggttccagtgtgtgggcagctggcacctcagctccagaggagaaaggctgggccaagttcactgacttccaacctttctgctgctccgagtcagggcccaggtgcagctctccggtggacacagaatgcagccatgctgagggcagccggagccaaggccctgagaaagccttcagcccggcttctccatgtgcctggaacgtgtgtgtcaccaggaaggcccccctgctggcctctgacagtagctcctctgggggctcccacagcgaggatggcgaccagaaggcagcgagtgccatggatgcggtgagcaggggtcccggccgggaggcccccccgctgcccacagtggccaggacagaggaggctgtcggcagggtcgggtgtgctgacagccggctgttaagccctgcctgccccgcgccaaaggaagtgactgctgccccagccgtggctgtgccccccgaggctactgtggccatcaccacagcactgagcaaggctggccccgccatacccaccccagcagtctcttctgcactggccgtggcggtccccctagggcccatcatggcagtcacagcagccccagccatggtggccaccctggggacagtgacaaaggacggacagatgccccgccagaaggagctgccttaaatggcccagtgtgatgctgctgccgcccggccacggcccaccctggtcaggctgcctccttaatcgagaaaactacctggtgatgcaatctttttttttttaatttaatttaattttaaaataaatgctgcattggtaaagctggcagttgaaaccagttggacggcccagcttgcgtctcttctgcctgagtgggcctctcaggtcactcgtgccctgctggaggacagaggggcacctcagccgcccccaagcccagagcacagcaataaggtcggcctgcaggagccggggtgggggtgggggtgggggggctgtcatcagaaccttcccctcacccacacctgctgctcgcctcccacctgagaggaccacctgagggacccagcctctagccaggttctctgcccctcaccagcccctctggccaggtcaccagctgccactctcagatgttctcttggcctttgcagcgtctataaccctccccaccttctgctcctgcacccctggccaggcctcgtcacaggcaaggacacaacagctcagcaggtgaagccctgggcctggtgggactcaggtttgaataggaaaagagcagtgaggggccacagtgacaccaagaagggaaggacgggggccctctgagaccccagggaaaggacttttggggcagaattcccaagaactgagagggtccatcccccatgggcgttggccccttactctgccagatgctgctcgttgcctggcaggagccagatgtggtcaacctgcattcc

SEQ ID NO: 447 - protein, 850 aa, Homo sapiens
MFWKFDLNTTSHVDKLLDKEHVTLQELMDEDDILQECKAQNQKLLDFLCRQQCMEELVSLITQDPPLDMEEKVRFKYPNTACELLTCDVPQISDRLGGDESLLSLLYDFLDHEPPLNPLLASFFSKTIGNLIARKTEQVRQSNASQTLCDIVRLGRDQGSQLQEALEPDPLLTALESQDCVEQLLKNMFDGDRTESCLVSGTQVLLTLLETRRVGTEGLVDSFSQGLERSYAVSSSVLHGIEPRLKDFHQLLLNPPKKKAILTTIGVLEEPLGNARLHGARLMAALLHTNTPSINQELCRLNTMDLLLDLFFKYTWNNFLHFQVELCIAAILSHAAREERTEASGSESRVEPFNGNRSLETPQPAASLPDNTMVTHLFQKCCLVQRIAWEANDHTQAAGGMRRGNMGHLTRIANAVVQNLERGPVQTHEVIRGLPADCRGRWESFVEETLTETNRRNTVDLAFSDYQIQQMTANFVDQFGFNDEEFADQDDNINAPFDRIAEINFNIDADEDSPSAALFEACCSDRIQPFDDDEDEDIWEDSDTRCAARVMARPRFGAPHASESCSKNGPERGGQDGKASLEAHRDAPGAGAPPAPGKKEAPPVEGDSEAGAMWTAVFDEPANSTPTAPGVVKDVGSSVWAAGTSAPEEKGWAKFTDFQPFCCSESGPRCSSPVDTECSHAEGSRSQGPEKAFSPDCAWNVCVTRKAPLLASDSSSSGGSHSEDGDQKAASAMDAVSRGPGREAPPLPTVARTEEAVGRVGCADSRLLSPACPAPKEVTAAPAVAVPPEATVAITTALSKAGPAIPTPAVSSAVAVPLGPIMAVTAAPAMVATLGTVTKDGQMPRQKELP

SEQ ID NO: 448 - DNA, 4280 bp, Homo sapiens
caggtaaagagattataaatcttccactgaatgaaaaaaattttcttaaagctgcatatactccaagaaaaaaaccacaaatgtttttctgttttgcctgaatacatgatttaaacaagagatttccacagaagctctgcggccgtcacgatgttctggaagtttgacttgaacaccacgtcccatgttgacaagctgctggacaaggagcatgtgacgctgcaggagttaatggatgaagatgacatcttgcaggagtgtaaggctcagaaccagaagctgctggacttcctgtgcaggcagcagtgcatggaggagctggtgagcctcatcacacaggatccgcccctggacatggaggagaaggtccgcttcaaatatccaaacacagcctgtgagcttctgacttgtgatgtgccgcagatcagcgaccgcctcggtggggacgagagcctgctgagcctcctgtacgacttcttggaccatgagccgcctctcaatcctctgctcgccagttttttcagcaagaccattggcaatctcattgcaagaaaaaccgaacaggtaggcagtcaaatgcttctcagactctctgtgacatagttaggctgggcagagaccagggcagtcagctgcaagaggctctggagccagacccgctcctcacagcgctggagtcgcaggactgtgtggagcagcttctgaagaacatgtttgatggagaccggacggagagctgcctcgtcagtgggactcaggtgttactcaccttgctggaaaccaggcgggttgggacagagggcttggtggactccttttctcagggactggaaaggtcatacgctgtcagcagcagcgtactacacggcatcgagcctcggctgaaggacttccaccagctcctgctcaacccgcccaagaagaaagcgatcctgaccaccattggtgtgctggaggagcccctggggaatgcccgtctgcatggcgcccgcctcatggcagcactgctgcacacaaacacacccagcatcaaccaggagctctgccggctcaacacgatggacttactgctggacttgttctttaagtacacctggaataactttttgcacttccaagtggaactatgcatagccgctattctctcccacgctgcccgtgaggagaggacagaagccagcggatccgagagcagggtggagcctccgcatgagaacgggaaccggagcctggagactccccagccggccgccagcctccctgacaacacaatggtgacccacctgttccagaagtgctgcctggtgcagaggatcctggaggcctgggaagccaacgaccacacgcaggcagcgggtggcatgagacgtgggaacatgggccacctcacacggatcgccaacgcggtggtgcagaacctggagcggggccctgtgcagacgcacatcagcgaggtcatccgagggctccctgcggactgccgtggccgctgggagagcttcgtggaggagacgctgacggagacgaaccgcaggaacactgtggacctggccttctctgactaccagatccagcagatgacagccaacttcgtggatcagtttggcttcaatgatgaggagtttgccgaccaggacgacaacatcaatgccccgtttgacaggatcgcagagatcaacttcaacatcgacgctgacgaggacagtcccagcgcagctctgtttgaggcctgctgcagtgaccgcatccagccctttgatgatgatgaggacgaggacatctgggaggacagtgacactcgctgtgctgcccgggtgatggccagacccaggtttggagccccccatgcttcagagagttgctcaaagaatggcccagagcgtggaggccaggatgggaaggcgagcttggaagcacacagagatgcacctggggcaggtgccccaccggcccccgggaagaaggaagccccccctgtggagggtgactcagaagcaggcgccatgtggacggcagtgtttgatgagccagcgaactcaacgcccacagccccaggagtggtgaaggacgtgggttccagtgtgtgggcagctggcacctcagctccagaggagaaaggctgggccaagttcactgacttccaacctttctgctgctccgagtcagggcccaggtgcagctctccggtggacacagaatgcagccatgctgagggcagccggagccaaggccctgagaaagccttcagcccggcttctccatgtgcctggaacgtgtgtgtcaccaggaaggcccccctgctggcctctgacagtagctcctctgggggctcccacagcgaggatggcgaccagaaggcagcgagtgccatggatgcggtgagcaggggtcccggccgggaggcccccccgctgcccacagtggccaggacagaggaggctgtcggcagggtcgggtgtgctgacagccggctgttaagccctgcctgccccgcgccaaaggaagtgactgctgccccagccgtggctgtgccccccgaggctactgtggccatcaccacagcactgagcaaggctggccccgccatacccaccccagcagtctcttctgcactggccgtggcggtccccctagggcccatcatggcagtcacagcagccccagccatggtggccaccctggggacagtgacaaaggacggacagatgccccgccagaaggagctgccttaaatggcccagtgtgatgctgctgccgcccggccacggcccaccctggtcaggctgcctccttaatcgagaaaactacctggtgatgcaatctttttttttttaatttaatttaattttaaaataaatgctgcattggtaaagctggcagttgaaaccagttggacggcccagcttgcgtctcttctgcctgagtgggcctctcaggtcactcgtgccctgctggaggacagaggggcacctcagccgcccccaagcccagagcacagcaataaggtcggcctgcaggagccggggtgggggtgggggtggggggggcaggaccctgagatgccaccaggacctgatgggccaggaagggcgtggacatggaggctgtttttacagttttttttttttgttgttttgtttttaaagaatacagaaggagccaagcttttttgcactttgtatccagctgcaagctcagggcagagtcaagggcctgggttggaaaaacctgactcacaggaatgcataattgacccttgcagctacccaatagcccttggagctggcactgaaccaggctgcaagatttgactgccttaaaaacacaaggccctctaggcctggcagggatgtccctgtgcccagcacagggtgcctggcagggggagaccacaggtatgcaggtggggggacatggtgtggcactgggggctcgaagactggtttctagcactaccggtcacggccatgtcgtcctagaagggtccagaagattattttacgttgagtccatttttaatgttctgatcacctgacagggcaccccaaacccccaactcccaataaaagccgtgacgttcggacaaaccgcgtactgtgaaccttccggccccaaagccccggcccggccaggggtgggagagtctcctccagcacctcttttgtgggcccgccaccccccagcgttatccccgtgtaatgggtggaggcggaacaggccacatcacggcatcaggtctctacagcttagcaaatactgacatttttccgtttgggggatggggggaaccacttcgcctaacgctcaaacacatcaaccccaggacttccttttgtgccagctccccctcccagaagcctgggccccaccttgtcctcagtggctgagtgggaggggcaggtggagaccagacccccaccccgccccagcgagcttgtctttccaccacggttgggggtggagggaacccgctcagctccccagaggccgagtctctgccccagctacacattgagtgccttgttctcaccgcctaccctgtgcctggcatttgtcctctccccccacagacgtggaacagggagggcagggtcctttctccccttactctgacctgtgggttttccaggtgccaggaactttggtcaggcgccatctgtccggcctgagggaagacctggctggtttcagtggctcaagtgagcccaccctcacatctcgcccaggtgtcccaacaccacctgtggggtgggggaggtggcgggaccatgctgggcctg

SEQ ID NO: 449 - protein, 663 aa, Homo sapiens
MFDGDRTESCLVSGTQVLLTLLETRRVGTEGLVDSFSQGLERSYAVSSSVLHGIEPRLKDFHQLLLNPPKKKAILTTIGVLEEPLGNARLHGARLMAALLHTNTPSINQELCRLNTMDLLLDLFFKYTWNNFLHFQVELCIAAILSHAAREERTEASGSESRVEPFNGNRSLETPQPAASLPDNTMVTHLFQKCCLVQRIAWEANDHTQAAGGMRRGNMGHLTRIANAVVQNLERGPVQTHEVIRGLPADCRGRWESFVEETLTETNRRNTVDLAFSDYQIQQMTANFVDQFGFNDEEFADQDDNINAPFDRIAEINFNIDADEDSPSAALFEACCSDRIQPFDDDEDEDIWEDSDTRCAARVMARPRFGAPHASESCSKNGPERGGQDGKASLEAHRDAPGAGAPPAPGKKEAPPVEGDSEAGAMWTAVFDEPANSTPTAPGVVKDVGSSVWAAGTSAPEEKGWAKFTDFQPFCCSESGPRCSSPVDTECSHAEGSRSQGPEKAFSPDCAWNVCVTRKAPLLASDSSSSGGSHSEDGDQKAASAMDAVSRGPGREAPPLPTVARTEEAVGRVGCADSRLLSPACPAPKEVTAAPAVAVPPEATVAITTALSKAGPAIPTPAVSSAVAVPLGPIMAVTAAPAMVATLGTVTKDGQMPRQKELP

SEQ ID NO: 450 - DNA, 4214 bp, Homo sapiens
ttaatactcccaccacgttggagttgagctgccagggtgatgtcctgaaggtggaagagggaagagagctctgcggccgtcacgatgttctggaagtttgacttgaacaccacgtcccatgttgacaagctgctggacaaggagcatgtgacgctgcaggagttaatggatgaagatgacatcttgcaggagtgtaaggctcagaaccagaagctgctggacttcctgtgcaggcagcagtgcatggaggagctggtgagcctcatcacacaggatccgcccctggacatggaggagaaggtccgcttcaaatatccaaacacagcctgtgagcttctgacttgtgatgtgccgcagatcagcgaccgcctcggtggggacgagagcctgctgagcctcctgtacgacttcttggaccatgagccgcctctcaatcctctgctcgccagttttttcagcaagaccattggcaatctcattgcaagaaaaaccgaacaggtaggcagtcaaatgcttctcagactctctgtgacatagttaggctgggcagagaccagggcagtcagctgcaagaggctctggagccagacccgctcctcacagcgctggagtcgcaggactgtgtggagcagcttctgaagaacatgtttgatggagaccggacggagagctgcctcgtcagtgggactcaggtgttactcaccttgctggaaaccaggcgggttgggacagagggcttggtggactccttttctcagggactggaaaggtcatacgctgtcagcagcagcgtactacacggcatcgagcctcggctgaaggacttccaccagctcctgctcaacccgcccaagaagaaagcgatcctgaccaccattggtgtgctggaggagcccctggggaatgcccgtctgcatggcgcccgcctcatggcagcactgctgcacacaaacacacccagcatcaaccaggagctctgccggctcaacacgatggacttactgctggacttgttctttaagtacacctggaataactttttgcacttccaagtggaactatgcatagccgctattctctcccacgctgcccgtgaggagaggacagaagccagcggatccgagagcagggtggagcctccgcatgagaacgggaaccggagcctggagactccccagccggccgccagcctccctgacaacacaatggtgacccacctgttccagaagtgctgcctggtgcagaggatcctggaggcctgggaagccaacgaccacacgcaggcagcgggtggcatgagacgtgggaacatgggccacctcacacggatcgccaacgcggtggtgcagaacctggagcggggccctgtgcagacgcacatcagcgaggtcatccgagggctccctgcggactgccgtggccgctgggagagcttcgtggaggagacgctgacggagacgaaccgcaggaacactgtggacctggccttctctgactaccagatccagcagatgacagccaacttcgtggatcagtttggcttcaatgatgaggagtttgccgaccaggacgacaacatcaatgccccgtttgacaggatcgcagagatcaacttcaacatcgacgctgacgaggacagtcccagcgcagctctgtttgaggcctgctgcagtgaccgcatccagccctttgatgatgatgaggacgaggacatctgggaggacagtgacactcgctgtgctgcccgggtgatggccagacccaggtttggagccccccatgcttcagagagttgctcaaagaatggcccagagcgtggaggccaggatgggaaggcgagcttggaagcacacagagatgcacctggggcaggtgccccaccggcccccgggaagaaggaagccccccctgtggagggtgactcagaagcaggcgccatgtggacggcagtgtttgatgagccagcgaactcaacgcccacagccccaggagtggtgaaggacgtgggttccagtgtgtgggcagctggcacctcagctccagaggagaaaggctgggccaagttcactgacttccaacctttctgctgctccgagtcagggcccaggtgcagctctccggtggacacagaatgcagccatgctgagggcagccggagccaaggccctgagaaagccttcagcccggcttctccatgtgcctggaacgtgtgtgtcaccaggaaggcccccctgctggcctctgacagtagctcctctgggggctcccacagcgaggatggcgaccagaaggcagcgagtgccatggatgcggtgagcaggggtcccggccgggaggcccccccgctgcccacagtggccaggacagaggaggctgtcggcagggtcgggtgtgctgacagccggctgttaagccctgcctgccccgcgccaaaggaagtgactgctgccccagccgtggctgtgccccccgaggctactgtggccatcaccacagcactgagcaaggctggccccgccatacccaccccagcagtctcttctgcactggccgtggcggtccccctagggcccatcatggcagtcacagcagccccagccatggtggccaccctggggacagtgacaaaggacggacagatgccccgccagaaggagctgccttaaatggcccagtgtgatgctgctgccgcccggccacggcccaccctggtcaggctgcctccttaatcgagaaaactacctggtgatgcaatctttttttttttaatttaatttaattttaaaataaatgctgcattggtaaagctggcagttgaaaccagttggacggcccagcttgcgtctcttctgcctgagtgggcctctcaggtcactcgtgccctgctggaggacagaggggcacctcagccgcccccaagcccagagcacagcaataaggtcggcctgcaggagccggggtgggggtgggggtggggggggcaggaccctgagatgccaccaggacctgatgggccaggaagggcgtggacatggaggctgtttttacagttttttttttttgttgttttgtttttaaagaatacagaaggagccaagcttttttgcactttgtatccagctgcaagctcagggcagagtcaagggcctgggttggaaaaacctgactcacaggaatgcataattgacccttgcagctacccaatagcccttggagctggcactgaaccaggctgcaagatttgactgccttaaaaacacaaggccctctaggcctggcagggatgtccctgtgcccagcacagggtgcctggcagggggagaccacaggtatgcaggtggggggacatggtgtggcactgggggctcgaagactggtttctagcactaccggtcacggccatgtcgtcctagaagggtccagaagattattttacgttgagtccatttttaatgttctgatcacctgacagggcaccccaaacccccaactcccaataaaagccgtgacgttcggacaaaccgcgtactgtgaaccttccggccccaaagccccggcccggccaggggtgggagagtctcctccagcacctcttttgtgggcccgccaccccccagcgttatccccgtgtaatgggtggaggcggaacaggccacatcacggcatcaggtctctacagcttagcaaatactgacatttttccgtttgggggatggggggaaccacttcgcctaacgctcaaacacatcaaccccaggacttccttttgtgccagctccccctcccagaagcctgggccccaccttgtcctcagtggctgagtgggaggggcaggtggagaccagacccccaccccgccccagcgagcttgtctttccaccacggttgggggtggagggaacccgctcagctccccagaggccgagtctctgccccagctacacattgagtgccttgttctcaccgcctaccctgtgcctggcatttgtcctctccccccacagacgtggaacagggagggcagggtcctttctccccttactctgacctgtgggttttccaggtgccaggaactttggtcaggcgccatctgtccggcctgagggaagacctggctggtttcagtggctcaagtgagcccaccctcacatctcgcccaggtgtcccaacaccacctgtggggtgggggaggtggcgggaccatgctgggcctg

SEQ ID NO: 451 - protein, 663 aa, Homo sapiens; identical to SEQ ID NO: 449

SEQ ID NO: 452 - DNA, 4498 bp, Homo sapiens
aaaaaaaaaagaaaagaaaaaaaaatgatttgtggccagacaggtaatagggcatttcagattctaattttctcttagcaacagtctctatcacagaatgttgttttttaaagggcgctttcatggaactatatgatcatatgggcaacattctgttgcagtctaccttctgtctgacggatatgccatcctgaaaaaggaaagaagctgaacttcaagttcctttcatttagccttggatggacttccaggacttgggtctagtgttgctgagggtggatctgcagagctctgcggccgtcacgatgttctggaagtttgacttgaacaccacgtcccatgttgacaagctgctggacaaggagcatgtgacgctgcaggagttaatggatgaagatgacatcttgcaggagtgtaaggctcagaaccagaagctgctggacttcctgtgcaggcagcagtgcatggaggagctggtgagcctcatcacacaggatccgcccctggacatggaggagaaggtccgcttcaaatatccaaacacagcctgtgagcttctgacttgtgatgtgccgcagatcagcgaccgcctcggtggggacgagagcctgctgagcctcctgtacgacttcttggaccatgagccgcctctcaatcctctgctcgccagttttttcagcaagaccattggcaatctcattgcaagaaaaaccgaacaggtaggcagtcaaatgcttctcagactctctgtgacatagttaggctgggcagagaccagggcagtcagctgcaagaggctctggagccagacccgctcctcacagcgctggagtcgcaggactgtgtggagcagcttctgaagaacatgtttgatggagaccggacggagagctgcctcgtcagtgggactcaggtgttactcaccttgctggaaaccaggcgggttgggacagagggcttggtggactccttttctcagggactggaaaggtcatacgctgtcagcagcagcgtactacacggcatcgagcctcggctgaaggacttccaccagctcctgctcaacccgcccaagaagaaagcgatcctgaccaccattggtgtgctggaggagcccctggggaatgcccgtctgcatggcgcccgcctcatggcagcactgctgcacacaaacacacccagcatcaaccaggagctctgccggctcaacacgatggacttactgctggacttgttctttaagtacacctggaataactttttgcacttccaagtggaactatgcatagccgctattctctcccacgctgcccgtgaggagaggacagaagccagcggatccgagagcagggtggagcctccgcatgagaacgggaaccggagcctggagactccccagccggccgccagcctccctgacaacacaatggtgacccacctgttccagaagtgctgcctggtgcagaggatcctggaggcctgggaagccaacgaccacacgcaggcagcgggtggcatgagacgtgggaacatgggccacctcacacggatcgccaacgcggtggtgcagaacctggagcggggccctgtgcagacgcacatcagcgaggtcatccgagggctccctgcggactgccgtggccgctgggagagcttcgtggaggagacgctgacggagacgaaccgcaggaacactgtggacctggtgagcactcaccaccttcactcctcaagtgaggacgaggacattgagggtgctttccctaacgagctgtcccttcagcagatccagcagatgacagccaacttcgtggatcagtttggcttcaatgatgaggagtttgccgaccaggacgacaacatcaatgccccgtttgacaggatcgcagagatcaacttcaacatcgacgctgacgaggacagtcccagcgcagctctgtttgaggcctgctgcagtgaccgcatccagccctttgatgatgatgaggacgaggacatctgggaggacagtgacactcgctgtgctgcccgggtgatggccagacccaggtttggagccccccatgcttcagagagttgctcaaagaatggcccagagcgtggaggccaggatgggaaggcgagcttggaagcacacagagatgcacctggggcaggtgccccaccggcccccgggaagaaggaagccccccctgtggagggtgactcagaagcaggcgccatgtggacggcagtgtttgatgagccagcgaactcaacgcccacagccccaggagtggtgaaggacgtgggttccagtgtgtgggcagctggcacctcagctccagaggagaaaggctgggccaagttcactgacttccaacctttctgctgctccgagtcagggcccaggtgcagctctccggtggacacagaatgcagccatgctgagggcagccggagccaaggccctgagaaagccttcagcccggcttctccatgtgcctggaacgtgtgtgtcaccaggaaggcccccctgctggcctctgacagtagctcctctgggggctcccacagcgaggatggcgaccagaaggcagcgagtgccatggatgcggtgagcaggggtcccggccgggaggcccccccgctgcccacagtggccaggacagaggaggctgtcggcagggtcgggtgtgctgacagccggctgttaagccctgcctgccccgcgccaaaggaagtgactgctgccccagccgtggctgtgccccccgaggctactgtggccatcaccacagcactgagcaaggctggccccgccatacccaccccagcagtctcttctgcactggccgtggcggtccccctagggcccatcatggcagtcacagcagccccagccatggtggccaccctggggacagtgacaaaggacggacagatgccccgccagaaggagctgccttaaatggcccagtgtgatgctgctgccgcccggccacggcccaccctggtcaggctgcctccttaatcgagaaaactacctggtgatgcaatctttttttttttaatttaatttaattttaaaataaatgctgcattggtaaagctggcagttgaaaccagttggacggcccagcttgcgtctcttctgcctgagtgggcctctcaggtcactcgtgccctgctggaggacagaggggcacctcagccgcccccaagcccagagcacagcaataaggtcggcctgcaggagccggggtgggggtgggggtggggggggcaggaccctgagatgccaccaggacctgatgggccaggaagggcgtggacatggaggctgtttttacagttttttttttttgttgttttgtttttaaagaatacagaaggagccaagcttttttgcactttgtatccagctgcaagctcagggcagagtcaagggcctgggttggaaaaacctgactcacaggaatgcataattgacccttgcagctacccaatagcccttggagctggcactgaaccaggctgcaagatttgactgccttaaaaacacaaggccctctaggcctggcagggatgtccctgtgcccagcacagggtgcctggcagggggagaccacaggtatgcaggtggggggacatggtgtggcactgggggctcgaagactggtttctagcactaccggtcacggccatgtcgtcctagaagggtccagaagattattttacgttgagtccatttttaatgttctgatcacctgacagggcaccccaaacccccaactcccaataaaagccgtgacgttcggacaaaccgcgtactgtgaaccttccggccccaaagccccggcccggccaggggtgggagagtctcctccagcacctcttttgtgggcccgccaccccccagcgttatccccgtgtaatgggtggaggcggaacaggccacatcacggcatcaggtctctacagcttagcaaatactgacatttttccgtttgggggatggggggaaccacttcgcctaacgctcaaacacatcaaccccaggacttccttttgtgccagctccccctcccagaagcctgggccccaccttgtcctcagtggctgagtgggaggggcaggtggagaccagacccccaccccgccccagcgagcttgtctttccaccacggttgggggtggagggaacccgctcagctccccagaggccgagtctctgccccagctacacattgagtgccttgttctcaccgcctaccctgtgcctggcatttgtcctctccccccacagacgtggaacagggagggcagggtcctttctccccttactctgacctgtgggttttccaggtgccaggaactttggtcaggcgccatctgtccggcctgagggaagacctggctggtttcagtggctcaagtgagcccaccctcacatctcgcccaggtgtcccaacaccacctgtggggtgggggaggtggcgggaccatgctgggcctg

SEQ ID NO: 453 - protein, 684 aa, Homo sapiens
MFDGDRTESCLVSGTQVLLTLLETRRVGTEGLVDSFSQGLERSYAVSSSVLHGIEPRLKDFHQLLLNPPKKKAILTTIGVLEEPLGNARLHGARLMAALLHTNTPSINQELCRLNTMDLLLDLFFKYTWNNFLHFQVELCIAAILSHAAREERTEASGSESRVEPFNGNRSLETPQPAASLPDNTMVTHLFQKCCLVQRIAWEANDHTQAAGGMRRGNMGHLTRIANAVVQNLERGPVQTHEVIRGLPADCRGRWESFVEETLTETNRRNTVDLVSTHHLHSSSEDEDIEGAFPNELSLQQIQQMTANFVDQFGFNDEEFADQDDNINAPFDRIAEINFNIDADEDSPSAALFEACCSDRIQPFDDDEDEDIWEDSDTRCAARVMARPRFGAPHASESCSKNGPERGGQDGKASLEAHRDAPGAGAPPAPGKKEAPPVEGDSEAGAMWTAVFDEPANSTPTAPGVVKDVGSSVWAAGTSAPEEKGWAKFTDFQPFCCSESGPRCSSPVDTECSHAEGSRSQGPEKAFSPDCAWNVCVTRKAPLLASDSSSSGGSHSEDGDQKAASAMDAVSRGPGREAPPLPTVARTEEAVGRVGCADSRLLSPACPAPKEVTAAPAVAVPPEATVAITTALSKAGPAIPTPAVSSAVAVPLGPIMAVTAAPAMVATLGTVTKDGQMPRQKELP

SEQ ID NO: 454 - DNA, 4554 bp, Homo sapiens
caggtaaagagattataaatcttccactgaatgaaaaaaattttcttaaagctgcatatactccaagaaaaaaaccacaaatgtttttctgttttgcctgaatacatgatttaaacaagagatttccacagaagggcgctttcatggaactatatgatcatatgggcaacattctgttgcagtctaccttctgtctgacggatatgccatcctgaaaaaggaaagaagctgaacttcaagttcctttcatttagccttgggcttccaccttctctgtggctagaaacaggaccgtccagaagtcacctgtaactgccctatcttgcaagttctgattttggcaaaaaaaaaaaaaaaagccttgacaaggttggattcacttctttccctggattgtgtgtcatccaactctgcggccgtcacgatgttctggaagtttgacttgaacaccacgtcccatgttgacaagctgctggacaaggagcatgtgacgctgcaggagttaatggatgaagatgacatcttgcaggagtgtaaggctcagaaccagaagctgctggacttcctgtgcaggcagcagtgcatggaggagctggtgagcctcatcacacaggatccgcccctggacatggaggagaaggtccgcttcaaatatccaaacacagcctgtgagcttctgacttgtgatgtgccgcagatcagcgaccgcctcggtggggacgagagcctgctgagcctcctgtacgacttcttggaccatgagccgcctctcaatcctctgctcgccagttttttcagcaagaccattggcaatctcattgcaagaaaaaccgaacaggtaggcagtcaaatgcttctcagactctctgtgacatagttaggctgggcagagaccagggcagtcagctgcaagaggctctggagccagacccgctcctcacagcgctggagtcgcaggactgtgtggagcagcttctgaagaacatgtttgatggagaccggacggagagctgcctcgtcagtgggactcaggtgttactcaccttgctggaaaccaggcgggttgggacagagggcttggtggactccttttctcagggactggaaaggtcatacgctgtcagcagcagcgtactacacggcatcgagcctcggctgaaggacttccaccagctcctgctcaacccgcccaagaagaaagcgatcctgaccaccattggtgtgctggaggagcccctggggaatgcccgtctgcatggcgcccgcctcatggcagcactgctgcacacaaacacacccagcatcaaccaggagctctgccggctcaacacgatggacttactgctggacttgttctttaagtacacctggaataactttttgcacttccaagtggaactatgcatagccgctattctctcccacgctgcccgtgaggagaggacagaagccagcggatccgagagcagggtggagcctccgcatgagaacgggaaccggagcctggagactccccagccggccgccagcctccctgacaacacaatggtgacccacctgttccagaagtgctgcctggtgcagaggatcctggaggcctgggaagccaacgaccacacgcaggcagcgggtggcatgagacgtgggaacatgggccacctcacacggatcgccaacgcggtggtgcagaacctggagcggggccctgtgcagacgcacatcagcgaggtcatccgagggctccctgcggactgccgtggccgctgggagagcttcgtggaggagacgctgacggagacgaaccgcaggaacactgtggacctggccttctctgactaccagatccagcagatgacagccaacttcgtggatcagtttggcttcaatgatgaggagtttgccgaccaggacgacaacatcaatgccccgtttgacaggatcgcagagatcaacttcaacatcgacgctgacgaggacagtcccagcgcagctctgtttgaggcctgctgcagtgaccgcatccagccctttgatgatgatgaggacgaggacatctgggaggacagtgacactcgctgtgctgcccgggtgatggccagacccaggtttggagccccccatgcttcagagagttgctcaaagaatggcccagagcgtggaggccaggatgggaaggcgagcttggaagcacacagagatgcacctggggcaggtgccccaccggcccccgggaagaaggaagccccccctgtggagggtgactcagaagcaggcgccatgtggacggcagtgtttgatgagccagcgaactcaacgcccacagccccaggagtggtgaaggacgtgggttccagtgtgtgggcagctggcacctcagctccagaggagaaaggctgggccaagttcactgacttccaacctttctgctgctccgagtcagggcccaggtgcagctctccggtggacacagaatgcagccatgctgagggcagccggagccaaggccctgagaaagccttcagcccggcttctccatgtgcctggaacgtgtgtgtcaccaggaaggcccccctgctggcctctgacagtagctcctctgggggctcccacagcgaggatggcgaccagaaggcagcgagtgccatggatgcggtgagcaggggtcccggccgggaggcccccccgctgcccacagtggccaggacagaggaggctgtcggcagggtcgggtgtgctgacagccggctgttaagccctgcctgccccgcgccaaaggaagtgactgctgccccagccgtggctgtgccccccgaggctactgtggccatcaccacagcactgagcaaggctggccccgccatacccaccccagcagtctcttctgcactggccgtggcggtccccctagggcccatcatggcagtcacagcagccccagccatggtggccaccctggggacagtgacaaaggacggacagatgccccgccagaaggagctgccttaaatggcccagtgtgatgctgctgccgcccggccacggcccaccctggtcaggctgcctccttaatcgagaaaactacctggtgatgcaatctttttttttttaatttaatttaattttaaaataaatgctgcattggtaaagctggcagttgaaaccagttggacggcccagcttgcgtctcttctgcctgagtgggcctctcaggtcactcgtgccctgctggaggacagaggggcacctcagccgcccccaagcccagagcacagcaataaggtcggcctgcaggagccggggtgggggtgggggtggggggggcaggaccctgagatgccaccaggacctgatgggccaggaagggcgtggacatggaggctgtttttacagttttttttttttgttgttttgtttttaaagaatacagaaggagccaagcttttttgcactttgtatccagctgcaagctcagggcagagtcaagggcctgggttggaaaaacctgactcacaggaatgcataattgacccttgcagctacccaatagcccttggagctggcactgaaccaggctgcaagatttgactgccttaaaaacacaaggccctctaggcctggcagggatgtccctgtgcccagcacagggtgcctggcagggggagaccacaggtatgcaggtggggggacatggtgtggcactgggggctcgaagactggtttctagcactaccggtcacggccatgtcgtcctagaagggtccagaagattattttacgttgagtccatttttaatgttctgatcacctgacagggcaccccaaacccccaactcccaataaaagccgtgacgttcggacaaaccgcgtactgtgaaccttccggccccaaagccccggcccggccaggggtgggagagtctcctccagcacctcttttgtgggcccgccaccccccagcgttatccccgtgtaatgggtggaggcggaacaggccacatcacggcatcaggtctctacagcttagcaaatactgacatttttccgtttgggggatggggggaaccacttcgcctaacgctcaaacacatcaaccccaggacttccttttgtgccagctccccctcccagaagcctgggccccaccttgtcctcagtggctgagtgggaggggcaggtggagaccagacccccaccccgccccagcgagcttgtctttccaccacggttgggggtggagggaacccgctcagctccccagaggccgagtctctgccccagctacacattgagtgccttgttctcaccgcctaccctgtgcctggcatttgtcctctccccccacagacgtggaacagggagggcagggtcctttctccccttactctgacctgtgggttttccaggtgccaggaactttggtcaggcgccatctgtccggcctgagggaagacctggctggtttcagtggctcaagtgagcccaccctcacatctcgcccaggtgtcccaacaccacctgtggggtgggggaggtggcgggaccatgctgggcctg

SEQ ID NO: 455 - protein, 663 aa, Homo sapiens; identical to SEQ ID NO: 449

SEQ ID NO: 456 - DNA, 58904 bp, Mus musculus
  misc_feature (1)...(58904): n = A,T,C or G
atggctgtgcgggagtgacactgtgggcaggagggaggcaagcagcccgaggtggtagccacctcttgctcacatgggcctgtgtggtagtcttctccccaccttttctttatctgagcagttccgatacaagcggagagtttatgcccagaacctcatagatgacaagcagtttgcaaagctacacacaaaggtaaggaggcagtccctggaggggactccccatggccactgactgtccccatgctggcttgacccagcctgcttttccccccaagttgatttcagggcctgagctggagctgggcatgctgggtgggcacaggctccatgcccatggctggtccagtgataggttgcagcttaatcagatattggctggtgtaggggtgagagccttgttagaagcttgggggctggggggggggcagggcagggaagccaataagcatccaatgtgttggctctgagagggcaagaagttctctatataaggaacacaaaattaggtagctcatgaattctcttccaggagggatttgctacacattttacaggtgaggcagagggcttgagtcacctgctgtgactgcccggtgaagctggctcagatctgtctgactaggtaggccctgtggcctgggtacacttaacctgtatagtgtctttgcatctgggacctactcccagatatagagtatagggcctgactctattcactttctttttgagggggtactaaacccctcctgggtgtccagggggcaaggtgggtgtcacagcccctttccaactcccccagttctgtggatcaatgggaatttgttcatgggatactttcttgatgggctctggagtatagggaaaggtctttgtgaccccatctgtggtcctagatccttacgcttacttgaaagactttcctgctgccccaggacaggtgacagtcaatggccatggctctatgctgggtagagaccatgtcagagaggtctttgtctctccctccaccagcccttgtgtgaccctggcaccctgggttctccagctcttttctcaggtgcccgtaagacatgagagccacttgcctttcagaaagtcatttggttttaggatggacctggacttctgactgcagccctgtcccctggcttgcctggggtccggctatccctagctctctctgttaccttggggctggctaaggtcttcctagaggatttgcatagcttcttgtagggtttgagcaccctgacccatgatgctggtccatgaggcacccttttctgtctgtggtataagctgcttgtgaatgcctgggctgggactccttgccctgtgtggctggcacctgtaccaccagacaaggccagtcagtgaaactttgccgggtgaaggactggaaggcaaagtcatgtcataggtgtgccaggggtgtaccatgggatgtaggaggagctagtaagatggggtggaggaatgagaccagagttgttaggatttgacacctgtcagaatggcctcagtgttcttttaggctgagggaagggactcagttggcccgtgaccggggtgaccaggctgggatgtgagagtgaccaggctcaggatgacactgttgagggtctgcagggaagggatttgaaagtacacgggtccagccaagctggaatgagacctgaggtaagagtatagggttgaggatgagcaagctaggtgacaggttagacacattggggttagggacaggtggcctggagcctgctggaggatgtcgggtgatgctaggatgaccctagctttggcactcagctgacttggattgctcatgttctaggcaaacctgaagaagttcatggactatgtccagctacacagcacagataaggtggcccgcctgctggacaaggggctggaccccaatttccatgaccctgactcaggaggtgaggagaagaatggggaggggctgtgtttttgaccggctgggaccctaaccttcacttatgtcccattccagagtgccctctgagccttgcggcacagttggacaacgccactgacctcctgaaggttctccgcaacggcggtgctcatctggacttccggacccgagatgggctgacagccgtccactgtgctacccgccagcggaacgcaggggcattgacggttagtgagggcaggaccctggtctggagggactcaaggcagaaagctgggatgggcatggattttgaggtgccttaaccctcagaccctgctggacctgggggcttcgcctgactacaaggacagccgcggcctgacgcccctgtaccatagtgccctagggggcggggatgccctctgttgcgagctgcttctccatgatcatgcacagctggggaccactgatgagaatggttggcaagagatccatcaggtgagcagggggacctaggctggggtccaggctgtatgtaggtggtcctggcctctgtctgggatacttcacacttctcttctcctcaggcctgtcgctttggacacgtgcagcacctggagcaccttttgttctatggggccaacatgggtgctcagaatgcctcgggaaacacagccctgcacatctgtgccctctacaaccaggtacatcttgagtcttacccctctgtgggctcacttacattttctgtatgttgtaaaagggtgactccatgtgtggataggatgcgcctgcacctaggtgactgaacatcccagctcgtgtgacactccatgtgtaggttctgtgcccggtctggttactgggtagtagttcctgggtggcccacttaaaacacatctgttctctgaacacacgtatgtggcaatatatccccatgaatgttcttagcatctagctctcagatgagagctacttacataggtatgcgctgacgagtttgtatgtgtgagtgattcttgccccctgtacaccacgtgtgtgtcctgccatggcctagccctcccttttctgctgcctggtgtgattgctgctgtctcctgacaggagagttgcgcgcgcgtcctgcttttccgtggtgccaacaaggacgtccgcaattacaacagccagacagccttccaggtacaggctgagcccggggcgggtggggggcggttgcttatgagtccctattgccacttgactttgaaccttgactcttcttcagagggcaaaaagggagtgctcactcactttcaggactgccacggaaggtggttttatgagtgggctagtgtggtgcccagaatgtgagggagggtttggtgtggtggttcctcctgccatggaaaaacatccgatgactccagaaatctgggaaagagccaactggagagggcagaaagacaggtgtggtgggcctgactccccagaagcagaaaggggtgcggggaacaaggctgagatgggtgtggtctgtactacacctgacttgacccaggttatagttctgagctgtttgtcagccaggctggttggcactggctagccaggtagctatcatctctgcggcctggagttttgcaggagttgaaggtgtcgtggggattcatgaaccttgaaagtagcagggaagggggtgtctgttattcttagttggagcagaggccccctgaggatgtcagaaaggctatgtctgggagttcgaggcaggggatgaaggtttgagcacacccagaagtagatacgcccggacctattagctgtccggatttgggggactccggaagaatgagggctgaaagatatggggctgagactgagataggaactgtggctgcatataggggcagataaaatgttctaccagtgtgagcagatctgttcatgttttaactctaagccctgtgtcccagaagcaccccaggacttaggcggataacggtagtcggccaaccctagttactggcatccttgtctcttgtctttaagaggtgaggtcccagtagacattttggcttgacttgagaggagagtggctttgggaggatcccaaaagtaggagcagctggggtgggatcaaatctgggttgctgagcctccttccttgacctccatgtctccccccgctctcccaggtggccattattgcagggaactttgagcttgccgaggtaatcaagacccacaaagactccgatgtcggtgagttctgccccactcagctccttcctcgaggtgctgtgcttgtcataggcagtggtggtgtaacaggaccccaatatgtcaagaccgttgtcaccaagtgacctctgctgacacaggaaatgagatgaaaaagagcctgtgtggactgaacagaattcttggtcagggcctggagcaggtctgggctctgggctggaagagccttgggcccagcagggcttgggcttcccattaggtgctaggaagggtcttctgagaccagggggtggtagatctcactccagcctggaacatggctggggttagcttcctatgactttctatgtgacaagatcccatgaacatagccgacgagaaaaaaaaatcacaggggtgtggatgaagaccgacgtggggataggcttgtggctggcgacttggccagcaggtttgagctcccaggaggcagcgcttaaaacaaacttggcatatgtggaagtcctagcaggagagccaaaagatgcaaggcagaagggtcagcctatgtttctgtgtatgtgtgcgcgtatgtgtgaggcggggtgtgtgtgtgtgtgtgtgtgtgtgtgtgtgtgtgtgtgtgtgtgtgagtgagtgagagagagagagagagagagcttctggagccaggctggttcgcactgggtataggtgactaagtgtgcagggtactgtgggcccctcctccactaaagcaaagccttctagccatagggatctcttaatgttctggtaggcttttctgcctgtggctctttctggaacacagagccccaggcttccctttcttctgtgaggattacttgaagtgtccccattttttttttttcagtgacattgggcagcaaaaggctgaggctggcattaatcttagaacattcctccgttttctgtcagtctggcctgggggttcatttttggatggggttaagattaaggtcagtttcatgtttagggctcttccttgagctgctctctgctaataaggcttggttacgagctccttgagccttgcgaggtggggccgtaatgatggttgtaccgagcgtgggtggcttccccaagagagctgagtgacttcatgatccgtggtacaaagctgggtccaggttcatgcagaaagagtgggggggggaatagctgggttgatataggggcaagagagaggtgcagtttgagtgggggtgagagtattagtgacagtgttttctaggaccaccctgctgtggatctttggggggtcttgtttcatctgcttgtctaatcgtgagagaactgttaacagtgcggcacctcaccacgtcataggtgaaatagagcatcttagagttatcgagtcttctttcaccttggtcttttatagcacttgatcctggcagggtttgggttctaggaagcggcctgtttgtaactgggtcttcaagggatgaggagcttgtatggtctcaagcgtgaggggtagaaatatttctctacccctcatcctaggattctgggggtcaccatctattttatcccagtgtgctggctcagttggggtcgggcacatcatccgctgagtagagtgagcacgtgtgtcatctgatcctgatctcttttaggcatctattgttaggtttctattgttgtggtaaaaacaccacgaccagaaagcaacttgggaagagacaggtttgtttcagcttacagcagcccatcatgaagggaaggcagggtaggaaccgaagtcaggaacctggaggcaggaactgaagcagaggccatggaggagtgctgcttcctggcttgctcctcatggcttgctcagcctgctttcttatataatcctgaactacccgcccaggggtggcaccacccatagtaagctgggttcttccacatcaatcaatcaatcaatcaatcaatcaatcaatcaatcaatcagtcatcaccaccaccaccaccaccatcatcaccatcatcgccccaactggcctgtaggtcagtctgatggagctgttttcttaactgaagcttcctcttcctagatgaccctggcttgtataaagttgtcaacaaataaacaaacaaaaaccaaacctgagcagaacataaccagttgtccttgcgtaggatgatttattttgaactttcttattccagtttatcttcccactatccttttgtgaagttgattattgggcctcttaacagagaaggaaaccaaatctccacagggttcgtgacaaaacccatccttagatgtgggggctcgggtctgtcatctgcacatctttactccaaggacatttcttaagtgatagttgtgcgttcctaggtctcactctggtctttgggcagaggcttacacatggagagctatgtggaactctctgcctattcaccctcctcttccttcctgagggtcgggtagggtaggcactagtgtcatgcttcaagagacaggacacgtcctgtgtcttggcaggcttacttctctttagggaccaacagaccttgggcaggactctgtcctgccagaggcttcctctcgcttcctgcctctgtcacggggctgtcctctttcagtcaagcgcctgtgtgcatgaaaatactctatgcatatatgttctcatggaccatctatctcatttttggtaagtgccttgggaaacgcgcctcctatggtgatgtcacctggagagcttgttcagggtaggttctgagtctgggcctggatggaacctgcgtttctacaccggtcatcagctcaagatgaagcttgctctgctggtcccacctctactttttatagacaaagctagcaggtagtgctgcaggcccatgccggcccatagtgtagttttagtttttaaattaaggtgaaatgttccttacctaaaattgatgactcttagtggcaatccagggcatccctcacatttacaacattgtatgctggttttattgatccccaaatattttctttttttattagatattttctttatatacatttcaaatgctatcctgaaagttccctataccctccctccaccctgctcccttacccacccactcccgcttcttggccctggcattcccctgtactggggcatataaagtttacaagaccaaggagcctcttttccctgtgatggccgactaggccatcttctactacatatgcagctagagtcaagagctctgggggtactggttagttcatattgttgttccacctatagggttgcagtccccttcagctccttgggtgctttctctagcttctctatttggggccttgtgttccatcttatagatgactgtgagcatctacttctgtatttgccaggcactggcatagcctcatacgagacagctataacagggtcccttcagcaaaatctttctggcatatgcaatagtgtctgggtttggtggctgattatgagatggatccccgggtggggtagtctgtggatagttcatcctttcgtcttacctccaaactttgtctctgtaactcctttcatgggtattttgttccctattctaaggaggaaggaagtatcacccattggtcttccctcttcttgattttcttgtgttttgcaaattgtatcttgggtgttctatgtttctgggctaatatccacttatcagtgagtgcatatctaatgacttcttttgtgattaggttacctcactaaggatgatatcctccagatacatccatttgtccaagaatttcatgatccccaaatattttcattgctccaaagaatatctcagatatgttaggcaattattctgtattaccctcttctgccaacctgtcagctgagaaaataattcctctttgcatttagctgttattgctgtttcatatcaatgggattatactaccactctctgtgtttgacttcttttactctttttctttttgagcttcatctgccttgtaaggtcaccactttattctaccttaaggataaaaaaccattctactgtctttatggatggtatttggcttatccatttatttgtgggtgaatatatagattgtttctatgttaaaatatattgtgtgtgtgtgttctcacatgcacaagcctgcttatctgtatgtgcatcacatgcataatacatgttcccttgggggccagaagagggtatctgatttcctggaactagagatacagctggttgtgagccacccaattggtactgggaaccaaacttatgaccctttgcaagagaagcattcactctttaattttcattttatgtgtatgaatacactgtggctgtcctcagacaccccagaagagggcatcggatcccattacagatggttgtgagccaccatgtgggttctgggaattgaactcccggcctctagaagagcagtcagtgctcttaacctttgagccatctttccaggccccttgtgttttctttgagacagagtttctctgtgcagtcctggctgtcctggaactagctctgtaaaccaagctggcctcaaattcagagatccacctacctttgtctcctgagtaggacaccaccgctgggctgagtggcataccctcttaacagctgggccatctctctagctggttcctataacatatgaatattgctatcaccatcacaaacatgtctgtacgtgtatttatatgaatacttgtttacacttcttctgggtttatcctgaggggtggaatttctaggtgacatgacatttcttacagttttagaggaacttccaaactgtttcccaccaaacttctgtcagccgtgcgtaagtttctaactttttaacttctttacattcttcctgaagcctgtctggtgcttatttatttattttttaaattgtagttaattctgttggatatggtgcgatatttcattgtggtttgtggtttcctagtgaccagtgatattaagcttatttacaagagtttgttgttcacttgtgtgtctttggagaaaagtgaaggccttttctaacttaaaaaccgttttacttattgttggattataagaattctttatatattttgaatatacaaagaatagatggccagcaagatgggttaatggttaaaggagcttgctgccaagcctggcaactagatcaatccctgggaaacccacatggtggaaggactttcacatgtgggccacggaacatgcatgtgcatacacacacacacacacacacacacacacacacacacacacacacatatatatatacacgtacacaaataaatagatgtaacaaattaaaaaaatgtatcatatatatctatttttttgagatagggtttcactatagcccaggctgttgttaaacttggtatgtagcccaggctggggtcaaactcttgacagttcttctaccttagcttctgagaatagggattgcagaaaccagatcctgtatactgctctgtttcttgcccagattcattttgaattctggtctcaggtgatcttcctgcctcaccacaggcacttgtcttcgtagacacaaaaacctgctcgtttttgttttttatttgctcatgcttttgatgtagcaaagaacccattgttgaatgaaaaacataagcagtcctaagttatttttcgaatatttattttactttatatgtatgtgtattttgtctgcatgcacatatatgtgcaccacaggcatgtttggtcggatggatcccctggaactggagttacagacagttgtgagctgcaatgtgggtgctgggaattgaacctgggtcttctagaggagtagctagtgctctaaaccactgagctacaaggagttttgattattctgcagttcataagtggaggttgtactctatgaaggagcaaaaggtcatatctttgtagagacaagaaaagatttgttttttgtagttagttggtggtctcattagtgtggcctctggcttcagacgatggtttactgtcaccctggcttgtttggtaggaatttaaagagtggccagagtcactcttattaatggcattgcaattagatgattttgtaaaatttattattagtttttgagacagggtctcactgtggctggccaggaattcactacatagaccaggctggcctcaaactcccagggagatccaagtgctgagtttaaagacatgtttcaccctatgcctggcacttaaaacaagttatccactttgaccagaactcggagcataattggaaccatgtgtcatgggcacgatgtctttgactccaatcatactgttaagatgttgaagtttttttttaaaaaaaaaaaatctcatttttggtgtgagcacattgtggatggctgtggagacacttttgagaccctagaaagaatgtagaatgctggagaatgagaggagtatcaggcagatgcccaggaatagagtttgtccttagctgaggattctaccaaccaaacttttatatacacacacacacagacacacagacacagacacacacacacacagacacacacacacacacagacacacacacacacacacacagatacacacagacacacacacagacacaattttttttttgagacagggtctctctgtatatcctgaaactcactatgtagaccaatctggcctccaatttacagagatccacctgcctctgctttcgagtgctgagattaaaggtgtgctgagccatgtctggctcaggataatatttctataggataaaaccctagcaaaggcaaatcattagaacaaacaaaatcagttgggagtccagaagggagttagccaagatttctggagttgagctctaagcatgtttcctggctcgcatcttgaacgcccgtatttctggcacagagatgcctggcctcccctggtggccagcatcgggggtagggttatcctctggaattacatcaatgtgtctctctccagcttcggagttttcaggaaccgagcaggtcttgttcttagtgattctaagttggaaatgtggggaaaaaaattcaaatggaggaaaatggaaaatcactatccagttaggtctacaggtaataaatagtagtaatagcattccaaaacagttagcaggcccacagtctcagaacagtgtactgcagtttttctctgaagcataattttcttctctgtagccacatcattctcttgaaccttagcctatttatacacatttagtaggaaaggcttagaacatagttaaattggtaggcaggggcccagctatgtagagctctgggttgtatcaccaggactgaataaggcagtcacagtagagcacacctataagcctcatgaaagtgaatttgaggccagcctggactacatgatactatcttccagcaacagcaataacaacacaaccactcctttagtaaggacatagttaacgacataggctcttcttaagtctgtttagctgaaatgcttgataaggggcctccgtttggactttatatcaagacaaacctccaactttctctgcagtcgttactctttttttttttttttaaggtctttcaaataccttcacgtttctggaggaaacctggcaggaagtgagattttactcacaacaaggcttgggacagctcttgcaggttgccatcctatgcagattctcaaagcacattctaaccaaagccttggtggtggaatcggtttttccaattgtactctattaaaaaacagaagtttcctacggaacttgtgcagacaattatattcccacgtaataaaaatatccacgatcagcttttccagtgctgaaggatcaggtggaggggggggtggggggaaggagtgaatatttcagttttaattttcaaaaagtaaccaataggccacagagagcctaaaggacaagggaagcatatttccttaaatctagaacattaaaatgagaagaaactcaaatacacatacaaccactcacctcatcttttttcttaaaaaaaaaagttattaaaacagttgagccaggcagtggtggctcacgcctttaatcccagcactcgggaggcagaggcaggcggatttctgagtttgaggccagcctggtctacagagtgagttccagggcagccagggctatacagagaaatcctgtctcgaaaaacaaaaaaacaaaaaacaaaaaaattgaaaaagatgggcaatggtggcgcatgcctttaatcccagcactcgggaggcagaggccagcatatctctgggagtacaaggttagcctggtctacagagctgttccaggacagccagggctacgcagattgaacggaaccaaaccgagccaaaccaaagcaaccaaccaaacacaaaaaagttaaaaaaaaaaaaaaagcatacactgaaattaactggactcagacacactgagataactcacctgttttccggtctgttattacttctttttctgcttgtttattattttgagacagagtcttattctgcatcctaaaaggcctgggttccccctctcctccaggctgggcttgcatttatgatgatctcttacctcatctttaagtgccaggactgcaggtgtgagcattatgccaggcccttgtcccaagtcttgttttgcttggacttggttagcagtctctccaaaccaccgggtatttctccttccacctctccctcttctctttttctctcctcttttcttcctcttctctctctcttcttccctctctctcattcgcttttcatttacccttctctcctcttcccgcccccaccccttctcagtgtttctatattgcccaggctggccctggactcctgggttcaccaagtcctctggactcagcctcggaactacttgtgagcatgcgccaccatccctggctttcccttcttcattacagtcctgaaaattcctgttcaagctaatggtatggtcggaaagttgctgggaacctggattccacagcacttgtctaagtgcaacactgtctttgaaggagagataatttttggctgcagcttgttgcacacacctttggaaaagactgagaagaataactgtatacttgacaagatggaaatcagccatggctgagatctgatgataaggtcagccgacaagcgactgcgttacttcttaccgattacaagattttatcacaaccagacttaacgaccaaaaagaggatatcaagacaggtcaaacttctaggagttctgtacaattttagaatgtttgagtcaggaaagtatgtgaaaatacagtttaaaatttggtacctggagggtgtatgcctatgttcctaggactgtggaggccaaggcaggatagtaacaagtttggggcccacctgggctatataggaatttcctgtccttaccccccaggctccaccccaaaaggaggtttagtattacatatgtaacactgttttcaaacaatttaatatatcaaacaagcttaattaatttagcatctcttactattacaggggtctttctggattgttccaaagttagtttaggataaatacaagtccgggagtcaggcacggtagatactccagggctttaactccagctcttgagaggcagaggctggcagatctctgtgagttcctagcctgccagggctacacagtgagactctgtctcaacaaacacacaaacaaacaaacagcccacaccaaaacccaaaccaaaccaaaaaacgaacaaaaaatcccaaaacaacaaacaaccccccaaaaaaccccacaccccaaaattacctactgtactctgaaatcagtcacataatttttcttttgtccttaggtctggctgaccagtagcatgggtgggaaacacactaggaatggctttccatagattgctagccttttcttatttataggttgcctgtgtgtggaccccatgggggcttgtggccatgactgtcatccttagggtgacatacccaggttccactggcatggtgagatgacacatgagctcaggttggaacctatgagaaaggcaaaaagtatttttacttagacgggaatacctctatttatttttgagctcaagaatgtgatccatctaacagtggttaaagagcagactgaaaagcttgattttgggatatggtgtaattctggatgtagaggtagagagataagagactaaaggaaacctgggctatgaagtaagacacacacacacacacacacacacacacacacaaactgcctattgtggtatgaagtgagacagacagacatacatacacacaaaacctgcccattgaagtgagacagacagacagacagacagacagacagacacacacacacacacacacgctgcccattgtggcttctaagctttctcattaagatttaccgtttccctagaaaacagcaggtcctgagatacagtcccaggtgctgggttgaaataatgtattatttcctatcttcctggaaatgtcctactgagatcttttcattaaaacccagttagattcccaaaggctccctacagaacccacgacagtttttatttcaacttcagaagtcagtatgactttaggagccacagtgagtcaaaacactgtcaagtaaaccaagagaatcgcacacaaaatgtcgagcgcaggaaggctctcactggctccaagaagctgctcttctactccgtctgaccagagaaatgtatgcatgtttacatcttatcgcattctgtaactcatgaataggggggcgaggatcactcagccaggaggagaagggagaaacacaacttgtagaagcaagctgagaaatacaatttcaattggttagaagttcgtgagtgttttctaactggtctcacttctagtttcagttcatggtgtacactagctgttgctttgttcaggtggaatttgaagtttgagggtcaccacattaatggcattcaaataacattttttttcttcccccttatcagtcaccagtcacttcgttttctttttaagtttcctgagttcagctttttatatttaggtcacggatcaattgtaacttaatttctgtatgttctgtgagttcatagtcagctttcaggcggccctttagttgtctggcggtatttgttggagaaagttttcttctttcgccggttattcgttgctggtgtatagaaacaagctgccttttgtacagaggtcttggaccaacattgctgtatttgcttattcgctttcgcggctttcttggtgggttactgggattttctattcataggatcattctgtctgcaagcacaaatgcatttacttctctctctctctctctctctctctctctctctctctctcttttctaatttggatacatttaatttcttttatcctccttcccttcccttcccttcccttcccttcccttcccttcccttccttcctttttttctttctttggggtgggggtctcactacaaagccttggctggcctcagactcctgagtgctgttattaaaagcatggccatcatgctcagccttatttggttttgcttaaacttctctatgtggaacagcggtaaggagagagcaggcatcccggtgccgctctttatgctaggaaagagcctttagtcttttcccatagatgtgatgttagctgttagttataaagaccccttaacatatcgagcatgtgtctttttctgttagcagtgtcctgatgttttatcactgaaggatgtgcgatgatagcagatgctttttctgtatcagcccacctaatgacgtgggtttttttctctctgttccactgatgcaccacgttggttgcttaagcctttagcttggtccttggaatgcggttatctagcttgggcatcagtaagacagaatcagccaggaattgttttcttctttcccgactctttggaagcatttgagaaggatgggtgttgattcccaagtgtctgtagtaataccatctgttatcactttccggtcgttggtaggaagattgtgatttctcagtttctttgcctgtttcaggtctgtttagatgtttctgtttcttcttgagtcagttttggtaatctgtggatgttaaaagaattcctacctacctagtttatctaatttggtggcaagtgattattcacagtgtcatcttgtattttatttctgaatggttggttagaataccctaaagccgcagttctcaacctgtgggtcacaactcctttgggggtgtcaaataatccattcacaggtgtcttctatcagcacatcagataattacattatgactcctgacagtagtgggattacagttaatgaggtagaaacagaaataattttgcagttgggggtcaccacaacacgaggaactatagaggccacagcattaggaagattgagaaccactgccctgaatcatttctgatttcagctttcattttttccatatcctttataaaaagtcagtctggctagaagtgtgttggcttctcggtttactttattttatttatgaatacaaagattttgcctgcaagtgtgtctgtgcatcatctgagtgccggctgccagcaagagccagagggcagcttcgggattccctggaactggagtcttggatggttgtaagttgtctgagctgtatcagctcaaatagtgatgttggcttctcctttttgttccactgatactttatgtccttaagacacaatcaacttttgtttccttcaatcagcttttgtttccttctttcctgtctctttggaagagtttgagatgtggtggtggaaatcgaacccaggtcttctgcaacagcaacaagtgctactaatgtttgagccatctccccctatacaccttttttttttcctagccagggttctctctctatgtaactaactgtcttaggattcactatgtagaccaggctggcctctaactcacagagatccaactgcctctgcgtccagtgctgggattaagggtgtgtgccaccatgctcagtgtgctgatgtttttgttactgttgagaaactattgttatgaagttctgcctggtcttgaacttgtagtgatctttccgcctatgccttgccagtgctgggattatggacatgggctagcatgcctggttctttctacttttctcttttcaatactgggactggaaccagacacttggggatgccagacaagctaccgctggtccctactttcttgctgctttttaaatgtaggtgcttgctgttaagtgaaatttcctaggtgtgttagtcagctctgcttgtcttgtctcctgtgacctcaaccatcttcttcttcgatcttctagtcattactggaaatgagtattgaaggttttgggtgttattgtggaactgtccatttctctctctctttttaagaaagatttatttatttattttatgtatgtgtgtacactgtcactatcttcagacacatcagaagagggcatcagatcccattacagatggtcgtgagtcaccatgtggttgctgggatttgaactcaggacctctggaagagcagtcagcgctcttaaccgctgagccatttctccggccccctatttcccttttgtaatcagtggtatttgtttagtaggttttgcttttatggtctttggtgtgtacatattaatgtttgttaatcttgatgaattactgtaacaaaagttagaaagatacattatacgtaagtatctatctatattgtgtatgtgtgtgtgtgtgcgtgtgcgtgtgtgtgtgtgtgcatgtctgtgtgcagatgtgttgtatgcctatataggcctgaggtcaatttccagtgttattccttggtagccatcctgaatcttgctgttgagacatggtttctcactggactggcttgctgattagattaggctggctggctggctagtgaatcctaatggtcttctagctctacctcctcggctctgggataagtgcaggcaatgatgttgactttgtgtgggtgctggggatggaactcacgtattcattcatgcatatcaagcactttactacatgagctatcgtcccaggcttactgtattttcttgtaaagtttacttagtctctactcagctcttttggttattatttacatgagttatcattattgttattattgttattattatgatgatgttaaatattctaactttagccaggcatagtgtcacatgtctttaattccagcacttgggaatcaaaagcagacagatcctttggttttgaggccagtctggtttacacagtaagttctaggacagccagagctacgtagtaagaccctgtctcaaaatacatcaagcaagcaaacaaaaatattacaactttcaatatatttatgactttggatctaaagtgattctcttctaaacaacgtatagttcaatatgttctatgtttttaaaataaagttttattggaacataggtgaacccatttgtttacatactatttgtggcaattttcacgctacggagatagagtctgagatatggccgtggagtctctttggttggcagagcctgaaatagttcctgcctggttctttttaggatgttttctggctccagtctagaatgcctttttttagtttccctggctatagtcaatagtatatagtctcacatagcagtagttggatgagacttgtcacatgtagcctgctttatcctgaagcctgtagaacgggaagttctgaccacagagctgggcatgccgaggccttcgctggctgagaagagaagcaaacgtcgatctgtaaagtcagggttggagggagcaggactgggatgtggccacccagtggtgaccacattaatgtggttaactgttctgatttcctgggattggggcacttcctagagcatgttttacattcatttattcgtatgtgtgtgtacatttatagatatgcaggtaagtgtacatgtgtattggagtcagaagtcaacctcgggtatttttcctcaggagttaccccaaattgattttggagacggggtctcttggtagggcttagggctgaccgattatgctaggcaggctggctggagagccctagggatctatctgcctctctccacatcgcctgcactggcatttcaagtgcatgccaacactcctggctttttatgtgggtgctgcagattgaattcaggtccctagtttttgcacacaaaacactttaatgactgcactatcttctaggccagtattttagttttaaaagatcagttgccccacacaaagaactgcaggcaactggggcatactgggagtgggagaaacatcttccccaaagaagaacacaataattggttatctaataccaaatggtcagccctgaaatcatccatacaagtaacattatatttacccagcagcttatgtccaggtacatacatatatgcacgtgataacaatgaaaatgagggcatgaatgtgaaagagcaaggaaaggaatatggattggtttggagggagggaaaagagaaaagatgtaattatttaaaaaaaatcaatgaatctcgagtcttactcctgcccctctactccagtaccattcagggaaacccccagctatgcaaagcgacggcgtctggctggcccgagtggcctggcatccccacggcccttacagcgctcagccagtgatatcaacctgaaaggtgatcagcccgcagcttctccagggcccactctccgaagcctccctcatcaactcttgctccagaggcttcaggaggagaaagaccgtgacagggatggtgaactggagaatgacatcagcggcccctcagcaggcaggggtggccacaacaagatcaggtaggagggcctggaaggaagggtcaggatgggtcgagagctatggcaagcctaagctggatagtagggaggaaggggagttcgtggcccctgtgcagtgataggctggggctaggggtggagtaagttccttgatggtttcactcatgctgatctctggaagatgctagggctcactctgaggataggggcagctgagagagttttgggtaaccaacttgtggttaggatgctcactacggcatgaaaactggtggcaaattggttggaaatatctgtgtaggctcaaagcccataggtgagagttatggctgtccgtcgtcccccacatatctgcccgagccctgtagagtaacagtactttaaacctctctcctgagttctggaatcttgagaaaccaggatatttgcagtatcgacctccttataatctaagagttggaagcaaagaacggagcctctttcactctgtaggcttaaggggtggtcactacgctggtttctctaccagtacagtgtagggtgtttcctttgagaagccccctagggtgcctgtgagggggtcttggaccctcctccagcactgcctatgttaaccactggttgtaccaaattcccagagtcttgaggttcgtagctctcattttttgcttcctgccgtttctccagagccaggtataaagaaggtgtttggaagcctgttggatacagtgttacataagcagcttgttgttttcacagtgtcggccagctctgatagccagccctacgggttgatgttcccactgggctgagcagcaaatgcatgccacttggttaactgctgtcgtttagtctgggctaaacgacactattatacaggctggtcccccagccccatgcccaggttgggtcagagagagtagacatcggcttgtgtgggtccaggggtttggtagaaggcctttgatgtagcatacactaggctgttctttctgcagcatccccttgcccgtgcagcctgatttccaggctgtagacttactggacccccagggttgtctgtctgcttgcaaaatcacatttctcctatgcaacttttgcacggccctttgggttttctaagaattgaacggggtggtggctggaagaatgcattcagggatgttgcggtttgccaggaggactgtgtgtgagtggaactgtgtggctgtcactgggtccctttcagttgtgtctgttgcagttggcacagaataatctcctctagtctaggctttccagttcacctttgggagggcagaattatttcttttccacatttattaggcgactggaatgccaggtgtgtgtgtgtgtgcgcgttcgcgtgtgcgtgcacggcacacgtgtgagttcaaggctcacctctggctccccacctctacctactccccatcacacagcaggggtcctgactggttctgaggaggtagccacctgggctcctggctgagaaacacttagatgagttgtgatacaggttaagggggcttacctggtgtgacagtggtctgccagccaggatgtggcagagtgtgttgggggtgctgagaaggaagagaccctcaggcagaggttgcctgttaaaataaaaacgaaaaaacaaaaacaaaaacaaaaaatccaggatgtattcatggaccctggtggggctgcagtggcttctattgcttcctgttggctgagcctggcatagagcccaggactatggtctgcaggttctggcccccagcaccagagtgaaacctacaaggggcaaatttgaagccgaggcagtaacttaatctctggccaaaagggcagtgtcacagttgtttaggtggtgggaacagtgtagcatatctctaagtctcaaagagcctggtcattggcagagcaggtgaatttggcctgtcggggtaccagggagcccaagcaggcttttgggtagaaaggaagaccaagacctcagactctgtatatacctaagcccgagaagtggtcaccatagattgacatggtggtagggacagctgtccaagaccacaggagtcaggcccagaggcaggagaattggggctcccagtgcatgttgctggtcagggtgtgaggaggccagaccactgcgccccgcctgcccttccctggtgcccaaagcctgggtgccagcccttctccagctcctacctgacagttctgcccgccgttccccagtgcgcccacctctgggccctcggtgtttctttccagccgcccgcgtggggtctgcggggggcaccgcggactcagggcgcgccggccgccgccgcccgcagagggaggagctggcggaggaggcggggcgcggagcggccgtggcatggagcgagcccggcgcgcccgggagcgcagccccgcggccccggagccctgagcgggcgcggctcgtgcgnnnnnnnnnnnnnnnnnnnnnnnnnnnnnnnnnnnnnnnnnnnnnnnnnnnnnnnnnnnnnnnnnnnnnnnnnnnnnnnnnnnnnnnnnnnnnnnnnnnnnnnnnnnnnnnnnnnnnnnnnnnnnnnnnnnnnnnnnnnnnnnnnnnnnnnnnnnnnnnnnnnnnnnnnnnnnnnnnnnnnnnnnnnnnnnnnnnnnnnnnnnnncgccccccgcgccgccgccccggggcccgaagcggaaactttacagtgccgtccccggccgcaagttcatcgctgtgaaggcgcacagcccgcagggcgagggcgagatcccgctgcaccgcggcgaggccgtgaagggtgaggggcgcgggcggggtgaggggcgcgagccgggttggggggcgggccccggggcacgcggcctatttcattgccatttgggggagggtctctgtggttggggtgtccctgggtcattccagcaagctgctgtgccggggtctcagtctctggccctggttttatgggctcctggcatgaagctctagcgctgtcatggtagaggcttggctcttttggggcggttcttgttacgatgggggccaacgacaactgggtccttgcgttggaaggaccctaacccgttccagagctcccacgccttgtggggttcctgtgtcacttctggggcttcttcactggcaatccttgggatccaggtgaggggggcttgtcatcttcgggggatctttaacagttgtctgtgtacagcacacatttcttccatggatggggaagacagctccccctcccatcatgaggctctctgccgtcattggggtcctaccttgggcactctgtcagtgaggtggaaatagttgtaaagaccagccctcctggtctataatgtggcttgctccactggctgccttgccatgaccctgagctctggacagtgactcttgggtggatgtcagttaccatggttggggggaacgtgatccctgtgggcaggaggaagagtatgtctggcctctgtttctgcctctgccctctcccagtgtgtccatctgtgtctgtctgtctcccacatgtccatcctttgctgaggccatctgttcagttctcttctgtgtggatcctagaatcttcccaggaagaatgctaggggggaatgctggcttgaaaagagagcagtggtcagggtcgtgggcaaaacctgagcctcaggtggcagggaagcaggtaccctgctgtcctctttttccctgacaacctgtctggcttctctccctagtgctcagcattggggagggcggtttctgggagggaaccgtgaagggccgaacaggctggttcccagctgactgtgtggaagaagtgcagatgcgacagtatgacacccggcatggtaagtgactccagtttttgctcagatacctcctaaagggcaggcacttcttctagtctccctatggtcttcttggtaacacatctggacatcccccctaagactgagaagcaaactcaataacactcaagatacattcagatttgcacatatccatggtgggcaagcatgcatgttcttaggaacaggggtatgtgaacctgacagtggagccacctttgccatgccagctggaggagtacactcatggtcatccctctgtgtgcgtgttggcacacgagtcttcggtgacagtgaccacccctctggtacattcctcacggaaataccaggttcgtggaactcccaattcatgagtggctggcacgtaaggaaggaaccagtgtgagaaaagaggcgtttttccaaagtggacagattgtccaagtaggcagagcaggaggcatgggccagctaagaggaaatgaggccagttgggccccaaggagtggctccggggtacctggggttggtatggtctgagggcagctgatgaaggatggctcctgttcttacagaaatgtgaggtgaaggttgcagctcctggggcccgctgaggaactgtggtccaatctagctgaatgcttggacttctaggaaggatccccttagatgctggtgaagggtcctctggggccctcagtgtgggctgctttcatgtctggggtgtactctttcattgcgccctcgggtattctgggaagccacaagatcgattatcttctttccagatcagagagtaggtaggacaaatgaactctggggtgattatcagtggtatgtctggatcagggtacgagtgtccctttctctgtacatagaaggtttgggccctgggtcgtggtaacctctgtcaacctcgactttaagttggcagctttccaggggagcctacaatcatgtggccatgcgtcaaacttgatggatgcctaggttatacaggaactcagttactgacttactgctggctaggttccttgctttcttttcctttctttctctctctctctttcttctcttttcttttttttttttttttataaataaatctggaatgcattctttcagttctactttctttttttttaaaagattttatttattatatatgtaagtacactgtagttgtcttcagacactccagaagagggcgtcagatctcattacggatggttgtgagccaccatgtggttgctgggaattgaactcaggaccttcagaagagcagttagtgctcttaacctctgagccatctctccagccccttctcttttctttttaaagatttattatatgtaggtacactgtagctgtcttcagacacaccagaagagggcatctgatctcattacagatggttgtgagtcaccatgcagttgctgggatttgaactcaggacctccggaagagtggtcagtgctcttagccgctgagccatctctccagcccgtgccttgctttctcacgtggcttatccttttcctgccttgatggctttactggggacttggagaatagaaggggatcgttgcactcacttgctggatgtggcctccgggtgggaatgatttcataggcccgtggcccagttccaacaggaccgagtaaagagcaaggagaaggggctacacacctgttgaataggagctagttgtatgcttttcctacggatggcggtacggttttgagaactgtggatccaggatcgtttggccgtcattctgaaacctaggaaggagagaggtctgcgttggagtcagaatccaagaggagcagatgttggtcagttttgcttcaagccggaccttgtgctggctgtcagtggttatggcaagtgtaccccgtcccgggtgcacaggccactgggagggggcgggatccagttacccctggatgcacaggacaccgagaccgaagatccggggttagcctgaggaagccaaaaaaagataaaaaaagaaaaaaaaagaggctcaaagcaaaggtgttgtttcacttgaattccccgggtagtttacagatgggttcctcatatttgtggagatccagcaccgcattctagaactatgcccgttgccaacttctgtatttgagcagcgccagacatgagttttagcatttttctatgaatggagctgtggacctatcctagcaatcctgggaggtggggtgccagcgtttagtatgtttctgggatgtcactacccacagggggcggggatgtttgttctttgttttgctgcataagcagttagctttgtgaggaatggcacggctggaggggggagcatgagtcttagtcgcctggtccttgggggtcaaggtaaagaacgagatcttgtagtaggagctgaccgagcagatattttagggccaagatgaagaagatctgggcagggcagagtggtgaggacaatgtgtcaaggtcaacaggagaggaccacagagcagctggtgtgggggtgatggagctgcaggctttctagcaaccacgggacctcttaacagggccatagctatcatagataacctgagggagtggggttcaaaagcacctaggtgattgagagctacgtgtatgaccatatggtgagggccctgctgggactgcctttggggagggtataggagctataatggcttccctctgaccccagctacaatacccatcctgctgctctgggcagaacttcttgtctgggacttaggctgagttgtgccagattgcagagggcatcctagcaacaggaacttgtttccaacagtcctccccccacccccagccctccagactctgattcaggaaccagagtgggaatgaaggaggactatgaaagaccaaggatagaagccgtgctggggtagaggttaggtcagtgtctcctaggacccaggtcctggtctttacctgagcaaagagtctggcctccagcagcgctctagcaggaattgaggaatgcagctagtgcacacatctcaaggcctgacataacctcccatcctgtttgccttcctctttccactcggagagaatgttccatttgggagccagtgctgggcacattcctttcagctggctttcctgtgtgtgattaataaaacgagcacacgaatctgtgttatataataaatagtttgtctggttgataacaatttaaaaaaaaaaagaaaacaagatgctttgaaataggacctgaccagggcgaggctgcttaactctgcatagctcctagggttaagatctggggagggcagggcagagaggtgagttgggatgagctaaggccatgctagtgtgagagcggtggaaccggaggcttcctgtccaccgctgggttcccaggcctggatcagctagcgtagtgtatctgtgaccgggtcagcctgaagaaggatgtgcgtggggtaaggagggattgaggagggccgcacacgtgctggcgaggcttcatctgcactggtctcgggactgggtggcaggtgtacatttgtctcttagagtgggacagacgggaaggggtaagcaagcgagtcgatggggcccgaacgaggctgttagaacctcgtcaaacaggctactagagccctgtggcctcccgacgtgacggttcctactgtggagagagagaggttcagatgtgactgatgggttaacttatcgagagtctcgcacaaagcaagagggacctgaagtctggactgggacttttcttgatagccgtgtcatctgatgggaaggtgctctaaccattgctccaccctgtctcttccacctgccttttaactcacctgctcctccttctgtccacctacttatccagcagcccacccagcttcccttttccactcatagatcccatccatccatccacccgtccatccatccatccatccatccgtccatccacccgtccatccatccgtccatctatcccctcatggacctgtatatccttcggctcatccgatattccctcaaaccttcagcatcccgcccattcatctatgcatttacttttttgggttatgttccttctcttcctacattcatccgtttgcccacgcatcccccatgcacacactcacctagccagttgtgtgccttctgttacgtaccagatgctctgctgggcactgggaccacaggagtcatgacatctggtctttcgctttcaaggatctcgtcgttgctgagaagacaggccataaaagagctgtatctttctgctgggtatggtggcctcgtgcctgtaagcctagcgttcagaacactgagacagataatcctaaactcaaggctcagactgtatgcagtgatacttttctcaaaacaaaacaaaacaaaacacaaaaaaaaaccccccaaaactgggggtggtggtggtgaataaaatatggagtgtaaaataaataaataaattttaaaaaaggaaaaataaaaataaaaaacaaaaacaaaaacaaaaaaacaaaacccaaaaaaagccccaaaccaaaaaacaattcaaagtcgtgacgggtactgtaggactctggtacccagcacccacctgaatctctatgactcccactccaggggattcagctcccccatcaggcctgtgaatgcactgggcatacacgtggtacacatatatacgtgtagggaaacacaggaagtaaaaaccaaaatcttttaaaaactcaaaacagtacggaacccaacttaaaaaaaaaaatcacaggttcctcctgttgtctgtctgtctgtctgtctgtctgtctgtctgtctctcttttaaatccccgtgcctccctctcctcttgctggcagactccacacagttcctgcctgctccagattaatgcctttgctgtggtctttgccttgcctgcctcacccccagaagccctgcaccctcacatctacaggcggctcccctgacggtcggggtctctgctcagctcttctttctgatgaggctgttgctatccctagactcgtcccccttttcctgcttgcttttctcctgttagctggcgttttgtattcattgcttgttgattccatgtctcagaatggcttattaaccccttaaaggcggagactttgctctgttctaaaataaacagtgcctggtcggtaaatgactgttgaagtaaaaagtaagaagggctatgctatggcaagagagggtgaaggaggggagagatgctgaggaatgaaattgaaaactgtggtggcgccatcttgaggccatctgtggtactgcaagtgctgctagaggagccattctgaagcttcaagggtctagttgtagatttgaaccttcttcaggaaatctacaaggctaagtgagattcagcaagaggtatgtcctggccaggtccacagtgttcacgaaggactttgagatcaaaggacagatatgtatatagtcctgtggaatacagtcagggcaggggactgaacactttataatcctttttcttctttccttgaatttgtgctgttgtgaggaaatcggtggacaccttgggatgcttccttcctggtgcacacataggctggtagcacagcacacacatgtgtgtgagctcaacccctgtgcacacaaacacatgtttgttactagatcctgagctcatggacggagagcagccatggctctcgtttgacacacataagcaccaacccagcatttatacctgactgtgaagcacacattcatgtactctcatctctgaggcttgcagacgggaccatgctggccttgtatggtgtctagatgcatgctaagtaaggagagatgagcaccattggtttccccttggctctaactcccagaggccagaattctatgtatggttatctgagctctactcccttaggactttaggcccctgggtcttaggatttgcccccacccccatccccactcacatcgaggcccagagagtgtgggggcagagactgatcagcgcagttgggggaaattcagctaggtggagggtcacgactgtttcttagcctttgatgctccccgcagaaaccagagaggaccggacgaagcgtctcttccgccactacactgtgggttcctatgacagcctcacttcacacaggtactggcaggggtgtggacacgcagggacagtagcagggcctagggtgtccagtgaaagggggaagtcagggtatggggagtgggtggctagcttcctctgcctttgtcattctgtgtggtctggtgtgtatgggaccctgtgggttcagcctgactgccaggctccctgcagacctcccagctcaaccttgctttcctttgccagcgattatgtcatcgatgataaggtggctatcctgcagaaaagggaccatgaggggtttggctttgttctccggggagccaaaggtaaagggtgtgaatttggggggtatcgcattgctgtcaatgtcttctgtggcctgcctctgccccttttccccttttaaagccctctgcttcccccccaccccccgtggttatatgtcttggtttggaacatactggggtacaagacagtggatccctctccttttagcctttcatttccttgtggggatctctgctcctggtgaaacagagatctttttgctgagggtaaatgtggaagttcacagagggatgtacagtcatttggatatccctacctgctgcctctcccaccccattgctatgccttagtagtcaggtggcttcttggggctccccgacatgatctatgcttgtgaatgccttttatcttgctctccctgcagcagagacccccattgaggagtttacacccacacctgccttccctgcactccaataccttgagtctgtagatgtggaaggtgtggcctggagggctggacttcgaactggggacttcctcattgaggtgaggcccgtcccgaccctgtccagcaggagggggcgagagcactactaactgccacctgaagaggggacagctggcctctgactacctagctgcttgtctatcccaggtgaacggagtgaatgtcgtgaaggttggacacaagcaagtggtgggtctcatccgtcagggtggcaaccgcctggtcatgaaggttgtgtctgtgaccaggaaacccgaggaggatggtgctcggcgcagaggtgagggttctgatggctgggctttcagacctttgacttcaagcccacattcctcttccatttctgatcctacacagctgacatcacattgctgcctgagatgagataaaatgcccttatttgctgcacaggtccttggtgttagatgcctgacctctgaccaggcctctgatccctgatcctagattacccctcctcagttccctctccccttctcctgtgaatccccccagccctggtgtggcagagccctcctttccgacgccagcagctgcctggaggccgggttgtcatggcaaccgtgaggttgacgctgctgctgctgctgcttattgtgcagggaagggggaggcggcacctgagggaagaggaaaagcgtcttctccccgcgccgacgccaaagacgcggcaccgcctgggcctaagaggctttgccgccggcccagcccaggtgtgccgcctgccgggccacactttggtcttacaaagagcagtggtacctgggtctgggtgctttaggcggcaggaggtagcctggcaggagatctacccagcccccatgggtggtgcccactcactggggccttggagcccgcagggtggatcctcagagcagaaccagccagcatcctagcctttgctggtgcttttattaccatttgaggccttggtcctgggagtctgaagagccctaggggcacaactgccctggctccactgctccctgagtgcctcacgccatgaagaagtttgcatctagccgcagcctgaacaagatcttggcacagtgtgactcctcttccagagagtacgaggaggtccaggcagtggagcgcaagtggcatttgcacctggccactccgcgccgcctgctgctggaccggagggccaaggcctccctcttctttgcagccccaccacccccaaagagggctcccagcaccacgctgaccctgcggtccaagtccatgacggctgagctcgaggaacttggtgagcatttcgggtgggtggacagtgggtgagtggccaaagtgggggtggctgcaggtagcatgggagggcggtgggactgaactgggggctcagacagaaggtagaaaagatgggtttggagacagatcggcagttaggggtgggactggagtgatggggaaaagtgggtaccttgggtgaggagtgtgacagcaagggaggagatgaggactcggcagcatgaggagccggagttggtcagggacaagggggacagatggctggggaacaaggtctggccctgtagcatgcccgcatgcatgcacatgcatgtgtgtgtgagagctgtcctcggttctgtgcttttccactaagacttcgcattttgatttagctggcagagagcagtggtagagcaacctagagtctgcttctggatctgcctggcacgagccgggtcacctttgtgcttatttttctcggttggtacctgctcacttatctgccgagtgagtctactgacctagtagaggtatctgtgagcacccctaacacggtgagggggtggggcctcgtgaactgcaggaggtggacaaaaacgtatgttagtctttaatgggtaccccatcctgacctagggcggctgccagcttttattatggccatatgcataacacatatctcgtatgcatgcgcacatgtaggacagtttccagccttgttataggcatgtctcatgtacatgactatgatgctttgacatgtatagaagtgtccagcctcatcatgggacgtgtcccatgtacatgagccgcgcatcttgacaaatatatgagctaccagccttgtcgtgggcacacgtcccatatgcgtgacatattttgacacgtatgccagttaaccttgtcatgggcatgtctcatattcacagccatgtcctgatatgtgacatttgccagcctcgtcataggtatgtcctacatgcatgatcacatcttgacacataggactgttattagtctcatcacaggcatgtgcagatatatgtgattttattgtcattgtgggcatgtgctaatgtgtttgactgttaagagccttattgtgggtgcatcgtaactgtcaacagtcccgtggtgggtatattccaatatgtgtgacagattgaaacactctttgcttttgtggtttgagcctagtcaaattcccagactgtcttctggcttttgtcctaaaaggaaacccgtatcctggctctcaggactatccctgtcttttgcttatggactcagtgttgaccgtgtcctgaccataggctgagttgctacattccaggcaattgccttgactgaagtttggtttggtttggaaaacagttaccaagataaaaggggctgacgtgagcaggattttctacgataaacctccgaataaaatagaaattacggatagtgtagaggaggaggaatcctgtggtttcagaaataaagcaggaaaccaaagccaaagggataggaaccaggtacttccagttcctgatggcggctctcaagggcggtgctgtggtctgaagcccctgtgaggcttgaagaggtgctatggacttggaaaagccagaagcaaccatagaatctgggattagcataaaaaaaggaggggccggggtgatgggtcaacactcaagagcgcttgttgctcttgaagaggacccaggtttggttcccagcacccacatagtgggtctccaccatccaacccttctcacctctgaggcaccaggcatgaacatggttacgcacacatacatgcagacagaaacactcaaaataatctaaaaaaaaatttttttttgaaaaggactggagataaagagcatgagggtaaagtaaaaggtttcagttatataaaggcaggaaacgtcacagaattagtgaaattagcaggatagtgcgaacaacagcagcaaggaagtttgcgatggtccttaacttattgaaacaaacaaacaaacaaacaaacaaacaagaaagctgcacacagaagagtctgtggcttggagacacagaatccaggacttactaaaaaaaaaaaaaaagcaaagccatagcagtgagcgaggagatcaggctgagaccacccagaatcagcttaggaagctgatgagatggccatgaaggaccagttaggggacctgaggacaaacacggagacctcagcatctacttgataggaattccagaggaaatgaatagaaaggctaagaatctcccaaaagcaaacagatattatgagactcctttctgaagaagtatgtcacaaataaattatgatctgtcagggcagaaatttaaaatgccaccaacaagcagaaagatgtttaaaaataccagcgccggtagagggagtcagcggctcagagtgagcgatgatggtttgactttaggcttcttcagcagtgatagagacagaagacgattaaagttatcctagccaaactggctgactagagagagcagagacacccacagacttcaggctctagggtctaatctaacccaggtcagtcttagagatcagacctatggcatagatggataaaccaatatggtacacagctcggtttgactggaccttggtgcacagtcctggagtcttgctagaagctgttctaataccaggtcagaagggctcttcttacttcctactaagaggtgttatccatcctgaactctgaactccaggaccctagaggcttgctgtgggaatggaagagctctgtcgggccgggctatggcttttgcctgtagaaatgggagcagaggagttgaatcttttcctctgctccagaactacaactgtagttgtaactacagttacagatcttgctggcccagaggtatcatggtatttctgagtagaggctagaaggggtctgggaacagctcagctggagcctctgcctatacttctgcgcccaggatcatagctattgaaactgaaccaaggttctaaatgggcctgtatttagagaaaagctaccccgacacaaagacaactatcttgggaggggacctggtccttctgggaatgtctgattggagaaaggcagaccagcatagcattctccaaatcgctgagcatcccacaatccactgtcttgttctttttcgttcgtttgtttgagacagggtgattccgtagtctaggcagctcttgaactgcctgtatttttttgagttctaggattgcaggcatgctctatcattcctggatttgtttgtgtttttgaaaggtagaaataagacatattgagtcactactgttataaacatgcctatcctgccagtcactggcagtctctttaggagccatgtttgtcaaagaggtaacctgagcacttgggcagaagaagccagtgtgtggtgagggggaagtgggtgcaggggttgaggttcatgctgtggagaggaggaggcagggcaaggtaggaggaagaagagagttgagttcctcagaactaatggagtgagcagaggctggtccaaattaaattaattaattaagtaaaatggaagcggtggcgtctggcacaaatcattgggaacactctgtggtgtggcacatacttattgctcaggaggttgaggcaggaggattgctgtgagttccaggcctgtctggattacagagtgtgagttcaaggtcaatttgggttccacatctcatattaagaagggttgttcataagaggtggggggagagggtggggaagaagcacagagcaccctgtctccattcttcttgtctggggctcccttaccaaatatgcctatggtcagcttgagtcagggacatgggttagcagggacccacatcagggacctagtgtgggcaagctgtccctgttcatttatttaggtgaaattaagacttccctcaattcctgggtcttttcttttgtgataagaggttggcctaggtccctgccactgccttggtctggagaagatttctttaccaaatatggaccctgcttgccgttacacacctgctttgggatatggaggtgtgtatccttagggcggcccttgcccagcctgttcaaaggccctgggttccatctgcagtaccgcaaaaacaaaacccaatccccccccaaaaatcccagtgcggagtgttcaaaggtgaccaccttggtgaatagtggacttgaacctttgtttttgtagttctatctttgttctgaacagacatctggctgcttcaagtacagtttaattgtgcacatctccgtgtgtgcatgtgtgcacatgtgtgtgtgtgcatgcttgtgagtattcgtgtgtacacggcgtgtcttcctgcttttgcttgttctcctctagaggtttagcgcatccgtaggctttgttctgctggtctcagaaggacgtacagatggggacaggtctgcaggacctggttgttggggaggtggggaaatggggaacaggatccagacatcattgtgcagcatggcccaggggccgtgccacgatcttcctctaaactccctttgctctgtttctcaattctcagcttccattcggagaagaaaagggggtaagtctgctgctgtgattctaggcctggcttgcctgtcccgaccgaggggtgctggtgtgtgatgaatccaagtcagagtggtctggagtctggcatacttatctcgctccagcttggggatctggtagagacatggtaaagaagttcccagggccatccccaagagttatagggagcacaaccatagtccttgtgggtttaggtgagctgggggtgtaacctccgaagatagtgtggtggggagaaagacccagagctggggaggggatggcctctgggggtcaggccgtggagtttggaggagtgaggtgcttgggctgtgttgggatgggagtgacagggtgttcaactctgctctgtgctgtatcttttatctcctccttgccctaagccagtttcctgctggtgagttgtagcccagagcaaagctgctttgggtaggagtttgaatctggtggctctggaaaaggagctaaactctcccgctccgaacccccaccccacccctgggctgttaagttcaccatctcttcttcagggtccacccctgtgtcctctgaggccctttgtcatatggtttgtgtgtccagcatggctgcagggaacacagtgtctgtgtggggtcagagacaccagggctgggactgggtactgaggtccagcatctggggaagtcttacctggcttctgatgtcacctctgcctcttgagtggatgtgagtcaggctcagatatacccaaagcctaggctgtgtggttttgtgcatccagcatccctctccctctccctcttacttctgatgtcctggactctgcctgggtagagggaccagctctggctcatgatgggcatgtgaccagtaggctcccctctaatctcttcttgttaagatcggtatcctaactctgtgacagtcgggctcccaggatgctaggctatagtcatgcacttcttccagatgtgggagaaatggctgatttgtcacttccatggacccttcttttcatccctgcttgggttcccaacacactctgccctgcacccaagatgaagtgggcacggaaggctgatgggaatgcccacacttggttcctaaaggattttatttaatttttaaatatctaaaatcatttaggattatttttttctaattctgtagtggatttatgttggggaaaaaagttcaacttttcatatgtaatttcagtttttctagtttttaaattcttcctcttggaagtaattctgtcttggccacagcattattgcaccagaaccctaaacggttgctttgttagacgttgtgtgtaaactgctcggatctcttggatctgttaggtttcttagagacacacagtctcttaagtccacggctcaggtgactgtgccttggtaggaaatatcactgtgtcatgaactgccctttctccttctgtctttacttctgtggtttctggactggatggtagtaagggtctgtgatctggggtgatgctctgttggcgacatttcgtgcgtgggaaacaggagagcaacgatagggtattgaggtggtgacagcagtagccatggaaaacttggcacatactgcacagcaccaaggacttggccagggtggtggtttcacctgttcaaaaggaagttaatcatttcattgcaaagacaaatgagaagaccttttgcgtctgtctctgcattgttacctggtggtactgaaagccatgcttggaccctaccaatttctctacagtgggaacttgttttgctggctaagtcctatattgttcagtcctccagtagggtagagcattctctttctgaggaacccatgaatcattggtgaagataagctaaatgtcctggctgtgtcctcagcatctgcagtggccagtgtggtctgcattggccagtgtggtctgcattggccagtgtgggctgcattggccagtgtggtctgcattggccagtgtggtctgcattggccagtgtgggctgcattggccagtgtgggctgcattggccagtgtgggctgcattggctagcatggctgtgggcttctttgtgctaatttcccctagacctatatggcatagacactgctcgtgactattttactagatgaaggcactggttctcaggggtatacatctaaacagagtcagtgtacaaggtgcgagtctcaatacgctatacaataagagagcctcaggagtgagttcacttctacacaacaactgttcggttagagacagtaggtgctggtgagcagctgcggtttgggtttgaaaagagtaagagatgtcctggctgaccatagacgttcttcagcagtggttcttggagaatggaagggtgtttaggacaaatgtcccccaatggtagacacagccttcaagaattggatatggtctggggacgggtggagcctgaggcttctgagggagaggaagaggaaggcactgcccaacctatagagcacgccggtgccctgaccccaagtgtactctgagcaagagttatagaaccatatctcagacagccttcagacgctttaaaggtctctgaaaccctttcccctgctgaaatgggtttcccttgtagttcagtctgatctcaaacatgtcgtctggcctcagcctctcaaagactgggattgcaggatttcctttccttctgccatgagaaaacacagtgaaattacatgctcaaggcaggaagagcttacttatatttggctctcagtttgaaggcttttccatctctaaatcaggaagaagagggtggtcaacattcggtgttttgtttgttcggtttttttttttttttttttttgagcagttgtgaaggaatgagagctaaggaaacggcgctgctggagtttggggtgggccttcccatatcaatcaccatcatcttgagaatccctcacaggtgtgtctggaggctggtctcctaggtgactgaattctatgtcaagtcgaccacagtaactgtcatacaaggtgtgctgccacactgaactctgtacatttttttgataagccaaagtagcatttttcttcctctcttttgaggagagtgtgtggtgtacctatgtgcacgcatgtgcgtgcacctgtacaggcacgtgtgtaggccagaggtctgcctgctgagtgtcttcctcagtcattcattctccatcttaccctttgagacaggctctttcacatccacagcttgccatgtgaactagactgtctggccagggagtccctaggatctgtctgttacagacatatactaccacgctcagctttttaaaaaagatttatttatttattatatgtaagtacactgtagctgtcttcagacacagcagaagagggcatcagatttcattacggatggttgtgagccaccatgtggttgctgggatttgaactcaggacctttagaagaacagtcagtgctcttaaccactgagccatctcgccagctccgctcagctttttatgtgggtgttgggagtctgaactccggacttcatgattgcgcagtaggtactttactcacagagccaccgccacagcccccagagtcccattttaaaaccagtaactttaataaaaaagtaaacccgactccacaaaggtttttattttatagcggatgtgacaagaatatgcccgaggccgcctggctcctctcagccaagcccttcttaggcatcagccttaaatagctctgaagtctgaggagtttgagtaagcttttggagaggagagtcctttccacactttccatacctcccattccatcggagctgcctttctgcatgggtaagaaggaaggaaggaaggaaggaaggaaggaaggaaggaaggaaggaaggaggaactgtagcttcttggatctgagtaccgaggccattttagatctccagcctgagttttttttttttccttaggaaatagctcccctctgccaggccagctcttggttattatcttatttacccactcagaatatcttgcttgaatgttagtgtctgtccctgtggcggtggtcctactagaaggagcttaccatggcagagtggtggaggatagaccatgtgctgagagaaggcactgggtgagatgagaccaaggggaattgatctaagtggtctgccgccagtctgatatccctgtggttatctctgtggtcactgcaggtgacttgcagtgtgtctggaggttggtctcctaggtggttgaattctttttttttttttaaattaaaatattgacgtaccttattttttaattttttaaaaaaagatttattcatttgttttatgtatacgagtaacctgtagctgtacaggtggttgtaagccaccatgtagttgctgggacttgaactcacaaccttctgaagagcagtcagtgctcttaaccgctgagccatctctccagcccggtgattgaattctatgtcaagttgataacagtaaccatcagacatggtgtgatgccacactgaactctgtacatcttttttttttttttttttttttgataagcaaaagtatcccctctccccacccccagcttttggtttttagagacagggtttctctgtatagatagccctggctgtcctggaactcactctgtagaccaggctggactcgaactcagaaatcctcctgtctcacaagtgctaggattaaagatgtgtgccaccactgcccagctctctctctctctctctctctctctctctctctctctctctctctctctctctttctctctctctctctctctctctccggggagtgtgtggcgtgtgtaagtatgtgacttgcagtgaccactgaggtacccagggtcttcttaaggagagagtttggctggtgaaggaactggaacctggggtctgcagagtacagatggtgtcagatctaggtctcaggcagtgagaggcctaggggtggtgggtagggctcattggctcctgttagtgctacgatgcccgcgtaggtgggtgtggcagtcctgcggctgaggcggcatctctttggttgtgcagagaagttggatgagatcctggcagttgccgcggagccgacactgaggccggacattgcagatgctgactcgagggcggccactgtcaagcagcggcccaccagccggaggatcacccctgctgagatcagcgtaagccagccttgggccagggctctgggatggtcaggtccgggcctggggatcagagggtcatgcgcctctcttctgaggtaagagttctttatctggatcccttctccagaggaggtggaactctcatggcctctctgggagacatttgggaccacgttagcctgtagggtggccgtagttgagttcgcttctgtggttgtagcttttaatgcttctgaccttagtcagagtctgtgttactctggctaacacagaggagggtccacagctttgccgagcctatggaacagcatgtccctattcagatggcatctgtatcccacctggcacccttggattcgttctccctctctgctcagactatgcccagggtctgaactttctatcgtgtgttcatttcactacccataacgctgcagaccccaaatgaacatgggcaccggtgcctttggggtgtctggtgtatggggtgtctggtctagcctagaatgggtggggctggatggaaaactgggtgctccagtgccctggaacttccatgttcctccctgaccccacagtcattgtttgagcgccagggcctcccaggcccagagaagctgccgggctctctgcggaaggggattccacggaccaaatctgtaggtacggctgggctgagggactgcttggggttagggatggctgggttggggtgggtagattcagggttggaggaccccatctctctctgcaaaagttcaaggatgccactttgtttatggatctgagtttgctcttccacccagagatgggccgtgggaagacacctttggaattcttttcccgtctgcctctccccatccccggccacccttttagtccttcttctcttcctctctgtcatttctgccatgcacgggtgacagctgttaccagcacggccttctcctgtcctgtcagccagagcacaggtccagtttcccaacctaaaattaactcttttccttgagccatctctccaggtagcatcctctccaggtcccttagtggtcggacccaaaaggtcacccgtaattgctctctctcgtctccatatgcttatgaatttgaagcagctgggtctctccgaagccagattgaagctgctcccactagggtcagcagtagcctcggggcatcccccctggctggcaccatccgctttccttccactgaccttggttgacatttgtggctttgttccctcctctgcgaaactcctaggattgtgggaatgagtttcttgctctcccctcctttctcactgcatttgttcagcatatccaaagagtaggtcaactcaaggctgtgtcctcgggctcccttccttctgtctatccttctgtctatccatctgtggagcttccttagtccctgcccgccatcacactccacacctggccgtgtcttctcctaatcccaggccagggtccttaacaagccctgctgtctgcacgtttctcaggtatctagtctccttgacccacacatccgtccacacctgttcttataccccttgccacactcaccgtctgtgccacatcagcgtaaactcctgttcaggccaattacaggctagacatgagctgcttatatgcacgctggctcatttaatacctacggcaaccatgtgggggtgggaaatcatttattttaaaggggagttaaaaatggcttgccccaaagtcacatagcttccctgcctatacctcattaagaatggatacatgcttaagccaaacagctatccgagtgtgcctgttgcccattctgggactcctgcttactataagctggccctaggctggatctgggtctcagttggaaggtgacatgtctagagttatgtcagtccaacagtttataatgtgggtgtcaaggtacacatataaatggagagtgactgcggagatgcagacacacagaaacagcatttatacttagaataacagggcgagcagacctttcctggggattctggggcaaacgtgtgatagaggccagtgtgtaaaaagcacaggcgtctagatggtagagtccttcgtgggctggcagtgattcttccgtaagtggctgggtggagaagggcagctggtgaagactgcagttcctctggtgccgagagacactgctttatgctcttccaagcatcctgggcgtcctccatggtttctttatttcttgccttacaagtcttacagcaggcttgtcttgtacctcgtccacagcttggtcttccccgtgtcctcttgccacggatctgttctctagcccgtttctctggcaaaggaagctttctgcagtatatttataacctgatatccctccagccagtctcgggtgggctcctgtggtctcaggtccccagagcaacagccctgtcctgcttcatctgggttatccgcttctgcctttctgtggcatgagtctttccttgttccttgtttgcctatctgccctctctcttcctggatggtctttcccagagctgactactgtagatccagacctatgggcttgttgtataagcctcaagcaagcccaccagttcctcccactgaaatatagctcatcagcgggctagcaggtgctcaactctagttccccatggctggagcactgccgtgtgccggcaagagcattggccgagtaggctccgtggactcccaccccaggttctggctgcacgtccctgggcacgtaatacaactgttgggatcccaggactatagtctgcaaatatggatatagccagtaaggacagctcaagcttaaaccttgttgcagtagttgcagcagcccctccttccaggctgtgtctggagtatacagtcagcacccaggaaacgaccctgttgtggactggcaggtagagagcacctttctttagtctggtgtcagcacagaccgctattccgtgcgaggcaggtgacttttttttttatcctcaggcacaacctaccatgccattggtattaaattccaccccctctctcactgtcacgcttcatgcctgtcttctgtaaccttgaggtctctgcgagctcttcctacatagcttcacctagcacacagacctgtgagtgctcagtacgtgtccctgtgctgtgtaggaatgacatcaggaggcagaccttagaacactggtgatgacctcagccatctttcgtggcgttgctacctgcggccttgagttgtcaactgtaaatagccctgtgatgggggcacataaggtcctgtgatgaaactgactcctaaaggcgacttgcatgaagctgggattcaagctcaagtttgcaacatacctagccttgttagtcctgaggcgacagagccagaggcgtaacgagtctccaccacgcctgccttctactcattaggatgggccacttggctttttcaagcctcgcagtgtaggactctgcacccgtgtctgcatcctgtctgaaaagacacagggaggttctgtagggaactagtgacatctctagacaagaggatgggtttccttttcagggaagtgtagctaatgagaacatgcttatatcctggcctggggttacattagagagtagggatggacctggaacatgccagttttgttacccatccattcttccttccatcttccggcccaggctctctaacttgtagcctctgcctagggtaccaacttactagtttcctgcaggcccattcccgaaagtctctccaaggaaccaatgaggctgctttcccagcccctaccctggttggctgttggtgtcagttcttgcagatgcacgggtgcactctcctgtgtcccctcattgatgttgatgttttccttttgatatgtggagggggggtcctcctttctgaccacctttcttcccgtctctggttaccatccaggtttccgatgactctggcttgtccaacactttgtttctgagttgcttcgcttatccttgatggggaacctcctgagcagcccgtaggtcctctctgacagttttagggggctgcctgtactcttctggtgtcttctcatggcctgctccgtgcccacaggggttggagagagatcttggcttcagttcaggcagtcagagtttgggtcctgttccagatcctctgtaggagtgggcctctacactgtgggtggggtccctcctaaaccctccatcagagctctccctacctgcaacaggacatggcatggagtgtgggtgtcctgctcagagctcttgctgtttccctttcgcctttccttggtggggctgtggccattatggggtggaggataggactagccagtggcgctgggtccagagaagccattcaatggccagcatccttgccagacttacctggctcctccgtctccaggggaggatgagaagctggcatccctactggaagggcgcttcccacgcagcacgtcaatgcaggacacagtgcgtgaaggtcgaggcattccacccccgnnnnnnnnnnnnnnnnnnnnccaacccccacccgcgccctactacttcgactccggggccaccccccccaccttctcaccgccgccaccaccgggccgggcctatgacactgtgcgctccagcttcaaaccaggcctggaggctcgtctgggtgcgggggccgccggcctgtatgatccgagcacgcctctgggcccgctgccctaccctgagcgtcagaagcgtgcgcgctccatgatcatactgcaggactctgcgccagaagtgggtgatgtcccccggcctgcgcctgccgccacaccgcctgagcgccccaagcgccggcctcggccgtcaggccctgatagtccctatgccaacctgggcgccttcagtgccagcctcttcgctccgtcgaaaccacagcgccgcaagagcccgctggtgaagcagcttcaggtggaggacgctcaggagcgcgcggccctggccgtgggtagcccgggaccagtgggcggaagctttgcacgagaaccctctccgacgcaccgcgggccccggccaggcagccttgactacagctctggagaaggcctaggccttaccttcggcggccctagccctggcccagtcaaggagcggcgcctggaggagcgacgccgttccactgtgttcctctctgtgggtgccatcgagggcagccctcccagcgcggatctgccatccctacaaccctcccgctccattgatgagcgcctcctggggacaggcgccaccactggccgcgatttgctactcccctcccctgtctctgctctgaagccattggtcggtggtcccagccttgggccctcaggctccaccttcatccaccctctcactggcaaacccttggatcctagctcacccttagctcttgctctggctgcccgggagcgggctctggcctcgcaaacaccttcccggtcccccacacctgtgcacagccccgatgctgaccgccctggacccctctttgtggatgtgcaaacccgagactctgagagaggaccgttggcttccccagccttctcccctcggagtccagcgtggattccagtgcctgctcggagagaggcagagaagccccctcgggaagagcggaagtcaccagaggacaagaagtccatgatcctcagcgtcttggacacgtccttgcaacggccagctggcctcattgttgtgcatgccaccagcaatgggcaggagcccagcaggctgggggctgaagaggagcgccccggtactccggagctggccccagcccccatgcaggcagcagctgtggcagagcccatgccaagcccccgggcccagccccctggcagcatcccagcagatcccgggccaggtcaaggcagctcagaggaggagccagagctggtattcgctgtgaacctgccacctgctcagctgtcctccagcgatgaggagaccagagaggagctggcccgcatagggctagtgccaccccctgaagagtttgccaatgggatcctgctgaccaccccgcccccagggccgggccccttgcccaccacggtacccagcccggcctcagggaagcccagcagcgagctgccccctgcccctgagtctgcagctgactctggagtagaggaggctgacactcgaagctccagtgacccccacctggagaccacaagcaccatttccacagtgtccagcatgtccaccctgagctcggagagtggggaactcacggacacccacacctcctttgccgatggacacacttttctactcgagaagccaccagtgcctcccaagcccaagctcaagtccccgctggggaaggggccggtgaccttcagggacccgctgctgaagcaatcctcggacagtgagctcatggcccagcagcaccatgctgcctctactgggttggcttctgctgctgggcccgcccgccctcgctacctcttccagagaaggtccaagctgtggggggaccccgtggagagtcgggggctccctgggcctgaagatgacaaaccaactgtgatcagtgagctcagctcccgtctgcagcagctgaataaagacacacgctccttgggggaggaaccagttggtggcctgggcagcctgctggaccctgctaagaagtcacccattgcagcagctcggtgagcagggtgatgtggggaggggcctgtccccctgtcttctattccttttgttcattacaggcttcctgctgtccttcctcattctgtcccatctctcatctgtccatggcatgggttctccctgtccacctttttatctttggttttgctttgcagtctgagatagatggctcttttagtacagctgctctgtggacacctggtgcaggcagtggtgggcctgggtacctgtgagacccagggatgttgtgagacctcccaggacctgctggaggcggtgctgcgggcttgcaactttgtattccagcttctaactccagctgcttttgccttacctgagaatcttttcaccttgtactctggagccgctgctctgtcttggcagctgtctgaccctgagtctactgccccgtggctccattttggttctctttctgatagtatggctgccccatatggctggtgtcctggagcacccccctcccttgattctttttcaggaaccagagtacattggttcctttccttaagggacttgatacaaatttcttaccttctgccctagaaactttttttttccgtgttgtggcacctcctagggcccttcaacacagaatcctggatttgcgttataaagcttcatcaagaagagctggaaatcacaccgtctctctcacctactttttccttcttgtcatgtttgccccatccccacgcccgcggtgatggagaagtgggaggtgacggaggaggtctgggtgctactaaggttgttagactttgtaggcagaaggtggcagagccttgggttggtccctcaagccctttcttggcaaccttccccagggctcccatgtggactgcatgggtgctggagagagccgaccagtttgtggccagcctcctgtctgtgtttctctagctgcttctgcctctgccccagggctctcttattactgggtttgagcggggtacctaccacccccaattccccactccttggttcctagacactgttcactgtcagttgtggaagacagagttcactgagtagtgagcagtgcacagcttaaggaagggcttcaggtcttactcagagggcctgctcattttacagtcttccagtttagggtctagtagatgaacaggagcttgggaagctcacattgctctctgagaggttcagggacaggggcattcctgtccttctcacgacccgttcttagactttctccctttttggcctcttccatctcttaagtctgaatgcccttttttgtactgcagtgatgaaggcacccttagaatgggcagtggctgtgagccagtcaggacacgtggctgggtcccaggtttgtctacagaactgggttttcaactttactcggaccattttcttccttgtcttttcttccactatcagcccctctgtttctctctgcctctttttttttgatgaatgttagaagtcacttaaagtacataacatactgcctaccctcagtaatcacatattaagccaatgaacagaggaggcttggtgcaagtgctttgtcctaaggcaaagttcatggaagcacagatgggcaaagatctcttgggcatctagtagcaccttttggtaacactccatctgtgctcagtgatttcagggtggtttgcagaggtagacctttgctgtgtagcacacttatgcatatcttttgtatatgagtgatacattttatcatgttcatcagtcattttaacttcactgaagcaccttgcaccctgctcttccatttgcctctgtattccattctgttcccactcacttttcttccccattttggatctttctttctttctttctttctttctttctttctttcttttttttttttttggttttggaggcagggtcttgctatgcagtctgaactggctttgatcctcctacctgtccccacagtgtgagctgtcacatcctcgcacctggatgaaacaatggccatctggagtgtgtcctgccacctaccacagtgctttcctttctggctgcaggcttggagcacttgtggctctgtacacagctagcttatttcagacctggtcttttgtctggtctttgtggacacccttactttgatgtctgtgggggctgtgcctcagctctggctttgtagccagtgggggctggaatctggcatttgggtcttactttggcatacagatcactaatgagcctttcccttagagaagtgtccaaagcgtgtgaagttctgatgtctaggtgtgactgtgtccttctcaggacctgtcctgctttggcagagcacacacccttgagccacatctttggtctgtgcatggttcccgagccttacctaccaggctcatctcatctcctcttgatggagtccaccaaggacatgaccctcttcattcatcatctctgaagatgcctcaggccaggcagcgatgccttctagccacaggtgctctgcagcctgagctttttgtagacaagttaaacttgcccgtgtttcacaggaaaagctcagtaacttggagatcaactcgtttgcacagggcccaatgttgggttttaggttgaggctggaaggtacattgttgttggtgctactgctgaggtctgtgatcccacctgtctctcacttcagcttgcaggtctcgcccctgctgatcagatccctgtctactgagagccctgggctgcatcttacttgttcatcacttagagcccgaccttgggctccacacctggttgtggagctctgcctgtctgtcagtcgtgagacctgcgcctgtctcccgttccccttgtcttctgggtctcatgtttggacttgaatcttacatgtggtttgaagcctacaacagggctcttttgctttggctttcagggtctttctggggaggggctctggggtgtgtgtgtgtcgaactcaaggccccgagcatactaagcaaatagtcaaccaccgagttacatctgctttgttttattgagatgtgagacctttctttccttacatttgttgtatgtgtgcgtgtgtgtgcatgtgtgtgtgtgtgtgtgcattatacacgctttatggtatgtatgtggaagtcagagaacctgtgggagtcagtactctctttgcattttgtgggtcccggggattgaactcaggccgccaaacttgactgcaagtgccttcaccgactgagccatctcaccaacctgagagtttttccatagagcttaggctggcattgaacgcgatgtgtggctcagcttggccttcagcttaaaataaaccctcctgcctatgcctccttagtgctgatatcacaggtgtatacaggcatgccagctgactcagtcttatacctgatcgtcacttttcttccttttttttttttttttttttttaaagataaaatgactttggaagtatttgctacaatactttacggagcctttaattttttattattttttttattagatgcttgtgtgtgggtggtcaaagtgtgccctgttctttagacctattgaggtcactgctgagatttcacaggagacctactttccagtcagactgctccacagagccctgtcctgactgttatcagtcctgcctgcatgttaaggggatggacagagcctaggttctggggaagtcatacatgaaggtccccagttgaccccaggagactggggacaggattcattgtgtccccgcagagcagttgcatgaagttataggcagatgcattgctagggaacagaaagagaccatagaagaggagatgtaggaacacatggcatgtcagtgttgaacgggcccggcagtgaggagtgaggccgaggcaggagagctgccgagccctgcctgttcctactgggaactgtcctgtaatgaggcctctgagttgccaagggccataggcctaggtctgatccacatgagtgcaaaggtggggatcgtgacatagaagccaggccagagtacgaaggaaccttttcttgactgttggtaccagtgggctgacggaggtaaggcaatcccaggacggtttttgtaggacgactttttttttttttgtcagtgtgacttatatccctgagtttgtgccaggctttgggagtcaaggaaagccactgagaaggaagtgaagggccgggatgttgctcagtggttagagggcttgccttgtgtgcatgaggcctgggctttgtccctagcagagaaaaagggagagggggagggggagaagaaggaagagaagaggagaagggagagaagggaggaaaggagggaagatggtgaaagaccctgaaactctgagggccctggactcaggtgacgaggaagacctgggttaatgggaggaattggtgacattccccaaagctgaaaaggtagaggagccacagtcctctcgtgggtgctgctcactgaggcagagttggacatcctgcatgttaaaaggtgttaggagagcccagtggaaaccttgagctcagaatgccaccgataggccctcgcgcacggcattcctgggcttgttagtcacatcagacaatgggtagatgacataggctgagaccgtgcagaccatgaaagaccgcggtaggctggagaagctgtccaggaggtaggatgccgagggaagggctcctccaaagaatcaggtcatcccaggggacccctgcgtccagccttggtgaatgccacaaacaaaggccagttctcagcggctcccagttcctggggcaagatcgagtgtcttagagtagtggatgctgtgaggtgaccatgctgtggatgcagcctgagcagaatgtgattggccagtcagctactgggtggcagtagccagagatgggtgtgcagaggtgccgtagacaggttagaatcaatcagattttcaccctgctggggtttctgtcctggggaggggggctcaatgtgggttgagctcttccccaagatgggggcggggaacagacactgattccttggccactccttcctgtgcatacccttccttgggcttttcccctaggcctcccaacattagcaacactggtggagtttttgaggtatatgactggctctctctccactcccagtctcctgggcaccttagaggctaggttgccctcagcccaggcctccaggtcaccctgccaggaaggcagaatttggtgccattcagacagctgtggctacttgtcctagcttaggccttttggaccccagagcctccccactgcactgtcttatggctgtcttgtcccctccggttcagcagtagactgctgaaacctaacctttggggcaggtcttgcttagacatttgttcagtgatacagatgcccatgctcgggtcagcatggattcaggggggaaagcagcgaaggtgacattgcctggccttgttgggctctgtaggtggccagagtctgacctcacaactgtgcttccagcactgcctccccgaggacctcaccgcctcacctctgctgcccactgcactttgccccaaagccaggatggctccccgaggccaggttccatgggactgaaagtttcttccggaggctttgtctgcctgttcccttgtatagccctcagatgttcctggaatctttgtgttggtggcactggtttggcttatccgagcagctctgccctgggtctgagcagttgggaggaagccgtagggatggatggctgaggagaaagctgctgcgagtgatcgaaatgaggtctctagggaaggactgatcttgcacggtgcaggggaaaagttgaaagttgcttcagggagcatgcttgctagcttgctcttctcagtgatggatttcatcacctcacagcaacagcttgaggaagaaggatgtactgtggttcctagtttcagagatttcggtctccgtggtggcttggcccccattgctgttgagctagtcacaatagggaaggctcagtgaatcatttcctggcagccaggaagcaagaagggaaaagagggggcaggaataagaccatcaagtcatgaagtcattgatgtttgttgtgatcattattttggggggtggggcgttagggacaaagtctcaacatgtaaccttggctggcctggagcttgctttgtagaccaggctggccttgaactcagagatctgcctgcctctgcctcctgagtgctgggattagaggtgtgcgccaccgccacacccgaccccagtcagtgtattcattcatagattagggcagccctctcatgatccagttacctctgtgatccaccactataccttctgagtgcagaccttttagggggaatattgcagagccaagctatgcagcaaggagaggggcacgttgaggggactcctgctggtgtggggttctgggccaggtgggtagaaacttaggccatcctaagggagaggacgttgcgggggtgagatggccactggagagaagtcggtcaaacgttagagtgactatcagactgcaaggcactgctaagcaacacttacggtctgcaccttatgctggagggagccatcgaggccactccggggcaggcaaaccaggtgccttctgtccaagctgtcctgggtattttccgttccccagtacctctgcagtagacgggcctttccttctgagttccgacctccatagagcgtcccacaggggtccctgaacctggctgcccattgtgtggttgtgactgaaggcattgtgggcctggcctgctaacactctctctcattgctctctcctgcccatctatctgcatgtggctgctctgtctagctgcgcggtggtcccgagtgccggctgtgtaagtgagcatgcccatcccatgcctctcgcagtccacatgctgtgcctggctgcgccccctggctgctctgcatggctgtgtggggctctggtgctactgacagctactgaggcaatccttggacacagtgaggggtcgagatgggggattgggtgggggtgctatgggagtaggcttccggtagagcagccgcgcttccggtagagcagccgcctcgggctggccttccctccagccaggcaggctggggcagggctggaagtccaggatcctggcaggtgaggctgggaagcgaggtaccatctctctgccttgtgtgtctgcctgtgtgctactgcgttcctgtgagcaccgctgcatgtccacagcacatgtagtctccattgctgctgtggtgtgctctcctgtgcagggagactctcttcctgttaccgtgttctgttgccttgcacctcctgtgggtgtgagccccgcctggtgtttgtcttccgtgttcatggacctgtcacgtcttgtgccactgccagcctttaccatgactccgccgtgcccgaaactggcctgggttgctctgggtctcttcagacttgagagcagtatgcggggagtggtgaagatattgttcaaattttatagtccagagcatctgtggatggaacccacgcccagaggctgtgttagaggctggcagggtggggcaagcagcttccgtccatgagaaaagtttcctttggtgaactgcccttggggcctccatggagcgcagtgtgtggggacagtcttactccttagaatccagtcagtttgagaatcccccagagcaaggcactggtcctgacctgacccaggatgtttgtgttttcaaaaagaatgaccacaggatattcctccagccctagacctcttggctctgctgccctctctgtccactccgactttattttccatccctcacctggccctcacccactctccctccgcaggctcttcagcagcctcggtgagctgagcaccatctcagcgcagcgcagcccggggggcccgggcggaggggcctcctactcggtgcggcccagcggccggtaccccgtggcgagacgagccccgagcccagtgaaacccgcatcgctggagcgggtggaggggctgggggcgggcgtgggaggcgcggggcggccttcggcnnnnnnnnnnnnnnnnnnnncctcaagtcgtccagcctctccatcccgcacgaacccaaggaagtgcgcttcgtggtgcgaagtgtgagtgcgcgcagccgctccccctcaccatctccgctgccctcgccttctcccggctctggccccagtgccggcccgcgtcggccatttcaacagaagcccctgcagctctggagcaagttcgatgtgggcgactggctggagagcatccacttaggcgagcaccgagaccgcttcgaggaccatgagatcgaaggcgcacacctgcctgcgctcaccaaggaagacttcgtggagctgggcgtcacacgcgttggccaccgcatgaacatcgagcgtgcgctcaggcagctggatggcagctgacgccccactccctctcctgttcctgctgcgccctgccggcagggcccccacccctactccaggccgcaggctcggctcgccccctaccacggcgcccgggccaggaatgttgcatgaatcgtcctgtttgctgttgcttggagacttgccctgtacattgcttagtgccctcccctgccgctgaaccccacccagcacacagtaagggcgcggaccaggggggctgggtggaagggggtgggggcagggtgctctggcctgaccacttcctccatagctcctggtggccattcttccagagggggaacctagtccagcatgcgaggtcaggacacgccttggtgactcggggggaggggggagacattggggttctcgataggggccaaggagccccctgttttacatattttaatccactctatatttggaaagagaaaaggaacaaatatctctgtccgtaatagttcccgccctcttcccctctagtcctctcgctggtcccgccacagctgcccagtcttccatctctggcccctcactgccaccccatacagggcaggggacactccagctggcctggggttagccagggtcctggcagcccaccctggggaccccggctcagccccccttccctcgctgagctatagtatgccccacccaccctttaggtgctgctcagggggacgggtggcaggcattgcctgctgggcactagcagggccaggtggcctgggaaattattgccctggggctgggccccggtaacccaaaccccagccatcatcttcacagggtctctcccacaggaggggtctaacctttcccacttcttgggcaactacagcagagaagcctccctgcctcgcaccccaaagactccccaattcctgccctgtgtgtgtgtgtgcgccacataatgtgtgtgcacgcctgtgtgcttgtgaaaactgggtgtggctgagcgcatgggtgccctgtgtgtgcttgactgtgcagtggtccccaggggctgttctggatgggtgggaggtggcggcagaagcttgcacagggtgcatgcatgggtgtgtgcccgggaaggggccctgtcctgctggtgggtcctgctgttctctcagcctgtcccctcctccccaaacctcacccagcttaagcagggattcttcgtgaatcctttcagcttcgggaggcctcaagggctccccccgcaggcagtaccccttcgggcttctaagggaattgtggggaccactaaaatcaggccacaacagcccttggagagaggcaaagactcctgagggtcccctggcccccttactgtgactcctcacactcagcaatgacctgtggggtggggggccctggggcatttttaaacatcgggtttggagtctggactaagctccatccacgtcactcacaagtttctgtttctatttctagctttttttaataaaaaataaataaataaataaatatataaataaatatatatatatataaaagacagaaaacaggtgttttcatggcccaggggcttggcacgccggtctgtgcccacctgccccaccctggcccatcggccccattccttagacacagagtcacacccactaaccctctcaccaacagagcaggtcacacacacagcagcagtcactgtaacagactgccacatacacagtctcacatttacctgtgggtttttggttctgttcaatttgggtttttaactttacagggtcagttccgcttctcccccccccccttttgtatggagttccatctggggggctttcaaccccctgctccagtcctgaggcctcctgaccctgacgttgtgatacaccccacagagatctatgtttcttatattattattattaataataattattataatattatgtaataaatttataagaaatga

SEQ ID NO: 457 - DNA, 4647 bp, Mus musculus
  misc_feature (1)...(4647): n = A,T,C or G
atggctgtgcgggagtgacactgtgggcaggagggaggcaagcagcccgaggtggtagccacctcttgctcacatgggcctgtgtggtagtcttctccccaccttttctttatctgagcagttccgatacaagcggagagtttatgcccagaacctcatagatgacaagcagtttgcaaagctacacacaaaggcaaacctgaagaagttcatggactatgtccagctacacagcacagataaggtggcccgcctgctggacaaggggctggaccccaatttccatgaccctgactcaggagagtgccctctgagccttgcggcacagttggacaacgccactgacctcctgaaggttctccgcaacggcggtgctcatctggacttccggacccgagatgggctgacagccgtccactgtgctacccgccagcggaacgcaggggcattgacgaccctgctggacctgggggcttcgcctgactacaaggacagccgcggcctgacgcccctgtaccatagtgccctagggggcggggatgccctctgttgcgagctgcttctccatgatcatgcacagctggggaccactgatgagaatggttggcaagagatccatcaggcctgtcgctttggacacgtgcagcacctggagcaccttttgttctatggggccaacatgggtgctcagaatgcctcgggaaacacagccctgcacatctgtgccctctacaaccaggagagttgcgcgcgcgtcctgcttttccgtggtgccaacaaggacgtccgcaattacaacagccagacagccttccaggtggccattattgcagggaactttgagcttgccgaggtaatcaagacccacaaagactccgatgtcgtaccattcagggaaacccccagctatgcaaagcgacggcgtctggctggcccgagtggcctggcatccccacggcccttacagcgctcagccagtgatatcaacctgaaaggtgatcagcccgcagcttctccagggcccactctccgaagcctccctcatcaactcttgctccagaggcttcaggaggagaaagaccgtgacagggatggtgaactggagaatgacatcagcggcccctcagcaggcaggggtggccacaacaagatcaggccccccgcgccgccgccccggggcccgaagcggaaactttacagtgccgtccccggccgcaagttcatcgctgtgaaggcgcacagcccgcagggcgagggcgagatcccgctgcaccgcggcgaggccgtgaaggtgctcagcattggggagggcggtttctgggagggaaccgtgaagggccgaacaggctggttcccagctgactgtgtggaagaagtgcagatgcgacagtatgacacccggcatgaaaccagagaggaccggacgaagcgtctcttccgccactacactgtgggttcctatgacagcctcacttcacacagcgattatgtcatcgatgataaggtggctatcctgcagaaaagggaccatgaggggtttggctttgttctccggggagccaaagcagagacccccattgaggagtttacacccacacctgccttccctgcactccaataccttgagtctgtagatgtggaaggtgtggcctggagggctggacttcgaactggggacttcctcattgaggtgaacggagtgaatgtcgtgaaggttggacacaagcaagtggtgggtctcatccgtcagggtggcaaccgcctggtcatgaaggttgtgtctgtgaccaggaaacccgaggaggatggtgctcggcgcagagccccaccacccccaaagagggctcccagcaccacgctgaccctgcggtccaagtccatgacggctgagctcgaggaacttgagaagttggatgagatcctggcagttgccgcggagccgacactgaggccggacattgcagatgctgactcgagggcggccactgtcaagcagcggcccaccagccggaggatcacccctgctgagatcagctcattgtttgagcgccagggcctcccaggcccagagaagctgccgggctctctgcggaaggggattccacggaccaaatctgtaggctcttcagcagcctcggtgagctgagcaccatctcagcgcagcgcagcccggggggcccgggcggaggggcctcctactcggtgcggcccagcggccggtaccccgtggcgagacgagccccgagcccagtgaaacccgcatcgctggagcgggtggaggggctgggggcgggcgtgggaggcgcggggcggccttcggcnnnnnnnnnnnnnnnnnnnncctcaagtcgtccagcctctccatcccgcacgaacccaaggaagtgcgcttcgtggtgcgaagtgtgagtgcgcgcagccgctccccctcaccatctccgctgccctcgccttctcccggctctggccccagtgccggcccgcgtcggccatttcaacagaagcccctgcagctctggagcaagttcgatgtgggcgactggctggagagcatccacttaggcgagcaccgagaccgcttcgaggaccatgagatcgaaggcgcacacctgcctgcgctcaccaaggaagacttcgtggagctgggcgtcacacgcgttggccaccgcatgaacatcgagcgtgcgctcaggcagctggatggcagctgacgccccactccctctcctgttcctgctgcgccctgccggcagggcccccacccctactccaggccgcaggctcggctcgccccctaccacggcgcccgggccaggaatgttgcatgaatcgtcctgtttgctgttgcttggagacttgccctgtacattgcttagtgccctcccctgccgctgaaccccacccagcacacagtaagggcgcggaccaggggggctgggtggaagggggtgggggcagggtgctctggcctgaccacttcctccatagctcctggtggccattcttccagagggggaacctagtccagcatgcgaggtcaggacacgccttggtgactcggggggaggggggagacattggggttctcgataggggccaaggagccccctgttttacatattttaatccactctatatttggaaagagaaaaggaacaaatatctctgtccgtaatagttcccgccctcttcccctctagtcctctcgctggtcccgccacagctgcccagtcttccatctctggcccctcactgccaccccatacagggcaggggacactccagctggcctggggttagccagggtcctggcagcccaccctggggaccccggctcagccccccttccctcgctgagctatagtatgccccacccaccctttaggtgctgctcagggggacgggtggcaggcattgcctgctgggcactagcagggccaggtggcctgggaaattattgccctggggctgggccccggtaacccaaaccccagccatcatcttcacagggtctctcccacaggaggggtctaacctttcccacttcttgggcaactacagcagagaagcctccctgcctcgcaccccaaagactccccaattcctgccctgtgtgtgtgtgtgcgccacataatgtgtgtgcacgcctgtgtgcttgtgaaaactgggtgtggctgagcgcatgggtgccctgtgtgtgcttgactgtgcagtggtccccaggggctgttctggatgggtgggaggtggcggcagaagcttgcacagggtgcatgcatgggtgtgtgcccgggaaggggccctgtcctgctggtgggtcctgctgttctctcagcctgtcccctcctccccaaacctcacccagcttaagcagggattcttcgtgaatcctttcagcttcgggaggcctcaagggctccccccgcaggcagtaccccttcgggcttctaagggaattgtggggaccactaaaatcaggccacaacagcccttggagagaggcaaagactcctgagggtcccctggcccccttactgtgactcctcacactcagcaatgacctgtggggtggggggccctggggcatttttaaacatcgggtttggagtctggactaagctccatccacgtcactcacaagtttctgtttctatttctagctttttttaataaaaaataaataaataaataaatatataaataaatatatatatatataaaagacagaaaacaggtgttttcatggcccaggggcttggcacgccggtctgtgcccacctgccccaccctggcccatcggccccattccttagacacagagtcacacccactaaccctctcaccaacagagcaggtcacacacacagcagcagtcactgtaacagactgccacatacacagtctcacatttacctgtgggtttttggttctgttcaatttgggtttttaactttacagggtcagttccgcttctcccccccccccttttgtatggagttccatctggggggctttcaaccccctgctccagtcctgaggcctcctgaccctgacgttgtgatacaccccacagagatctatgtttcttatattattattattaataataattattataatattatgtaataaatttataagaaatga

SEQ ID NO: 458 - protein, 682 aa, Mus musculus
MGLCGSLLPTFSLSEQFRYKRRVYAQNLIDDKQFAKLHTKANLKKFMDYVQLHSTDKVARLLDKGLDPNFHDPDSGECPLSLAAQLDNATDLLKVLRNGGAHLDFRTRDGLTAVHCATRQRNAGALTTLLDLGDDYKDSRGLTPLYHSALGGGDALCCELLLHDHAQLGTTDENGWQEIHQACRFGHVQHLEHLLFYGANMGAQNASGNTALHICALYNQESCARVLLFRGANKDVRNYNSQTAFQVAIIAGNFELAEVIKTHKDSDVVPFRETPSYAKRRRLAGPSGLDRPLQRSASDINLKGDQPADGPTLRSLPHQLLLQRLQEEKDRDRDGELENDISGPSAGRGGHNKIRPPAPPPRGPKRKKAVPGRKFIAVKAHSPQGEGEIPLHRGEAVKVLSIGEGGFWEGTVKGRTGWFPADCVEEVQMRQYDTRHETREDRTKRLFRHYTVGSYDSLTSHSDYVIDDKVAILQKRDHEGFGFVLRGAKAETPIEEFTPTPAFPALQYLESVDVEGVAWRAGLRTGDFLIEVNGVNVVKVGHKQVVGLIRQGGNRLVMKVVSVTRKPEEDGARRRAPPPPKRAPSTTLTLRSKSMTAELEELEKLDEILAVAAEPTLRPDIADADSRAATVKQRPTSRRITPAEISSLFERQGLPGPEKLPGSLRKGIPRTKSVGSSAASVS

SEQ ID NO: 459 - DNA, 57826 bp, Homo sapiens
  misc_feature (1)...(57826): n = A,T,C or G
ccccttctcgccctaccttggtcttcgtgccccgacgcggcccccaccccagctccgggaccccttcctccgccgcacccgccccggtggtccgcggatgcccgcccttgccgctcagccactccccccgcaccgaggcctaggactcccccccccaaccccgtcacagccccccagacccccgccccgtggctcggcccccgccctccgcacacacctcccgcccccacccgggaccccgcaagtaaccccccagcactggccctgagccctcccggcccccgcctccggcgcagccccctcgccacccccgcttccctcccgtctcaggccccctccccccgccgcccccgcccccggggaaggcaggcgccgagctgagccggggccgatgcagctgagccgcgccgccgccgccgccgccgccgcccctgcggagcccccggagccgctgtcccccgcgccggccccggccccggccccccccggccccctcccgcgcagcgcggccgacggggctccggcgggggggaagggggggccggggcgccgcgcgcggagtccccgggcgctccgttccccggcgcgagcggccccggcccgggccccggcgcggggatggacggccccggggccagcgccgtggtcgtgcgcgtcggcatcccggacctgcagcagacggtgagccccgccgccctgggcccggccgtgcccctgcgctccccgcccgggattcccccacccccgccgggcgcgcccggcgcccgggacccccggcccacggctactcacccctcccccgccgcctccgccgggaccctccccatcgccagggcggggccccgggaagcccggcccctggggcggggcttcggccgcggttcgcggaggcgcggggtcccgggcgccggcacccgagccccggactccttcggcgggggcccggggctcggcaccccgcatggggccggcggggcgggtccgcgctcccgggacctgagctcacgagcccgctccgctgcagaagtgcctgcgcctggacccggccgcgcccgtgtgggccgccaagcagcgcgtgctctgcgccctcaaccacagcctccaggacgcgctcaactatgggcttttccagccgccctcccggggccgcgccggcaagttcctggatgaggagcggctcctgcaggagtacccgcccaacctggacacgcccctgccctacctggaggtaagtggccggcgcgggggtgagctgaggagcgcgcagggtggatcaccaagccccgtggcgggaccagtgaagggcacggcagtggggaaacacaagtgggaggggtgaggggtggaggctgtgtgtgtgtgtgtgtgtgtgtgtgtgtggtgctgtgtgcagagtgcagtgagcgtgtacagggtgcagcgagcggacacagtgtatgcgatgagtaggcgcggtgtgtgcagtgagcgggcagggcgagcagtaaggatgtacagtgtgggcagtgtgcgagcatgtgtagtgagcaggcagtgtgtgcagttagcaggcacagtgtgtgcagtgagtgggcagtgtgcacagcatgtacagtgtgagtggtgtgtgctgtgtgccgtgagcatgtgtagtgagtgggcacagtgcagtcagtgtgcacaaagtatgcagtgggcacgtaccgtgtgtgcagtgagtggtgtgcagtgtgtagtgtgcagtgagcagtgtgtacagcattgcagtgtggggcagtgagtacagtgtgagtgttgtgattgtggtaagcaggatgcgcagtatacagtgaacagtgtgcacagtgtgtgcagtgtgggctgtgtgccacagagtcagtgtggtgtgtgtagtttgaacagtgtgtgcattgagcagcatggatggtgtggacgctgagcattgttctccagggaggagtgtgagcacgagagagtgccagaggggtgtgtggtgtgagcagggctatctgtgtgcacgtttgttcctttctccagctgtgaagtcttgtgaaggccaaccaagtcccctcctttactcacccatgtatggtgtgaagatgtattgagtgccttgctaggcatggggacgtagacggggtcagtcctgtggaaggtcttggagtttggcagggtggaggggggtgcccaactgcagtgggcattgaataaagattttgtgagctgagctcaaagttgggcgggcctccgtggtggcacaggaaagtggggtcagttctacctggagagtggagggggatgtctaggatggtaagcctggaatcaggccttcagagaggagtgggattttgccgagaatcctggggatgggaaggcgacgggacagtgcaggctgcgggcagctaggcacgtgccttccatcgggctgcatcatgcctgagtgtggtgggtgcatggcagctgttagctctgtccactgtggtagtatgactgatggtgtgtacaggagggcagtgaggggtgcggtgtggccagcatgagcgggacggggtttgtgcatggactcacttgctcagccggggtgggggcattttctctaccttttctttatctgagcagtttcgatacaagcggcgagtttatgcccagaacctcatcgatgataagcagtttgcaaagcttcacacaaaggtaaaggatcacggggagggggctcctgaggttccctcctgcctccctgtggctgctgtcccccaccccagcttggggctgaccacagtcccccagctttagctcagtccatttccccatcatcaggggcccagagcctgtactgggtgtggctgaagggctgggcacagattcctggccccatggttggggtcaggtggtacagtgatgtgttccagttagatcagactcttgccgacccccctggcttaggggctggagtgtcctgtgagaagctgggtggagagggagtggacaagcatctgatgtgatggctgtcgggacaaggcacccagcatcgagtggtcgaccagtgctaggcatttgtgattagacctctcattaatcctcttccagagggactactataaccctgtttcacagatggggacacagagtacccgactgtgtagatagtgaagctggggctgaacccagatctgtctgattccaggccctgtgcccaggcatgcctttgaggtgtctactgctgggtgccacccccaactgggcctgaccccaaatgctcttgaggggggcaccttactatttcccgctgaatgtcagaggggcagggtgggtgccacagcccctccccaggggcttccacccgcagctcacagtccagcaggcacttgtttgctggatactttatgggcggtctctggagctcaggagaggggtcagaatggagggtctctggagcccaggagaggaatcagaactgtcagccctgtgtcctaatggtcccatcagtgactttggagcctcaggcttctgtgccaggcttttctgctgccccagggcaggcggtggtcaacggccttggcactatggctgggcagagtccactgtggaaaggtccccctctcctgccactggccctcacttgaccttgtcagcctgggttcctaccccatggccacctctccctccggatctctcttcagtgaccaacaagacatgagtgactcactctgaagtaggtctcgtttgtttttaggatgagcctgaacttcttacatagcccgtgtttctgcttgcctgggctccagctggcctttccctctcccctggtagtgagcacttcctcctctttcactgcctggcccgcctgaggaggttgcctcccaaggcaggggtccctatggcaccctcccctatttctgaggtacactgggtgtttatggaagggccccggcctttggccagggcaccttgccttgtgtgtgtggtgtccgtagtgccggctggggaagtgaggccttgtggggtgagtgaataaactgggtgaatgagtacaaggccatcaaagtcatgtcacaggatgggtccctggggtgggggtctgcggtggggtgagctggagaggaagatgggccgaagaaggagcaggttgtctcagggtgctgaggattcagggctgctgtggggctggttcctgcctgggtggacctcgggctcttctaggccaggcaggtcggggcagcagggccggagagacggagccagggcagtgactgggcctggagtgggggacttgcttggggccccaccagggtgacctggccttggtgaggggctacttgggtacaagctgacagtcgtgactggtttggctatcagggcgcaaggaagggctttgagccgtgcatgggcccacccgagtgggaattggggccgtggtgggagtgcaggaccgtggttgacaattgtgatgtcaggtgacaggtcagactggtagggatgtggcgggggttgcctgaaggtggcctgaggcttgccggaggaaggcgggtgatgttcagatgatggaggccttggtgccaggctgactgacggccggtgttccaggcgaacctgaagaagttcatggactacgtccagctgcatagcacggacaaggtggcacgcctgttggacaaggggctggaccccaacttccatgaccctgactcaggaggtgaggagtggagtcagggaggggcatggcctttgcgcggctgggagcctgacccttatctgtctgtgaacccagagtgccccctgagcctcgcagcccagctggacaacgccacggacctgctaaaggtgctgaagaatggtggtgcccacctggacttccgcactcgcgatgggctcactgccgtgcactgtgccacacgccagcggaatgcggcagcactgacggtcagtgagggcggggcctggcctggaggggctcttgcctggtgatggggctgggggcagctgggcctggtgtggatactgaggctgctcaccctcagaccctgctggacctgggggcttcacctgactacaaggacagccgcggcttgacacccctctaccacagcgccctggggggtggggatgccctctgctgtgagctgcttctccacgaccacgctcagctggggaccaccgacgagaatggctggcaggagatccaccaggtgtgcagggagccgaggtggggtcccggcctctgtgtgctgggttgggggtcctggctctgtctgtaggggtgggggccctagcctctgcccagggaccctacagcaccttgctcttcccccaggcctgccgctttgggcacgtgcagcatctggagcacctgctgttctatggggcagacatgggggcccagaacgcctcggggaacacagccctgcacatctgtgccctctacaaccaggtgcgactgtgtgtcctgcacatgcctgcaccagcgagtgtgcatatacttgcctcttctgggggtgtatgtgtgtgtgggcacacaggtgaccctgtacggtgattgcatgtgtgcaccgagtgtggatatacttgcctgttctgggggtgtacgtgtgtttgtgtgcacacaggtgaccctgtacagtgattgcatgcgtgcaccagggagtgtggatatacttgcctgttctggggttgtacatgtgtgtgcacacagatgaccctgtacagtgattgtatgcgtgcaccagtgagtgtggatatacttgcctgttctgggggtgtacgtgtgtttgtgtgcacacaggtgaccctgtacagtgattgcatgtgtgcaccagggagtgtggatatacttccctgttctgggggtgtacacgtgtgtttgcacacagatgaccctgtacagtgattgcatgcgtgcaccagggagtgtggatatacttgcctgttctgggggtgtacacgtgtgtttgcacacagatgaccctgtacagtgattgcatgcgtgcaccagggagtgtggatatacttgcctgttctgggggtgtacatgtgtgtgtgcacacaggtgaccctgtacagtgattgcatgcgtgcaccagggagtgtggatatacttgcctgttctgggggtgtacatgtgtgtgcacacaggtgaccctgtacagtgattgcatgcgtgcaccagggagtgtggaaatacttgcctgttctgggggtgtacacgtgtgtgtgcacacagatgaccctgtacagtgattgtgtatgtgcatccctgcctctgtgccatggtatatatatgtgctctgtgtcctgcagtgagttgtggctgcagcacagcctcataggcatatgtgtgcacatttgttctctgaacacacaggggcttcacatgtgtgcacgtgtgttctgaataaccaggtatgaattgggtacatctaggccctctgggccaggtgagacctgagcgtgtatacctactggcttgtctctgcaactcaggtgtacatggaacaaataggtgtgagtccgtgtgtgtgagcctgtgccctgcgcacgccatgtgtgcattcctgtgtgcgcatgtgctgttgtgctcggatggtctctccagccacccagctgtgattccctcttccccgcaacaggagagctgtgctcgtgtcctgctcttccgtggagctaacagggatgtccgcaactacaacagccagacagccttccaggtacaccggtggtttacaggagctcaaggctgccccagaggtgtctgtctctgtgtccatgtgacttgacttctctgaaccttggttcttccctggaaggccctaagggagcacctcccccaggactgcccacaggaggtgttgggggacgagcccagcacgcgaggggtatttggtgttgatgttcccttcgtcccctcgccagggagagaggagggtcagcagggctgtggggcaggggtatggggaaaatgagaagactggggtgacaggtgtgggtctgaccccccaaccccgagagaccagcaggggtgcagaagccaaactgcagagggggtggagaggggggtggtggaggggggtggtggagaggggggtggtggagggggatggtggaggggggatggtggaggggggtggtggagagggggtggtggagaggggggtggtggagaggggtgtgatcctagccgctgatgtaattcaggggaggtttccgggccctttctctggccaggttggttggcactgatgaccaggtggacgtggtctctgacttggagtttgttggggagtcgggaatattgtgggggtttgcggaccaggaacagagccagaactcctctattttcagtaggagtgagatgtgggaagagtggtcaggctgctgaggttgtgtggtcatagaaggtggaggcagcagtgggctgccagatgggtttgggcacactgggaagcagatacgcccgggcctgttggatgactgggtgcagggtcacaggaaggggaggatgagcttggcagcttgggcagctgcggggccttggctgagatgggaaacatggctgcatgttgggacagaccagtgtgcccgtttgcttgggactgctggttttagctctgaacttctgtccaggcagcccctcagtcccaggcagacagagggtgggtcactccagttatagggtgtgcctgtggcatcccagttacagacaagagtgtgtgtcagtagagaagaggaatgggctggggtctccggggcccccaaccaaggaagactccacacacgaactggagaaggagcagctggggctggctggcgaggcaaagctggtgctgctcagcccctccctgctcctcaaggccttgacctcccctttccctcaggtggccatcatcgcagggaactttgagcttgcagaggttatcaagacccacaaagactcggatgttggtgagttctgcccacctgggcgaccctgctgaatgtagattcgtgtggttttctggggcccagcagatgtgggggtcagtggtgacataaaggggccccacaccccacatctacactgtgtggccagtggtctctgagtggccactgcgggcatgaggaacgggccacagggcctgtgttgagtgaacattgtttttggtctgggagaagagcatggtgaggtttgggctgtgggccggggctagcattcagcttagggggcagcataggttgagagtggggttgaagttagggtcagagtccctgtttcccgttaaatcctaggaagagccagcaggagacatgggggtggtggacctcacttcaccctggagcaagcatgagtcttggtggtccgtagcaagctctcagcatggaaagatcatgtaaacgacacataaggaaaacaacagtgatgggaaagcagaatggggctgggaatagtgccatagccatcctcagggcaaggagctctgagccccctgctgcctgcgagtagaggaaagcctggtgtgtgcgtgactcacggtcctggaaggaaaaccaggagacacacacgtggcctcagccaggatacccgagcctcttggaggtctctggtgggtgtggggccaggctgggaccgtcctgttgtagctgccggagtcccctctgggagagttgtagctgccggagtcccctctgggagagttgctgctggccaggctgggaccgtcctgttgtagctgccggagtcccctctgggagagttgtagctgccggagtcccctctgggagagttgctgctggccaggctgggacggtcctgttgtagctgccggagtcccctctgggagagttgctgctggccaggctgggaccgtcctgttgtagctgccggagtcccctctgggagagttgtagctgccggagtcccctctgggagagttgctgctggccaggctgggacggtcctgttgtagctgccggagtcccctctgggagagttgctgctggccaggctgggaccgtcctgttgtagctgccggagtcccctctgggagagttgtagctgccggagtcccctctgggagagttgctgctggccaggctgggatggtcctgttgtagctgccggagtcccctctgggagagttgctgctggccaggctgggaccgtcctgttgtagctgccggagtcccctctgggagagttgctgctggccaggctgggacggtcctgttgtagctgccggagtcccctctgggagagttgctgttggccaggctgggaccgtcctgttgtagctgccggagtcccctctgggagagttgtagnnnnnnnnnnnnnnnnnnnnnnnnnnnnnnnnnnnnnnnnnnnnnnnnnnnnnnnnnnnnnnnnnnnnnnnnnnnnnnnnnnnnnnnnnnnnnnnnnnnnnnnnnnnnnnnnnnnnnnnnnnnnnnnnnnnnnnnnnnnnnnnnnnnnnnnnnnnnnnnnnnnnnnnnnnnnnnnnnnnnnnnnnnnnnnnnnnnnnnnnnnnnnnnnnnnnnnnnnnnnnnnnnnnnnnnnnnnnnnnnnnnnnnnnnnnnnnnnnnnnnnnnnnnnnnnnnnnnnnnnnnnnnnnnnnnnnnnnnnnnnnnnnnnnnnnnnnnnnnnnnnnnnnnnnnnnnnnnnnnnnnnnnnnnnnnnnnnnnnnnnnnnnnnnnnnnnnnnnnnnnnnnnnnnnnnnnnnnnnnnnnnnnnnnnnnnnnnnnnnnnnnnnnnnnnnnnnnnnnnnnnnnnnnnnnnnnnnnnnnnnnnnnnnnnnnnnnnnnnnnnnnnnnnnnnnnnnnnnnnnnnnnnnnnnnnnnnnnnnnnnnnnnnnnnnnnnnnnnnnnnnnnnnnnnnnnnnnnnnnnnnnnnnnnnnnnnnnnnnnnnnnnnnnnnnnnnnnnnnnnnnnnnnnnnnnnnnnnnnnnnnnnnnnnnnnnnnnnnnnnnnnnnnnnnnnnnnnnnnnnnnnnnnnnnnnnnnnnnnnnnnnnnnnnnnnnnnnnnnnnnnnnnnnnnnnnnnnnnnnnnnnnnnnnnnnnnnnnnnnnnnnnnnnnnnnnnnnnnnnnnnnnnnnnnnnnnnnnnnnnnnnnnnnnnnnnnnnnnnnnnnnnnnnnnnnnnnnnnnnnnnnnnnnnnnnnnnnnnnnnnnnnnnnnnnnnnnnnnnnnnnnnnnnnnnnnnnnnnnnnnnnnnnnnnnnnnnnnnnnnnnnnnnnnnnnnnnnnnnnnnnnnnnnnnnnnnnnnnnnnnnnnnnnnnnnnnnnnnnnnnnnnnnnnnnnnnnnnnnnnnnnnnnnnnnnnnnnnnnnnnnnnnnnnnnnnnnnnnnnnnnnnnnnnnnnnnnnnnnnnnnnnnnnnnnnnnnnnnnnnnnnnnnnnnnnnnnnnnnnnnnnnnnnnnnnnnnnnnnnnnnnnnnnnnnnnnnnnnnnnnnnnnnnnnnnnnnnnnnnnnnnnnnnnnnnnnnnnnnnnnnnnnnnnnnnnnnnnnnnnnnnnnnnnnnnnnnnnnnnnnnnnnnnnnnnnnnnnnnnnnnnnnnnnnnnnnnnnnnnnnnnnnnnnnnnnnnnnnnnnnnnnnnnnnnnnnnnnnnnnnnnnnnnnnnnnnnnnnnnnnnnnnnnnnnnnnnnnnnnnnnnnnnnnnnnnnnnnnnnnnnnnnnnnnnnnnnnnnnnnnnnnnnnnnnnnnnnnnnnnnnnnnnnnnnnnnnnnnnnnnnnnnnnnnnnnnnnnnnnnnnnnnnnnnnnnnnnnnnnnnnnnnnnnnnnnnnnnnnnnnnnnnnnnnnnnnnnnnnnnnnnnnnnnnnnnnnnnnnnnnnnnnnnnnnnnnnnnnnnnnnnnnnnnnnnnnnnnnnnnnnnnnnnnnnnnnnnnnnnnnnnnnnnnnnnnnnnnnnnnnnnnnnnnnnnnnnnnnnnnnnnnnnnnnnnnnnnnnnnnnnnnnnnnnnnnnnnnnnnnnnnnnnnnnnnnnnnnnnnnnnnnnnnnnnnnnnnnnnnnnnnnnnnnnnnnnnnnnnnnnnnnnnnnnnnnnnnnnnnnnnnnnnnnnnnnnnnnnnnnnnnnnnnnnnnnnnnnnnnnnnnnnnnnnnnnnnnnnnnnnnnnnnnnnnnnnnnnnnnnnnnnnnnnnnnnnnnnnnnnnnnnnnnnnnnnnnnnnnnnnnnnnnnnnnnnnnnnnnnnnnnnnnnnnnnnnnnnnnnnnnnnnnnnnnnnnnnnnnnnnnnnnnnnnnnnnnnnnnnnnnnnnnnnnnnnnnnnnnnnnnnnnnnnnnnnnnnnnnnnnnnnnnnnnnnnnnnnnnnnnnnnnnnnnnnnnnnnnnnnnnnnnnnnnnnnnnnnnnnnnnnnnnnnnnnnnnnnnnnnnnnnnnnnnnnnnnnnnnnnnnnnnnnnnnnnnnnnnnnnnnnnnnnnnnnnnnnnnnnnnnnnnnnnnnnnnnnnnnnnnnnnnnnnnnnnnnnnnnnnnnnnnnnnnnnnnnnnnnnnnnnnnnnnnnnnnnnnnnnnnnnnnnnnnnnnnnnnnnnnnnnnnnnnnnnnnnnnnnnnnnnnnnnnnnnnnnnnnnnnnnnnnnnnnnnnnnnnnnnnnnnnnnnnnnnnnnnnnnnnnnnnnnnnnnnnnnnnnnnnnnnnnnctgttgtagctgccggagtcccctctgggagagttgctgctggccaggctgggaccgtcctgttgtagctgccggagtcccctctgggagagttgtagctgccggagtcccctctgggagagttgctgctggccaggctgggacggtcctgttgtagctgccggagtcccctctgggagagttgctgctggccaggctgggaccgtcctgttgtagctgccggagtcccctctgggagagttgtagctgccggagtcccctctgggagagttgctgctggccaggctgggatggtcctgttgtagctgccggagtcccctctgggagagttgctgctggccaggctgggaccgtcctgttgtagctgccggcagtcccctctgggagagttgctgctggccaggctgggacggtcctgttgtagctgccggagtcccctctgggagagttgctgttggccaggctgggaccgtcctgttgtagctgccggagtcccctctgggagagttgtagctgccggagtcccctctgggagagttgctgctggccaggctgggaccgtcctgttgtagctgccggagtcccctctgggagagttgctgctggccaggctgggaccatcctgttgtagctgccggagtcccctctgggagagttgtagctggccaggctgggaccgtcctgttgtagctgccggagtcccctctgggagagttgctgctggccaggctgggactgtcctgttgtagctgccggagtcccctctgggagagttgtagctggccaggctgggaccgtcctgttgtagctgccggagtcccctctgggagagttgctgctggccaggctgggactgtcctgttgtagctgccggagtcccctctgggagagttgtagctgccggagtcccctctgggagagttgctgctggccaggctgggacggtcctgttgtagctgccggagtcccctctgggagagttgctgctggccaggctgggacggtcctgttgtagctgccggagtcccctctgggagagttgtagctggccaggctgggaccgtcctgttgtagctgccggagtcccctctgggagagttgctgctggccaggctgggaccgtcctgttgtagctgccggagtcccctctgggagagttgtagctgccggagtcccctctgggagagttgctgctggccaggctgggaccgtcctgttgtagctgccggagtcccctctgggcgagttgctgctggccaggctgggacggtcctgttgtagctgccggagtcccctctgggagagttgctgctggccaggctgggaccatcctgttgtagctgccggagtcccctctggtgcctgtgcctctctctggtatatggactcccaggacccccttcctgccatgagtgtttactcgtgggtgtccccattttttgtttttgttttaatttgaagtgacagcgggcagcaaacgtctggagcagatgttagggttggactctcacttggttctaatgtgaggtcatggtcagggctggagttgaattttggactggggttaagattaaggtcggtttcatgtttaagggcccttcttctgtagagttccccctgaacatccccctgtaaggcttggttatgagcccctccaccccaggctgtgtcagttgaaccatctgaggctgtggcagaccctcggtgaatgccacagctgctctcaaggccactgcagggaagtgtgtgttgaggaagtaactgggccagtgggatgggtaggatcggagtccagggtcaggtcaggggagaactgtggtaaggtttgggtttgcataaggggcagcagatagttacttctggtttgggctggtgttttggaggtggcccttagtgttggagggccctggtttgtgcatgtgtggggcctcttcctctttttttttttttttttgagatggagtctgcctatgtagcccaggcaggagtgcagtggcgcgatcttggctcactgcaagctccgcctcctgggttctcaccattctcctgcctcagcctcccgagtagctgggattacaggtgcccaccatcatgcctggctaattttctgtattttaagtagagacggggtttcaccgtgttagccaggatggtcttgatctcctgacctcgtgatccacccgcctcggcttcccaaagtgctgggattacaggcatgagccactgtgcccggccagggcctcctcttctgcctataattgtctaaccgtgggaaagctgtctgggacctctgcgcctcagtttctcttaagtgaaacatggtctcttatggtcatttgcatccccttccccctgtggtgtcctgtggcgtttgatcctgggtggggctggactcttgccggtggccttggtctagttgcttggagggagggcgggaaggccccatctgcccctcatctgtgcgttgtggacagataccccagggctcttggagtcaccatggttgcgacttactggctatccaacctaggtgtgcttgcttggttggagttagacacacgtccctcagtggtaaggagcaggcacctgtgtcagttcatcctgatgtggtcgtcggctccatgggccaacaacacccttacctgatcaggtgccacacacagacactagggtgacaccgccagatttccctgagtacaggcagcatatttgtcaggatttaatacaagccccttatctcaatttgccctctcaacaaccccccaaggagtgattagactgttttacggagaaggaaactgaggcacagagggggttaattcagacctgattgattcagggtctgcctttgtcactcccatgccctccgtacacatttgctccaaggacaggacagtcatgacttgctacatcctatgcccactggggtcccagagtggggcctgtacacagaagaggaactggaaggaggtgccgccttctctggtgggcaggtgccacccggtgggatctggtagactgggacctgtgtaacccttcaggcaacaggatagcttgctgcctctcgacagccttgcttgccccctctagactgacaggccttgggtggggtccctggcctgggcgtggaatgggcatcccacagtgcttttgatgagtaccttggggaaatgcttctccagggtgctgtcatgcccatgagaacacacctgtgcctgggagtgtgtgcctgagagagggtaagagacaatgtggacccaaagagtgacccgacgtgacagaggcaaggaagcagaggtgaccacttctaggccagaatgattcagtagcgttctgtatattcacggtgttgtgcagccgattctattgaattcaaaacattttcatcaccacaaaagaagaccctggacacattaagcaataattctgcatcaattaccctctccctccaactctgtcagccattaacacactttcgtctctgtggactatagatttacctattcttgatatttcatgtcaatggaatcatataataagtgacacttagtgtctggctgcttttactcaacatgtttttgagcttcaccttgtaggatatatcactgcttcattccttcttatggctgaataatatttcactgttggtataaatgacattttgtttatgcattcatctgtcaatggatatgtgggtttctaccttttgactgttttgaatattgctgctgtcaacatgtgtgtacatgtacttgtttgaatatctattttcaatctcttaggtatatacctaagaatggaattttggaatcatatgataattctatgtttaacttcttgaggaactgccaaactgttttccaccattttgcattcccaccagtgatgtatgaggcttccggttttttcacatcttcaccaacagttgttactatcttttttttttgaccgtagccatcctagtaagtgtgaaatggtatttcattgtgattttgacttgtatttccctagtgactaatgatgttttgcatcttttcatgtgcttattgggcatttgtatatcttctttggagaaaagtcaagtcctttgtccatttttaaattgggtcatttatttttgttgttgagttgtaagggttctttatatattctgaatactaaacttgtgtggaatatgtgatttgtaaatattttctctgtagaataggagatccttgtcacttttttgataatgtcctttgatgtacaagaatttttaattttgataaagttcaaggtatctatttttttcttttgttgttcatgcttttggtgtcataggtcacgagggtttatcctctaggttttcttctaagaattttacggttttcactcttaggtcactgatccattttaagttttaacttctgtttatggtgtgaggtagggagccatcttcattattttgcatatgaatatccaattgtccagcaccatttgttgaagagactattcttttcccattgaatggtcttggcacccttgttgaaaatgaattgatcctagatatgtgggtttatttggactctcaattctatcccagtggtctacatgtatattcttatgccaggaccacatggtttgattactgcagctttgtagtaactttttatttttatttttttggagatggagttttgctcttgtcacccaggctggagtgcaatggcgcagtctcagctcactgcaacctccgcctcccaggttcaagcaattctcctgcctcagcctccaaagtagctgggattacaggtgtgtgccaccatgcccagctaagttttgtattattagtagagatggggttttaccatgttgggcaggctggtctcgaactcttgacctcaggtgatccacccgcctctgtctcccaaagtgttgggattacaggcatgagccactgcacccggagtgtagtaacttttgaaatcaggaggtttgagtgcttcaacttgttcttatttgttatcgttttggctaatcagggcccctggcaattccatatagacttgaacattgcttttctatttgtgcaaaaagggacattggaattttgcattgaatctgtcatcactctgggtgacattaacattttaacaccattgtcttccaattaatgaacatgggatgtccttttatttatttaggtcatctctaagcagtgttttgtcattttcagtatatagatttttttacttccttagttaaatttattcttgattattttcttcttctggatgctattataaatggaattattttcttaatttccttttcggattgttcattgctggtgtgtaaaaacaagtgatttttgtgtgctgatcttgtgccctacaactttgctgaatttgtttattagctctagtagctcttttggtgtattctttgggattttctacatataggatcatgccatctgcaaatagagatagttttacttcttccttcccaatttgggtgccttttttttaatttttatttttgcctgtctagaactttcagtacggtgttgaataccagtagtaaaagcaggcatctttgccttgttcctgatcttagggggaaagcattcaatctttcaccattgtgtatggtgctatctatgtgtgttttttttgtttgtttgttttttgttttttaaatatggaatgcttcattaatttgcatgtcatccttgtgcaggggacatgctaatctctgaatcattctaattttagtatatgtgctgcagaagcaagcacttcggatttttaataaatttcctttattatgttgaggaagttactagcttctattactagtttcctgagtgtttttataatgaaagagtgttggattatggcagatgctttttatgcatcaattgaaatgatcatttttccccctttgttctattaatgtgatgtattatattgattacattagtctgtagatttcttttcctgcaatgcccttatctggctttggtagcagggtaatactggcctcgtgaaatgagggagtgttccctcctcttctgttttttggaagagtttgagaatttgtgtcaattctttaaatttctagtagagtgcaccagtgatgccatctggtggtggacttttcttcgttgggaggcttgtggttaaggattcaatctctttgcttgttataggtctgtttaaattttctgtttcttcttgagtcagttttggtaatttgtgtttttctagaaatttgtctacctcatctagcttttctatttgttggcatgtaattgttcatagtgttatattcctttttaacttctgtaacactgatagtaagtccccaaatttcatttgtgattttagttatttctgtccatcttctctccttactagtcaatctagccaaaggtttgtcaattatgttgatattgtcaaagaaacaaccttttatttccttgattctccgctgtttttctcttttgtttatctctgctctaatcttactgtttccttccttctgctagcttttctttcttttgctagtttggtttgctcttctttctcttgtttttttgtttgtttctttttggtctttctctagtctgtccgtccctccgtccctccctctcttgcttccttcctctttattttgtttgctcttctttctctagtttcttcttttcttctctctctttttttttttggagatggagtttcgctcttgttgcccaggctgtagtgcaatggtgtgatctcagctcaccacaacctccgccaactgggttcaagcgattctcctgcctcagcctcccgagtagctgggattacagggacccaccaccatgcctggctaattttgtattttttagaggcagagtttcttcatgttggtcaggctggtctcgaactcccaacctcaggtgatctgcctgcctcggcctcccaagtgctgggattacaggcatgagccactgtgcccggcctcttttcttttcttttattggttcattcatacagacaaggtctcactatgttgctaggctggtcttgagctcctgggctgaagtgatgctcccgctttggcctcccaaagtgctgggattacaggcatgagccactgagcctcgccttctcgtttcttttttgtttcttttttttcgtgagatggagtttcactcttggtgcccaggcggtagtgcaatggcgcaatcttggctcaccaccacctccgcctcctgggttcaagcaattctcatgcctcagcctcctgagtagctgggattacaggcatgcactgccacacccggccaatttttgtattattagtagagacggggtttctccatgttggtcaggctggtttcgaactcccgacctcaagtgatctacctgccttggcctcccaaagtgctaggattacaggcgtgagccactgaacccggccttctcttgtttcttaagatgtataattaggttattgatttgagattgttttcctttttaaaagtaagtgtttacagcgttgtttccctttaagtactgcttttgctccatatgttgtatttttgttcttgtttgtcttaaagtgttttctaattttccttatgattgatttcttttttctctttctttctttttttttttttagagatgggatctcactctatggcccaggctggagtgccctggcttgattttggctcactgcagcctcaacctcctagtctcaagccatcctcccacctcagcttcctgagtagctgtaactacagggtgcagcaccacacctggctttttctattttttatagagatgggggtgtcactatgttgtccaggctggtctcaaactcctgacttcaagtgatcctcctgccttgacctcccaaagtgctgggattataggcttgagccaccatttcttttttgagcctggtttcttttttgacacattggttgcttaggagtatggtgtttaatttccacatatttgtgaattttccagttttctttcacttctcgatttctagctttgtttcgttgtggttgaaaaagatactttgtatgatttcagtcttttaaaactttatcaagacttgttttgcggccaaacatacagtctgtctgggagaatgttccatgtgtactcgagaagaattcttgaatatattctgctcttgttgggtggcatgttctgtacgtatcgttgagtctaattggtttaagtcttctatgtccttattgatctctccagatgttctacccattattgaaagtaaggtattaaagtttcttactattattgtggaactgtctatttctctcttaaattgtgttgtttgtatcatattttgatgttctgttgttcggtgtgtatatgttagtaattgttaatcaacatataatgtccttctctgtctcttgttacagtttttatcttaaagtttattttgtatgatgttaatataaccacccagctctcttttggttactatttacattagattgctttttttatcctttcactttgaacctatttgtgtctttggatttaaagtgattattttgtaagtagcatatagttggataatactttttaatcactatctgctttttaagtaaaattctattggaacacaaacacacctatctgcttgtatgttgtttgtggtggttttcatgctgcggtggcagagttgagtcattgcaacacagactatatagcttgcaaagccttaagtagttactgtccaattctttccagaaaaggtttgctgatccctggtctagaatgtcttttatagtttccctggttatagttaactgcaaatggtcctgttcagcagtagtctggtgagattcgtcacatgtagcctgttttgtctctcctgaagcttgtgaaatgcagttcttagagcatatctgagcaccctcaaggcccctttcggctgagaggagaagcaggcttctacctctgaagctagggtgagaggcagtttgactgggatgtggccccttaatggtagcttcatttgtagggtggccaactcttttggtttgcctggaaccaaggcagttcctggaacataggatttagttttaacatctggaaagcctgggcaaactggacaagttggtcacccagctggctgttcagagtcttacctatgcccccttaccccagtaccattcagggaaacccccagctatgcgaagcggcggcgactggctggccccagtggcttggcatcccctcggcctctgcagcgctcagccagcgatatcaacctgaagggggaggcacagccagcagcttctcctggaccctcgctgagaagcctcccccaccagctgctgctccagcggctgcaagaggagaaagatcgtgaccgggatgccgaccaggagagcaacatcagtggccctttagcaggcagggccggccaaagcaagatcaggtaggagggggctggcaggccctggaggggttgggagggtgaggtgccgggacctgagccaggaggagccagcaccgggaggcagagagaggcctggtggtgcatagcacctgtgtagtgatgggctagggcttcctggttggggaagggaagaaggcatctctggaggtggggacaggcacatgcacgctgatttccggttggagctgggcttgccatgaggacagtgggcagttgagggagcgtgttaggtggagagggtatgctcctacctgtgatttagaaaacacactgcattgtcaggcatggctgggaagagtcagggctggtggcctgtggtaagggggacagggatggagttgccactccagtagggcccaaaacctacaggtaagccccagccctgtccccagggtatactcatggtttcccccagccctggcacacctacaggactctgtggcttctattctttaccctcaccctgaggcctgggtccctgaggcagggatgcctggaccggagcccactggcctctctgggctgtgcattgggtgctgaggtgggcgcactggctctcagccactttgtgcctgggcttctcatcagtaagtgggaatagtcctacctaagtcattgtctttgggaagccttccagaatgccctgggcaggtgagggatcacctggcagagtctggcaactgccggtaaaagcacctgccctccctgtgccttgaaggcaggcaccgtctttgtcgtttcctagtttcatcagagccaggcactgaggagggtgtttggcagacattgttgagtggaagagttacataaacagtatgttgttgtcaggatggccgccggcctttacagttctgtcagtccaggcccgctgttgggctgaatggcatgtgtatactagctcctttaaccttgacgaacgtacatgttcatgctctattaataccatgttacagatgagcgtcctggtacgcaggtggggcctgtgacgggtccagagtcacagagctacggatcagcttcactgggccccaggtagacccaatccccaactttctaagcctgagtgttcagcagagggctcagggtgcagcagggcctatggaaggcgccccttcctgtgctgccgcccctgctctgcagcctggtctcagcgatgtctccgtgtctgtctttgcctgggcttgttggactcgcaaggctggctgtactgccccaaatctcaattctcccctgaagctttcttatagacccgcggattttctaagggctgggcggcccagtggctgaaagaacacattctgcattccggatgtttccatcccgcagaaaggctgctcctgagttggaggcacgcgttgccacaggctcctccctgcattcattttttgtacgtgttcattcatcctttcagcagacacaaaactaagacctgctgtgtgaggggctccagctcacctgctctgtggggatggcagaattctgttttttccttcctcgcaaacatttattgggtgcctggtgcgtcagaggtggtgggtctcaggaagttgacagccgagggcccgggctaagcagcagttaggtgggcagtgatccccttatggggctgccctggtgagtggacaagggtctgcagctctcgggaggggctgaggaagttcggtgccccgaggagagaagtcaccccctgggggaggcgaggctgggccctgcaccgcgcgggtcgctgcgccctctgtcggctgagccggaccgggacccgacccccatcagccccccagtatcacacggggcacggcgggggagtttgggctgagagcccgtcacttaacagctggcccaggggtcaggatgttagagtagttcaggtgttggcaactgcgtgacggacagcccacaggaggggaaggagaggtgccccgtgtgactagagcgtagcaaactgccaagcccgagggagcctggctcttggaaaagcgggtggctctggcctgcctgggtactagggagccactgcaggcttctgagcagagccccagtggaggagcgagagctcaggctctaccccagtctgggagtggtctggggaaggtgggcatcacgcagtgggcgtgggcaggggccggtgtccaggacgaggggacccaggcctagagggggactgggcacccagcgatccgggccctggacctggaggggtggggggggcgcccctccctcccgttcaccggctccaggcggctttgctggtgcccgaagcccccgccccatcccccgctcccactaggctgccctgaccaccgtcccgcgtccgcgtccgaactccccctcccgggggtcggcggcgaggggagggcgggagggagggcgcgagggccgccaccaccgcccgcagagggaggagcccggccgtggaggaggcggggcgcggggcggccgcggcatggagcgagcctggcgcgcccaggagctgtattcgaattcgagctcggttccccgcgccccctgcgccccccgcaccgccgccccggggcccgaagcggaaactttacagcgccgtccccggccgcaagttcatcgccgtgaaggcgcacagcccgcagggtgaaggcgagatcccgctgcaccgcggcgaggccgtgaagggtgaggggcgcgggggggcgcgggggggcgggcccggcgcggggagggggcggcgccgcgcgcggtgctggccgggccggggcagtggctctggggtctcctctgccggggcggccctgggcccttgtgggatccctggtgtcacggtgaagggctctgcctggggaaggttcctgccgtgcgggtccctccggtgctctgtcgttccgggctccctgtgtcaccacggaggctcctctctcgccacgggcgtttctgtgtccccgggggtctctgcctgaaggaccctgtcccattacagagcttccttgcattgcggggttcccgtggcacttctgcagcttctccattggaggcccctgcgatgtgggggacccttgccgtcgtggggtgtctgtgaccgtcatgtgggtgtttgtgttatgcaggcttctgtcaccggggcttcctgtgttctggggggatcgcgtgccatgacaaacccctctcattctgggggtctcggggccatcactgggctcctagcctcagggccggctgaggtggaaacagcccagctggtgcatcacgtggcctcacccactggccacagcacgatgaccccgagctctcggcagtgacccctgggtgggtgacagagccaggatgggggtcggttgaaggggctgggggagcatggtcagctgggggtgggggcagcagcaggagtgtggcccctgcccctgcctgcgcccctccccgagtgtgtccatctgtgtgtctctctgtcccccacatgcccaccctgtgccgagcccatctgttcctttctctcttctgcgtggatcccaaaatcttcccagggaaaaagctgggagaaagtgggaagggaaggagggaaagggcagggggtgggtgggcagaacctgctcctgaggtggggtaggcgcccagctctgctccccactgacggcctgtctggcttcttcctccagtgctcagcattggggagggcggtttctgggagggaaccgtgaaaggccgcacgggctggttcccggccgactgcgtggaggaagtgcagatgaggcagcatgacacacggcctggtgagtgaccccacggctccccgggcagctcccaaggggaccaccccttccagtttccctttgttctctcttggtgctaaatccacatggatattcatagagaaaagactagaggtaaactcaaacaaacactcaaagtagatgcaaacttgtgtacatgacacagacacgtgtgcacacactctgcatatacttgggaacatgcgtgtatgtaacctgacgcttcacgtgcagtggagacacataggacgtgtgtgacggggcctctgtctgtgtgatcccacattgactcccagtgacttgcaccccaccagcacagtccttcagaaacaccaggtgtgtggaacgcatgattcctgcgtagctggcagacatgtaaggaggtcagtgtgagaaaagaggcgtttttccaaagtggacagattgtccaagtgggcagagcaggcaggcccggagcagccaagaggaaatgaggccagttgggcctggaggtgccctggtgagtgccctggggcagggatggtctgagggcagcaggtgaggctgggctggtcctcagcctgcagggaggatgtgaaggtgaaggctgcagctcctgggttggtgagtggctgctgtccagccctgctgaccatctggtcctttgggggcccccgggctggagctgggtgcgtgtcttgggggtgcccttgcaaggaaccctcaggggtcccgggaggcccccagatccatgcatgtgcttctgtcctggagagctggtgggccaagcaaacctctcctgagtgatggtcactgggggccatcggtggtgtgtctggatcaagggtgcatgcaccctccctctgcatgtgaagggctcaggcctggggttactgtgtccccatctctgtgtccccacctctgagagtttcccagcgactccacccctgtacggcctggacccctgccctgtgctgagctcagcagaggcccagggaggcaggagcttcgccactgaccttttcctgggccggtgccctttcctccttccttggccttgttctgccttgctctgactggtggcttagagtgtggaagggacttggccccctgttctcagcccgcggagggtggatagggcagggtccagatgggaaatggtttcagagatttgggccctggttcagacagtatgggagaggggaggggaaggagaggtagggggatccacacctgtggcgggagcgggtcttgagctcccccacgtggtggtgaggaaggttctggtttgaggactgtgtggagtgaggggcatttggacctacgtctgaagctgacggggagggaggggggtttaggctggagtcagaattggagagcagcaaatgttttttaggtgtttgtcatgtgctgggccctgtgctgggagccgggatcacggaggctcagctggaagccttgtgggagcagtggctgtgacgggggccgtgtgagcgtgggagctccctgggctggcctgaaggagtcagagagggcctcaaagcagaggcattgtctgagctgagtcctctaggtggtcagcggctggggctgaggggacagccgtgtgtgcagggtccgtgtggcgctctacagctgtgtgtcagcacggcctgctctgagtgcctggcacagttttagcacttctacacgtataagtcgttgactcatcccagcagtcccaagaggtggggccacttgttgttattccatttctagggggtcacatggccctgaggggcaaagtcttgtttgcaacacaggcagcaagttctatgtgagtgaaacgcctgcatggggtgaggggcgaggctggtgtggggaccacgagggtggtcaggtggcatggagtcaagtgacagtgtggcatcatggcggagggaacccagccgcagtgtctgattgtgcaggttgtgtaggatcaaagcccgggctgggcagagcagagcaatggagaggagggttcaggtctgggctccagccagcagccatggtgtgtgtgacctggggagtgagtgtcagaggtcccggggtagacgggagtatttcatgagtgggcagcgggagagggacctgcggaggctgcctgcgaagggcagggagtgggagcagtgacagtgccctctgacctcggctgcaggccctgctggccacactgcgcagagcctctgctctgggatcccggggccgagttctgccagaggccagagtgcagcccaggaacaggaacctgcttccaacaggcccagatctgctccccccaccccccaaaaaaatccatttccgggactggagtggggacagaaaaggacttaaaggttagggaggggacatagtccctgtgcgtgcaggggctggtgcccagagccggtgcctgctgtgggatcgggaggcgagtcctggtcacttacccagcagagagcagtctcccacggcacctcctggcaggcagagggtggagctgtgagggagggaatggagaagcgaggtcaggtgtgttctggaggcccagcaggagcaggccctgtgccttccctcccctccctccttccctttctttgcagtaaggtcagcacttgggtgggtagtaggagatggctgtgttgggcattttctcttcagctggcttttatgtgtcttattaacaaaactggaaaaatgagtttgtgttatgtaatccatacaatttgtttggttgacaacatctgaaaacaggaggctggtcaagtgcaagtgtggcgggttcttcagcaggcagcaccatgacacttccgtgcctctgtcgacgtggagaagggtgtgatggaggaaaggaggggtctgatgccccacctgagtggtgatgaggcttggcctgagctggccttaggttcagcgggatgaggggtgcaggtgtggttggggaatgccaggataagatataggtcatcagaaccaaggggatcctccaagttggatttctctattctatatgggcgggcttagagggggctgttgacttactgagagtcacacaacgtagtagctgggacctggaatccagcccgatacttttttgatatctgtgccttctgatagaaataggcactctttcctctttccgtccggccactgctccacctatgtttacagccatctatcctttgactcacccacccatcccaccatcatcttcttaaccgttgactcaccagccaacccaatccaccacccctcccttcctccatccatccacctctccacctacctgtctacacacccagtccatccatccatctacccatgtatctgtctgctctttgacctatctacccatggccctctccttccctccctccatccactggtccagtgcctttcaatccacccttctgtccgtctatctcagatgcacctgtccaccatttactctcctagtcagcatcccttctgtccgtctatctcagatgcacctgtccaccatttactctcctagtcagcatgcagaatgcctgtgacgtgccaggtgctgtgctgggtgctaggatcacagagataaagaacatgtggcccttaccctcaaggagctcacaattagtgggggaaacaggtcatcgaaagctgcaggttatctttctgatctcatttcctgccactctctctagctccctctgctccagctgcacaggctctgaactctctcaaatgctgcaggctgatgcctgccgtgggcttcccctgaccacccccgctcctgggaagccctttgcccacatatccacaggctgctccccatcctcagcctctgctcagccctcccgtgggggtgaggcctttgcgtgcctttctctgccctccctgatctgctcgctggtctcctgagcacttgccagcattcgcatgctatgtctttatcctctgtttatcctgtctcccagaacagattataaaccccacgagtgcagagactttgttctcttctctgctgtatttgcagagctggtacacagtaggagctcaataaatacttgctgaaggaaaacatggatcttgagaaatgctaccaagagaggaaatgaggaaggtgctgagggatgaaagcgaggcagtggtggtgctgcctgtggggcctttgcggtcctggagagtggagctgcggggctgggaaggctggtgggtggggctcgcaggcagctggaggagctcgtgggagcagagaggtcatggctggaggtgtggctcgaaccttcaggtcagtgagggtggagtggtgggcagacagctggctagcttggtgctggccatgtgggacttgagatcaagaggacagttggggaccaagctctgtgggatgcatcgaggtcagggcaggggacccagcccacacacctagatcccctgccccactcacagttagtctgaagcaagggaccccatgaggttgagcatcaaggagctattgtgaagaagttggtgaagacagaacgctgcttccatgccagcgcctataggcacatagcacggcatttgtacatgagtgtgggtaatgcagattcagatgtgcacacacacatgcatgaacacacctcacacgcacatgacggcaggtcacacagacacatgagcacggcacttgcacacagtgggctcatatagagacacgtgcatgagcacagcatctacacatgaccacggatctctcacacacacacgtatgtgcacacccccctctttgctcgcagccttggggctcacttacgctctgtggacggctctggccttgtttggactcctggttcagcagctacttaggaaagagatgagctgctgccccctcttgggccctgacccacggaggtcagaattccctacatcatcccctcagccttcttacctctggacccaggactccaggatttggggccccctacttccatctggacacaaccaggccaagggggtgtgtgtgggcagagactggtgaccagcatgggtgagggcagttgaggcaggccagctggaggccacgactgtccatcagctcccgatactcccttcagaaacgcgggaggaccggacgaagcggctctttcggcactacacagtgggctcctacgacagcctcacctcacacaggtacgtgcagggaccctggctggcgggagcatgcatgtgggacgtggggcaggacctgcagtgtagagggaggccaggtatgaagaggtcagaggagggcaagggaatgtgcctggccgacctctcttctgctgcccggcctgtcagtcccggggtgactgcagggtggactgtggccggccaacctcgaggcagggcttacctcactcctccctgctttccttcatcagcgattatgtcattgatgacaaagtggctgtcctgcagaaacgggaccacgagggctttggttttgtgctccggggagccaaaggtaatggggagtgggtgcccgggggtcaggcaggcaggggctgcacaccgctcagggatgtcttcagcttcttgcttctgcccccaactctgctctgccccacactccctccctgccttgcccctgcggctcccgcttttggccccggctttcctggttcctctgctcggtcgcgaccgtcgtggtttgcaacgtcccggcccaggcggcaattccttcccttcgttgttttccactgtctttgctctagagtctaaccgagtgggggcttttctggcatgggcaaagggagttttgcagagggtcatgtctaggatccttgggccggctcgtccctgcgctgtggctccccgtggccctcccccagccccgggtcactgccccccgcagtcatctctttcctgtgctgagccactcggaggttgctgtgtggcagccgcccccacccgaacctagctggtgaagcgccttcctaattgccccccgcagcagagacccccatcgaggagttcacgcccacgccagccttcccggcgctgcagtatctcgagtcggtggacgtggagggtgtggcctggagggccgggctgcgcacgggagacttcctcatcgaggtgaggtcgttctggccggtgctgcccagtgggatgctgagccctgagccctgtggtggacgtgcctggggcgtccccacccagctgcctgtctatcccaggtgaacggggtgaacgtggtgaaggtcggacacaagcaggtggtggctctgattcgccagggtggcaaccgcctcgtcatgaaggttgtgtctgtgacaaggaagccagaagaggacggggctcggcgcagaggtgaggggtcacgcttcaggcctctgtgcccaaactttcccctgaccttagacctttgacttcaggcccacattcctcttcccatccctgacccccaactgctgacatcagattcctgaacctcaatgaaccacccacacgtgtgggctgggacccctcccgatccctggtgctagactgccagtcctgtcccctggcctgaggcctttgacccctgacccctgacctcaggctgcccctcctcagatccctgccccctccttcccggcgttcccccagcccctggcgtggcagagccctccttccctacaccgccagcagctgcctggaggccggggttgccatagcaactgtgaggttgacgctgccgcgctgcttattgtcggagggaagggggaggcggcacctgagggaagaggaaaagcgtcttctccccgcgacgacgcggcacagcctgggcccaggaggctttgccggccaggcccagcccaggcccgtggcttggctgaccacaccctggccccacaaggggcagtggccacccgggcctggggggagccctggagcagcaggagccccgcccgcaaggagacccctcccagcccccaccccatggctctggtgcccccttgcttagccctcgaagcctgcagggtgggtgctcaggccagagccagccggcaccgtgacccccgccagcacccttgatcgtctcctgaggccctgattctgggggttcccagggcccctgaggccctgaccgcccgcccccccccccccgcactccctgagctccttgagccatgaagaagtttgcgtccagccgtaacctgaacaagatcctggcacagtgcgactcatcctcgcgggagtacgaggagatccaggcggtggagcgcaagtggcacctgcacctggccacgccgcgccgcctgctgctggacaggaggtccaaggcctccctcttctttgcagccccaccgccccccaagagggcccccagcaccacactgaccctgcgctccaagtccatgacagctgagctcgaggaacttggtgagtggcgggggtggcggtggaggtggacgcaggtggacggtccatgatgggcagacagggccgggagacacaggtggtacgggagggcaggcggtccagccagagggtaggaaggacaggtgggtacaagagcaggtcagaggtgaatgggtgggtgctggcgcgatggggaaatttggtgcttgtggggtgaggagagggtggcatgtggaaggggtgagatgtgagaggctggggatggacagtggggtgtccaggacagatgacggggagcagggcctggcccaccagtatgtttgcatgtgtgtgcatgtgtgtgcgtgtgctgcctctggttttccacgtctccactttgactttactcctgcatttcatccaagtgaggagagagcggtagtgaggtgaccagggtctgctgctggctctgccaggcactggctgtgtcagctctgtgtttattttaccctcttggtgactgtgcactcattgacaggtggccctgctgaccccacaggccacaggagtactgtcggtgggatgatggggcagggcctcgagcgcggcaggaggggagcaggagtgtgttggggtttgatggggcatgttctgggcacaagccctggttgaccatcaacagcctcttcatgggcaggtcttatatatgtgtccattaacaaccttgtcatgtgcacgtccagatatacttgatcatgtcctgacgtgacagtcagtagcctcttcatgggactgtcccattacgtgtgaccgttgtcctcactgtgggtatgtgctatacatgtggccatcaacagcctcgtcatgggcatgtcccactgtacgtgacagttgacaggctctttctttctttttttttttctttttttttttttttgagacagtttcactcttgttgcccaggctggagtgcaatgacacgttctcggctcactgcaacctccacttcttgggttcaagtgattctcctgcctcagcctcccaagtagctgggattacaggcacccgccaccatgcacggctaatttttttttttttttttttgtatttttagtagaggcggggtgtcaccatgttggccgggctggtctcgaactcctgacctcaggtaatctgcctgcctcggcctcccaaagtgctgggattacaggcgtgaggctctttctttctgtgatctgagcccagttctgttcccagacttaactctgcctctggtcatagaaggaaccccaactttggtcctaaactgaaccctgaagtcctggccacaggaagggaccccattctggttctaggctgagccctatccctggcttcagtcttggttctaccccagccatagaaggaacccttttcctggtccccagaattatccctgacctcactcatgaaccaagccctgaccctgtccttgccacaggctgagctgccccatgccaagcaggtggtcttaactgcagtttagttcagggtggagaacagctaccaacgtccattgggctgacgtggtcagaattttcaccatagctattccaaataaaataaaacccaaagaaaaaaacaaaaaaccccatgtagataattcagaatgaaaaggagagaaaccaaagccagaggcttccatagctcgttatctagtacgcaggggcaaggggttggggtcctgaggcccccacaaggctgggagacgtggctggacctgtgagaagcgggaaggttaaaaaccaagcccaaccactggaattagcttcgaaagaactggaaatcagagaagaatatgaaaaacattaaaataaagtaaattgtcacaaagattaaaagaactaacagaactaatgagagaataggacagaacaaacaagcaaaaaaagaataagcacattttagaatgattcttttttttttttttttttttttagactgagtctcgttctattaccagctggagtgcagtggcgcgatctcggctcactgcatcctccgcctcccgggttcaagtgattctcttggctcagcctcctgagtagctgggattacaggcgcacaacaccacacccagctaattttttgtatttttagtagagatggggtttcaccatgttggccaggctggtctcgaactgctgaccttgtgattcacctgcctcggcctcccaaagtgctgggattacaggcgtgagccactgcgcccagccagaaggattcttaaagaactgttattgaaacaaaaagtgtagtcactgagataaaaaagaaagccatgcctgggataaacagtacactagacccaggtgaagaaagaaacagcaagttagaagataaatctgaggttacccagaatatagcacagaaatataaggagatagaaaatatcaaagagcagttaggacacacacacacaaaaatcacatagataattcaatgggactattgggaaaatcccagcatctacctaatgcaaggcgtggaagcaaaaataaaatgttgcctggaggcaatatttggagatgagatggcttaagaatttccgaaagttgaacaaagacatgagtcttcagtttaaagaaatataagtctcagcaaggaaataaaaacaaatctgtatccacatctttcatagtaaaactgtagaatgctgtgagcaagcagaaatctttaaaacaatgagagaggctgggtgcggtggctcatgcctgtactctcagcactctgggaggccaagacaggtggatcacttgagtctaggagtttgagaccagcctggggaacatggcgaaaccctatctctactaaaaatacaaaaattatcctggcatggtggtgtgtgcctgtggtcccagctactcaggaggctgaggtgggaggattgcttaagcctgggacgtggaggttgcagtgagccaagatcatgccagtgcactccagcctgggcaacagagcgagaccctgtctcaaaacaaaacaaagcaaaaaatgatgagagagagagagagatgggctgctggatgtcttagacgggagcagtggtccaactgacaacagacttctcatcagcagtggcagatgacagtagatgatggaagaagagcttcaaagtgtggagtcaaaattcttttccacctagaattctataccccgctaatcctgctcattcaggagtgaggcagagaggctaatcctagacctctggcactcgggtcatgagggtccaaggtcagtcacggggagctgacctgtcaattgaagatccaaactgatcaataagccagcaccagtaggcagctgggtcccaggattctcctgccagaggctgtcacatagccacagtcagctgcatgttcagaagggactcttctattcagcaccacggggcttttgggcagcctgagatccgtaatcctgggacccagggactctgccctatggaaacggaaggactgcgctttgctctctgggcttttctgcctgaagaaactggtgaatgaagacgctcctttccctcccctctgggctgagtgttccctcttctgcaacaagcctcaggacaggttgctggagtcactttgcagagcccggtcttccagaggagttgctcacagcttcaggccaccataattttccaggcttttttctgagcagagtctgggggaggatgaagggacagcttagcgcagagcctctacccacacttctggagctcaggaagccaccctgtccccagaagacagctgtcctgggaagccagcagggcttctggaagtcccctctggaaatgcctgatttgaggacgccatgccagcatcagggtttccccaggtacctaagggaccatcccacaacccagtgtttttgctttcagaagatagaaatgaggcctgttggtcactgctggcatgaacacatcagaactgcctcacactgtcaagagctattagagccctttaggatccatagtctatcgagaaggtgcctggacacctaaaaagaaaagaaagtgaggtgtcagagaaagcaggtgcaagtcggaggctcctgtccaggtggctgtttgctgctcggaggatgtgggagaggcatggccctgttggaggaaggggagggaaggggtatcctgtgggggaatggggtgagcaaaggctggtgcctggaaaatggagggttgcagagctgggagtgagaggaaggggctgggtggggaccctcctgagataggtggtgagagagagaagagggcagaacacccctcctcccctcagcactgggggctcctcatggtcgccacatgcatgtctgctcggtttgtaccaggaatgtgctggggccacaggtcagtggagacccaggccagggaaggccctgtggcgggtccaagcccttcctgtgtattcacgttcccgggagaactctggacttccctgtaatttctgggcccctttttcttttgtgatgagaacatcagggtaggtgccacacccagcatctatgtgagtggccttgtcctggaaaaggtttctgtgccaaacacacttgccctgccttttaagaccgactttgaacagaacacagaggtgaccaccttaattttcagcgacacctgaacttgttttctatggggttttgccttttttctgaacaaacgtttgactgagccaagcatgatggagttgtgcatatctgtgtgtgtgtgcgtgtctgtgcgttggtgagcggacacgcgctgtctgcacctgcgtgcatgcggcacacatgtctgtgcgtgggtgagtggacacgtgctgtgtgcacctgcatgcgtgtggcacacgtgtgtgcatgggtgagcggatacgcactgtgtgcgcctgcatgcgtgtggcacacatgtctgtgcgtgggtgagcagacgcgctgtgtgcacctgcatgcgtgtggcacacgtgtgtgcgtgggtgagcggatacgcgctgtatgcacctgcgtgcatgcagcacacgtctgtgcgtgggtgagcggatacgcgctgtgtgcgcctgcatgcgtgtggcacacgtctgtgcgtgggtgagcggatatgcagtgtgcgcctgcatgcgtgtggcacacgtgtgtgcgtgggtgagcggatacgcgctgtgtgcccctgcgtgcatgcagcacacatgtctgtgcgtgggtgagtggacatgcgctgtgtgcacctgcatgcatgtggcacacacacacaagtccctgcttgtggttgtttcctccttggctttcaaggcatgtaccaactgactccagagttgggcagatttgctattcacggtctgataaagaggtgtaggctgggggcagatttgggaggtcatggtttttgggggaggtggtggtgagagggatggggtggggaaatgagtgtggataatggggcccgggtgccgagcctgcctcttactccctttactctgtttcttgattccaagcctccattcggagaagaaaagggggtgagtcatctgcctgtgtccccagggccttggctttgcctgacccctgtctgggggagtgctggtgtgtgaggaggttccagcgcaagtcagggtggcctggaagcctgggctgcaccctcctgttggccttctccctgggcatctggtaggggcatgagagaagggcctgcaaggatggatggggagttcccaggggtgtgaccctctgagactgtgatggccttgggggctcaggtgagcctggggcctgtgagctgtgcagatagcctgatggaggcagcccgtggggaggagctgggagagccccgtggaggccactgcatgcaccatggcccggacagcaggagggaaagggctccgagggtcccagagggggagctctagggagcagggagactgggccgtgttggcgtgcacgttgcttctttctgctggtcctctcggggcctgtgcttgggttgtgggacctactcccgtgctggttggttgtagggccaagcccagagctgatggtcccttcagagcaggggtctgagtcccacagcactggggaaggagcttggagctcccctggccaaagaccccaggctgttgactaccctcctgaacccccgttcaggcctccctctaccctttggggctgctccctgtatgtcctttatgttcagcctggttgcaggggagggcgcattcaggtggggacagtcacctgggcctgggtactgaggtccactgtctggtgaagtcctgggacccggcttccggcagcctcctctgcctctcgggtggatgggaatcagggcccagacagaggcttgaggtggctttctccacccaggcctgtatatttgctccacgtccgtgtacctgatgcccatccctccctctctctcgacccactgggctttccctgggtgaggacacatctgccaggcccttggcccagccctcttgaggtccccttgctgcctcttgccccagcccaggtgaagggcttccccagtgtcttctcaggtattaaaaacaggtgacaaggtctcctccagtgaccttttctgcatgcctttggggcagacatacaagctatttctggaatcttctggctctgccctctagctcgttagtggggctcccagggtgctgtgttgcagcccaggtgctgctccagttgtggaagaagtgatggctggttgatcatcccgcaggctggggccctgttgatcaaacagctgcaaacccagctgtgtcctgctgtgcacccagagggccctgggagtgagcgggtccacttggttcctgatgggctttgtttcccttaattatctaaaattatttatttaagaatatatcctctaatattggggggagatttatgtcaacctcatcagtttgtaatttgcagaattcttgatgaatcctttcccttttgaaaacacttctcacccggctccagcaccatcgccggatgaccagaaacagctgctcactaaacgttatgtgcgtcccgctgtgggtctctgggatgggtcttccagacctagagagacagcctctcctagcccgtggctcaggcggcaacgtgtctcccatgatgctgagccgtgtgtgcctcacggagttttctctccattcatatctttacttctgcagtttccggggagtatggtgcttaagtctcatctcttacttcctagtcagagatttatggcaatttcgcttcagtttgctcctgggttggataagggtgatgataaaatcctcgtgtagttgtgggatgagaggagtggtttgcataaagtcccgcatactctagaaatcaccaagaacttaacagatggtggcaatggtgacttcaactcccaaaaagaaatcattcacttcatgacaaaagcaaatgagaagtcccctcaaaccagcagcccctggtctgtacctgggcccctgtcacctggtggcactgggagctgtgcacaggcccagatatctgcagttggagcctgttttgctggtaaactcttgtatcgttcaggacacaggctgggcgctgatggaacacagagaacagtatttgctctgttctgcagacccggaagctgtctggggagatggggcacacagacatgaattgtactgaattgtgtccagtgccagcacagttgtaagcctttcttctgtgctaattctcactagagacacgtgagcgagcactgtttttatgcctgttttatcaatgaggacacagaggtcacaaagaggttatgtcaggacagagtcagtgtacagggtgggtctggtctgggttgggtacaggacagtcttggggagttccttccttccagcaatgctaagcttggggagttccttccttccttccagcaatgctaagcagattgcagaggtagaatcagcaggtgctgtgaacagctgcagattggagttggaaggagtaggaggtgtccagtctgaccgttgaaattctccaacaaggggccaagacaagagtgaaaggtgccaagacaagtgtggccagacagtggtccctctagggttggcatagccccaaagagtggagaagggcttggggttgggtgcagcctgagtgatgggtggggtgcagtggggctgctgaatgagagggccggtgcagcagccaggtggacatgagtgctgccccagcccttgctgcatgctgcacgcactggtcctcagtggacccacagggggcgagagctgcttatgtcctgggggagccatccaaccagggctctgatggtcctgagatacacgtattagtttaacagtttccaagtcactttgatcttctgtggaaacctgcttgtacatcagggtctgtcctcgggctgtgacccgctgtgaacagcttcccttccagtgcggtacagatagccaagagtggcctgtatgtgctgagaacagtgacaggacgaagggaaatggagggaaatccagggagactgtggtctctgaatcgtttgtctgtcctgtgccctggtcttctccctcatggtcagagtggcctttccttaagtgaggtccacagggtcacctggagtctccttgaggctagagaggctgcctggggtggggtctgagttctggggtgagggccttgtcttgggagcctggggtgggagctcaaggagggaggggagcggtggcctctgtcagcatcacgggtggccgggttggggaggacatggcagtggggcaggaggtggcccaggcagctgagatggagcctccttgctgtgcagagaagctggacgagatgctggcagccgccgcagagccaacgctgcggccagacatcgcagacgcagactccagagccgccaccgtcaaacagaggcccaccagtcggaggatcacacccgccgagattagcgtaagggccacgggcggctgggagcgctgggtcgggcaggcatgggggtcagactgtcctgggccctcttgacggaggtgagagcctatcatgtggacccctctccagaggggtgtgtgcaccccatggcctctctcagagactcttggggctgtctctgccccctaaatggccacagctcagcacctgctgggtttgctcttgtagcttttggtgcctctgccttcaggcagtccctgtctcacgcctgagaccaccaaggtaccccagctccgctgagaacacgacaaagcatgtctctgttccctgcccacttgccaacccggcgccttctaggctcctcccccaccctcacccagggtcggccagggtctgcacccaccctgcccaacaccgtctacactgtaccaccatctgcactgcccacacagcccaggctccaatgggctgcatcctctgctccctgagggcagagtccagacgtgattcctgggtccaggcacccacaggcactagtgccattggagtgagagcgtggggtgtctcacctctggcttaggaggaggactgggggcccccagtgccctggaacctccatattcccctccctgacccccacagtcattgtttgaacgccagggcctcccaggcccagagaagctgccgggctccttgcggaaggggattccacggaccaagtctgtaggtatggctgcgctgtggggctgcatggggtggggaggaacggggctggggccggcagggtggacttgggtttgaaggacactgcctctctctgcccataactggggtttccagtttccctctcagtcctgtctcttcctggccccagctaaaggatctcatacgttgatggacatgtggggattaggccttccccaacccagagctttcccccggcagccgacactccctgtccagtgggcaccgccccccatcgcctcatccctcccatgggcagtctcatccctgtccccagctgccactccctgtccactgggcacccccacctccccatcacctctcatccctcccatgggcagcctcatccctgtccccagctgccactccctgtccactgggcacccccacctccccatcacctctcatccttcccatgggcagcctcatccctgtccccagctcagctgcctccatcgcggttgctcccttgcagcccaagtgcatgtgaagtttctgaccctcaaaccccctgaacttgcctctcccctacttctccatgtattgctgtctccccccttcacagccagttttccccaaaaagtcacctctactgtccatcttgtctcccgtcccccaccggctcctcagcctgcggcagacttcctctctccatacccaaattgaaactgctcccaccagggtcaccggcggcctccagggccttcctccccatggatgcatggccagcactcctgctgacctcagctggcatttggtttctttgctccttcttccgtgaaacgctcctccccaaagctttaggacaacacttactggttttcccctcctttctcagatggcacctatttcaaccctgccgccccagcctcccaaatatgggaccttttcaaggctgtgtcttcagcctccttcccctctgtgcctcaccactccccagccaccatcacactccacactcaccgtctcctttcctgacccagatggggacatgtaacaagccctgcccactgtgcatccctccagacatccactctcccgtcccctgcccacctgtgcatctgtccacccacacacctgcccacttgaccgtccgttgtccatacaaaccccagcacacctcccatctgttacacataggagtaaacctctcagcacttactacgggctggacactgagcatttaatacttagaataaccatattgaggttgagaccactagtacctccattttacagatgagaaaactgaagcaaggagggtaaatgacctgcccaagatcacacagctgcccaaactcggattcctcacctgcctcaggaccctgccaatttgtgttcacacaaggccgatcctgggccaagtctggggcttggttagggaatgtgacgtgtgcagagagctcagcgggcacattgtgggtgccagggctcacggaccaatggagcccactggggggctccaagcacacctggtgtcacagaaggctgtgtgtgtcggggtgggggtacttttgagctaagatgtgcaagataaatgggagtttctgggcgataatggggtgaactgacagagcagtgtggaaaaggcatatgggtgtgtgacctggtccctcagagactgccaagagttatttctgtaggtgggattgtggggaagaaggctggtgaggctgcagctactttggagctgagaagcgctctcccctgctctccctggcctaaacactgagtgtcttccatggtttctttcttatcctctgcctcacctgatgtgtcggggtgggtggcctcacagccctgccctgcacaggtctcatcaccttgcagctggaccatggctttgttctcatgactgcctgccctggctctgccctctggtccatccctctggccaaatcaggctttccgcagagctgctatcaccccatatccgtccagcttgaccctctgtgcactcctcattgcctcagggccctggagatcggccccagtgctctcctgcttcatctggaaacatttgtctctgcctcccttgacctgggtcttctgactcttgctgttcctgggcccgaccctgcaggtctaggtccatgcacctgccctgcaggccttgagccactctcctaggactgccagttctgcactggtccctcaggcaccctcttgtactcggttgatggatgggtggacaggtgctcctttttggctcctcttggcctgctgggcctcagctgccagcatgcacattggttgggttgtcagactccccaggcccctgccccatgccctggctctgttgctctgggcacacgatgcagcccttgaaacatcaggattttgatccataaacatggagaccacctattacccacctccaaggaccactctgagtctcccccggtagatggcactcacagaccgcgtggcatgctgggagtgctcagcagctgccagtgttagtagacgtagatgctgcctcttgaggttggcacacagtgggtgctcgagaaatgctctctgctatgacctaggcagacaaagagggtctgcctctgcccccaaggggtcccacccccgccccagatggtatcagaacagattccccattccatgctgaggcaagtgacttttctttaccctaagtcagaacttggcatgctattagcattaagtttccccttatttcatctttgcacgtcactcccgccttctgcatcctcaaggtgcgctcattctgcgtcgctccatctaacacataggctgtgggtgttcactgcgtgttcatacacagtgcagggaatgcagcaggagacccaggacgaactgggcacaatttctctgtccagcggttggggatggggggaaggcagacctaaaaatcacgatgatgatgacctcggcccccttcccccattcccaggatactgctgcagttcagccctgcactgtaaaggtgaaatcgccccacaatagttgcaggctgtcctcttgacatgaggaaactgaagttcctagaggcttctgaagttcctggcagatctaaaattcaagcctaggtctgtacacaaaagcccacccttggtaccttggctacaaagagatattatgcccagcaagaagcagtgtagtactggaggcctcattagcactgcggtggctggaggaggatgcgatcaggaacaggcagtctgtattttagcgagttcataaaaatgttgaccaatctcagagtgaggctgggaacaggagcaccacgagacctgggtgtgtgggtgtggggccgtccgccccctgcagcctcactgaacacacctgcagcacgtgtgtccgcatcatgatgtccacaggggtgttcaggaggttgtgtcaggttctgctggacagcaggagcatgagggccctgagcactccagcccctgcacaggaccctaacaatgatgtctgagcaaggcatgcagaggggggttactgaagctcaaaggggctcagggcctggcctggggtcacgctgccagtaggggttaaaatgaaacatgctgggtgctcagcctgcagttccattttgattgatccgtccgttcttcccttcacccactcacccatgcgggtctctgggaggagcctctcaaggcttcctccacagggcacctccttacctgggtgggcattaggtctttctctgctggaggcctggctccagtggccacagccctgctgcccctcaccctgccagtgtgtcactcctgctcatttccgactatcttcctctcacctctggttgcctccagggctggtacttctgcgtcggccttgttgattctggggtggggagccctgtactggcccctccaagcccctcagcagttctgtccccatgtcttgcggggctgtccctgcctttctgggatatcttctcagggcctgcttgatgaccctgggtttgggcaggtcttggccccaacccaggccgtcagagtttgtgtcctttctcaggggtccccggtggggccctcctccatcctgtaactgaacgcacacctctctcctgtcctcttcacaagagccctccccgtgcagccctgggcctggggcacagagcttgggcatccagggaccagcccagaccagggtcttgctcggagcccgggctctgggctccctgtttctcccctgccctccattccccgcccaccacgggtcccaaccccatcttcccgagcattctagctcctcgcgccgggttctgccgcgggcgtccattgtgtccggacggtggcttccccggggtggagtcgggtcaaggctggcctctgtgggagggggttgccggggtccccaggaacctctccgaaggcagcaccaccccccgcccagcgccctggctggtctcaccggcccttccgtccgcaggggaggacgagaagctggcgtccctgctggaagggcgcttcccgcggagcacctcgatgcaagacccggtgcgcgagggtcgcggcatcccgcccccgccgcagaccgcgccgcctcccccgcccgcgccctactacttcgactcggggccgcccccggccttctcgccgccgcccccgccgggccgcgcctacgacacggtgcgctccagcttcaagcccggcctggaggcgcgcctgggcgcgggcgctgccggcctgtacgagccgggcgcggccctcggcccgctgccgtatcccgagcggcagaagcgcgcgcgctccatgatcatcctgcaggactcggcgcccgagtcgggcgacgcccctcgacccccgcccgcggccaccccgcccgagcgacccaagcgccggccgcggccgcccggccccgacagcccctacgccaacctgggcgccttcagcgccagcctcttcgctccgtccaagccgcagcgccgcaagagccccctggtgaagcagctgcaggtggaggacgcgcaggagcgcgcggccctggccgtgggcagccccggtcccggcggcggcagcttcgcccgcgagccctccccgacccaccgcggtccgcgcccgggtggcctcgactacggcgcgggcgatggcccggggctcgcgttcggcggcccgggcccggccaaggaccggcggctggaggagcggcgccgctccactgtgttcctgtccgtgggggccatcgagggcagcgcccccggcgcggatctgccatccctacagccctcccgctccatcgacgagcgcctcctggggaccggccccaccgccggccgcgacctgctgctgccctccccggtgtctgccctgaagccgttggtcagcggcccgagcctggggccctcgggttccaccttcatccacccactcaccggcaaacccctggaccccagctcacccctggcccttgccctggctgcccgagagcgagctctggcctcccaggcgccctcccggtcccccacacccgtgcacagtcccgacgccgaccgccccggacccctgtttgtggatgtacaggcccgggacccagagcgagggtccctggcttccccggctttctccccacggagcccagcctggattcctgtgcctgctcgcagggaggcagagaaggtcccccgggaggagcggaagtcacccgaggacaagaagtccatgatcctcagcgtcctggacacatccctgcagcggccagctggcctcatcgttgtgcacgccaccagcaacgggcaggagcccagcaggctggggggggccgaagaggagcgcccgggcaccccggagttggccccggcccccatgcagtcagcggctgtggcagagcccctgcccagcccccgggcccagccccctggtggcaccccggcagacgccgggccaggccagggcagctcagaggaagagccagagctggtgtttgctgtgaacctgccacctgcccagctgtcgtccagcgatgaggagaccagggaggagctggcccgaattgggttggtgccaccccctgaagagtttgccaacggggtcctgctggccaccccactcgctggcccgggcccctcgcccaccacggtgcccagcccggcctcagggaagcccagcagtgagccaccccctgcccctgagtctgcagccgactctggggtggaggaggctgacacacgcagctccagcgacccccacctggagaccacaagcaccatctccacggtgtccagcatgtccaccttgagctcggagagcggggaactcactgacacccacacctccttcgctgacggacacacttttctactcgagaagccaccagtgcctcccaagcccaagctcaagtccccgctggggaaggggccggtgaccttcagggacccgctgctgaagcagtcctcggacagcgagctcatggcccagcagcaccacgccgcctctgccgggctggcctctgccgccgggcctgcccgccctcgctacctcttccagagaaggtccaagctatggggggaccccgtggagagccgggggctccctgggcctgaagacgacaaaccaactgtgatcagtgagctcagctcccgcctgcagcagctgaacaaggacacgcgttccctgggggaggaaccagttggtggcctgggcagcctgctggaccctgccaagaagtcgcccatcgcagcagctcggtgagcagggcggtgcggggagggatccgtgccttgtccgtggccccgtctgtcattcctcttgtctgttctctggctctcctgttcctccttgttctgttccattccttctgtggcaacccccaacccgcccccgccatccacctctgaatctggtcttgcttggcctgcccgagagaggaggttcttctgggcgtctgacacgtcagggttgctgctcactgtgtccctgttggtgccagaagtgggagctgggctcccctcagagactcaggttgggcatgaggcgcctccatggccctcctggaggctcttggccccagggattcctgtgagttctctctctccctcccgacacaggctgtctttaccattaagggttgttttgtgttttactttggaggtacgcctccctcctcccatcctctctgtggccatgtggctgcccagtgtggctgataccctctgccttacagctgcctcctgccttgcttcctctggcggcttggagcacactgactccttttcttttgggggatctgccactaactccctatttcccatcccagaaacatttgtctcttggcaccaccttagaatcccttaaacatggattcccgtgtgtcatttctaaagtgcagtaagaagatagatggaagtcacgccatctccctgcactccatctgccctcttgccttctccccaccacttccccgtctgtcctgcccctgcccagaaggatctgagcaggggcctggcttgctgctgaggctgtcacagctgccagagccctgggctgatcccataggtctttccttgaggacccgactcccaaggctccttccaaagaggagcccttcgggcccgtgggctgcatggatgctggcggcagagctggtcatcccccacccgcccccttgtctgcctttttaaagctgcttttgccttctgtgcccctaggtctcccctctcctctttgggtctgggggggtggtatgtggatgccacctcttgactcctgcttcttgctgcctggaagaccaacctagtgggccccgtactgtcagccttggaggacagagttcacagcgtagcaacgtgttcagaacttaaggactttgcaggtcttacaaaggcctggccattctaccttctttagttcaggattcaaaagacaggtaggagcttgggaagctcatgaggcctctcctaaggtcccgggatgctgcctccagctcctgtcatcctggggaattgctctggggtcctctccccttttagccttttccaactctcagccaaactggaaagccctcttcccagcagtgcagtgttgaaggtgcccgtagaatgggtgttataatcagagtgagcagcctggtcctaggcctctgtacaggaccagacccctgaggctggggtctcctgacccacacctgaccagcccccatcttccctctctgcttctccctccgctcttctctgcctcttggtcttgatgaaaatcaaagccattttaaaaagtgcatagcacagtgcctggcctggttcgggccctcaataaacatttcttaaatggatgaaagaacaaagcaaaatgcaaatgctgtgttttgtgatttgagatctagggaggtggcttaggacaaaaacccacagaaggacttactcagcgttcagactcatcaggtgtcgatcccccatggtcgggctcaggtgggcccaggtctcgtcattggctctgtcctctcctgtgaggcagctgcagcagttgcagggcagggtcaggggattcctcagccggaacctctggcacttccccttctctgagttcatcctcccacggtgctctttagcattctgtcttgatcagggtacggttctcttagcccttggctctggctttcaccaggaccctgtttgtttttctttctcagatgtgggatggggaaggacaagaccagcagccctgacccttacgtgacgtctgttcttttactcagtagttcctgcaaaattctgatctctgattgggttcatgtgggtcctctgcttttccctgactgatcactggggtctggggacatagggctgtcatcggccaagcttgagtcctctgttctcccaggagccagggggatgggtccgcccacctagcaagcaggtgctgagagtgaggggagggggctctccagatggaagtccagtgctgtcccttgagtaagtagatgctggacagcctgtagcaaccaatgttctgtgacacggcccccactggcatcagcaactcacttccttgccggtcattggcttggagccatcagagggccctgatgtcggtgctcaggaggtcacagcttagtgctgtatccctcccctgtgaagtgtatttacagcgagccaactgcacaggctatcgcgaggctgcacacggcatcacctgtgaagcacctggtaggcccagggctggggcctgtggacccctcactggtgtgagctgccattgtctttgctgtcactgacgacacctaggtgaggtcttagagtcctttgtgggaaaacaagcctgttggatgcagcactggagacggtcctgccgtatcagtttgtcttcacaccgttctgttagacggacactaacagaatcctcatgttccagacaatgaaactgaggtaccagagagcttccttgcagacagaaaacggtggtctgcctgaccatgagccctgctctctggctgccgtaaccagggccgctgttgttaagccccttctgatgacacacaatgggcttttgcccagtaacgcccctccacagaagtggcaggtgtgtgcatggcacagactcacccccgctgtttactggtcatgtttgtcataagtagcacctggtgccacctgagtggcctacccgggcctgcttttccttctcagtttgcctctgtgttaccttctgttccagctcactcttcctttcaccctcttgcgctccttctcgccctcagacctgggctgaactacagccatctggaggggcccctgcccaccctgggcccttaacttccggtgcttctggctgcaggcagcggagcggagcacaggacacttggtgatgtctgagtccagtcctgtttcagatctggtccttgtgtgcccaccgtggctgttgtcagctcttgtcctgcggcccctaatggctggagtccggtactcactgctcacttagggataaaactgctggtggaactgcctaaagtgtgggaggttctgacatccaggtatggctgcttccttcccagggccagtcgtggcagaggcgctaggtcaccctcagggccataccctgagctgtgtctccagccccttgtgttccacagtgtttgtctcccaggcccatccttctcctccctgaccgacaccatgaggaagggaatgcccacccaccttttccagagatggctcattcctgatgtgctttagccacaaggtgttctgtggcctgagagctttctggacaagttaagctgtcctgtatgtcgtggaaccaaagctcggtaacctgtggaaaaatgatgagctctggggccacctttgattttcaggggaacctggaggatgtggcactctcatgctgcctctggaaggtccaggaccttcggccttttgaatcctcgatcccagattgtccacctgctctgtgctcccagctccaagtctagctctgctggacagaccattcatctgcccagagcccctcctcggtctctgggccccacacctgactctgaggctacatttgggcatgattcagacctgactccgagccccacaactggccacaggcaccccatctgtctgaggctctcacttgtctctgagaccctggcttcacacctggctctaaactccatttgtcttccaggccccgtgctcggatctgaatcccatgtggggtctgaggtccatagtaaggctcacgtctgccttggcacttagctttacatgggactctcacatctggttttgtaggtaaagttcatggcaaagtagctttggaaacacaaaaagaggttctttgctgcagtacttctggtgcctttgacaagcttgtgtggaggagggcactgtgtgccgtggtctccagacctgctagagtcagttcctaggtctcccagaagacccatgttcctcaaaatggtcaagaagccctgccctggtggcctgctgcagaccctgcctgctaatatatttgtcagggctctggacaaagcactgtgtgcttggtggatcacactggtaagcagggccaaggccagcagggcctgctcttttgaaacccagactgaatgtgtcacatacctgccagtgggggcccctgcaggccacatgcagctggggcaggtgtgttcccaggatccctgaaccctgttcggggagtaggaaggaggtacagaggaggggtcataggacactggggcccatcagagctggagctgggaacaggcggggtgccgaggagcaagacgtgttaccgcagaggatgcactggaagcttccgagcccatgtctggttttgtgctcctctgagaattagttcccttaatgaggcccctagtttgcaaaaggccacaggcctagaccggccccacgtgagtgcagtggcagaaggcccgaggcagtatcccgggcccgagtgtggacattttcctgcctgttggccctagtgggctgactgagttgggcacgcctggcagggacatgtcatacatactatttttgcattttgttagtgcatctcgtattcctggctttgtgctaggtaccaggaggcaaggagaactggtaagaagtggggtgaagggcctgagaccatgaacggtctggatccagaaatggcaaggggtaaagagaaggtctgggttgatattaggagttagccattggctgtagggtaaaaagaggagctgatggtggctcccaggctctgtgtgtggcaatgacagggtgccgttcactgagttggggatggagggacatgtgtggataccccagtagaggtgttggactcatcagaggctgtctgggtctcacatgtagcattcctgggcacactggccatagcaaagggtgtgagtggataatgttgcccaggagaaactgcaaactaagaggggagctctccgaaaatccatctaggaaggaagaggcctgggaaagaatgtctcgaagggaaacatgaacaggtcagcagcggggtcttgctgaccgcctggccaactgtggggcagagggcggagtggggagggtgtggcaaggccagacctctctcactggctgagagtcactgggaaacagtgagacggtgcaggattcaaatgtaggtggaaagacgtggggccgtgggggcctcagtgtgatctggactcagcctcttcagcgtggctgctggaggtgttcgtgggtgacggtgcctggtgaagtatcatgtgttagagggtgggtggcccagaagctctctgggaggctggcaggtgctgtgatgtggctgtttggcggccggagcctggccagggaggtggccagacggctgagagtgacagtgggtgtgcagagaggccatggaaacatggaagtcagacatggacactgctcgggtttgtgccctggggatggtgtgggcagtaccctcttccccaagagaaagaggagaagcagacacctgggccatgggtgaccccaggcccctccctcctgtgccctggggcctttggcaggcacagccttccttgggcgttttctcttggcctcctgacatctccagcatgctctgggaggcgggagcaatgtgaatggctctcctcacatctcttgccctcgggcccctggctccgtgggtgcctctggagccagcctgccctctgcccaggtctccagctcagcccctgccagtactacccagacaggcacaactctgctctgcccagctcggacctcctggagcccagaccctgctctgggctccggccgagcctcctggctgcgctgcccgcgcctgccctgtgcctctgccttcactgctgtggtcctgcaactcatcagtgtgcttcagtcacacctgagactccaggtacacctgccatcacaactccactgaaagctaagccttggggcaggggcagggccagggtaggtgtccatcctgtgatacaggtccccaggccagggccactttgttggggctggtgggtggaggccaggtgcatattcctggtcctgcccctctctgggtgtccacagtcaggtccctctgagtgattctctcggagtctcctctggcaagcccctccagcagtcaccaccacctgggcacccacccccaggggaccccccgacccaacaccacctggcacctccccttgggaatccccccaaccttggctgcctccccactttggcccactgtgcaggtggatccatggaggccaggtccaatgggagcaaagacagcttattctggtggttggtgcctgtgctgaggcccacctcaggtgttcttgaagcccctttctgtttgggggcacagtgtggcctcttcaggaagttctgctctggatctgagcagctgggaggaggcagtagggacagaggctgaggagaggacagaaatgaggtcccatgggagagacagagctcagatctccacagagggctgacctctcacaggtgggagacaaaagacgaaacctgctttaaggggagccccatgcgtgtgtggggcaggcactggtgatgctgtgtggtgaggacagcctttaaggggagccccatgcctgtatggggcagggactggtgatgctgtgtggtgaggacagcacagaggttggggtggggggactcagcctgggcaggggcagggagagggggtgggagggccactggagaggggcccggccaaagaggatgtcaggggctcagcacccccaggcggccaggcacctgccgagcactgcagccacgcttgtggttcacctgcacttggagactctcgcacaggcgcctctcctccaccagcagctccagctttgtccctcccacagcagctgggccctctgcacctgagttcctccctccacacctggctgcccattgtgtggttgcagctgtgggtcgcgtgggcctggccggctaactctctctctcattgctctctcctgcccatctgcatgtggctgctctgtcgagctgcgccgtggtcccgagcgccggctgtgtaagtgagcatgcccatcccatgcctcttgccgtccacacgctgtgcctgtctgcctgggtctctgctctgcgtggctgtgagaggctctggtgccactgacagccccttgaggcttcccctgacacagtggggatagggatgggaatgggaggacatgggagtgggttttctctggagctatcaccccaggtaggcctcccaccacggcagagccaaggaggggctagagctctagggtcctgtcaggtgaggctgggaagtgagctgccatcggttcttgtgtgtgtgcgtgcgtgcatgtgtgcgtgttgcgtgtctgcgtgtgtgtgctgctgccaccgcagcatgtctgtaacgcgtgtgggcaccgttgctgctgttgtgtgccgtctgtgcaggaggctgcctttgtgttgagggtgtgcacggcctcacacctgccctgcatgtgctgctgctccatacgggtacgagccctgcctagtgtctgtctcctgtgtcacggacctgttcaacctcgtgctgctgccagcctttatcgcgactcagctgtccctggaacctgcccaggatcccctgggtcttctcatgagagcagagctgtgtggggggtgggcggtgaagggtactgcccaagtctcagcgtcccgggtatctgtggatcccgccatgcccagagccggtgtcggaggctggcaggagggagaagcccgccctttgccatgagaggctgtcttttctttggttgggctgcacttggagcctggatggagtggagggggccaccagtcattcctcatattccagccagtcgctggctctggtcccaggggccaaagaaaagggccagggtaaccgtaggatcccaccctttatttcttcctctggccgggctactcccgccagccgcagccccagcccgtttcctcctggaccctgcccgctcccctccgcccgtccccccttggctgtgcgcccctcacctggcgctgacccctctccctccgcaggctcttcagcagcctcggtgagctgagctccatttcagcgcagcgcagccccgggggcccgggcggcggggcctcgtactcggtgaggcccagtggccgctaccccgtggcgagacgcgccccgagcccggtgaagcccgcgtcgctggagcgggtggaggggctgggggcgggcgcggggggcgcagggcggcccttcggcctcacgccccccaccatcctcaagtcgtccagcctctccatcccgcacgagcccaaggaggtgcgcttcgtggtgcgcagcgtgagcgcgcgcagtcgctccccctcgccgtcgccgctgccctcgcccgcgtccggccccggccccggcgcccccggcccacgccgacccttccagcagaagccgctgcagctctggagcaagttcgacgtgggcgactggctggagagcatccacctaggcgagcaccgcgaccgcttcgaggaccatgagatagaaggcgcgcacctacccgcgcttaccaaggacgacttcgtggagctgggcgtcacgcgcgtgggccaccgcatgaacatcgagcgcgcgctcaggcagctggacggcagctgacgccccacccccactcccgccccggccgtgccctgccggcagggccccccacccccaccccgggccgcgggctcggcctgccccttacgacggcgcccgggccaggaatgttgcatgaatcgtcctgtttgctgttgctcggagactcgccctgtacattgcttagtgccctcaccggccgcccagcccacccagcgcacagtcaggaagggcgtggaccagggaggctggggcgggaggtgccgggggtggggtgccctagcgtgaccacctccttcgcagctcctggtggccattctcccagagggggaacctagtccagcatgcgaggtcaggacccgccttggtgactcggggggaggggggagacattgggattctcgatgggggccaaggagcccccctgttttgcatattttaatccactctatatttggaacgagaaaaggaacaaatatctctgtccgtaatagtttcctctcccctcccttctacttccactggtcccactgcagctgcc

SEQ ID NO: 460 - DNA, 1069 bp, Homo sapiens
cggcgcggggatggacggccccggggccagcgccgtggtcgtgcgcgtcggcatcccggacctgcagcagacgaagtgcctgcgcctggacccggccgcgcccgtgtgggccgccaagcagcgcgtgctctgcgccctcaaccacagcctccaggacgcgctcaactatgggcttttccagccgccctcccggggccgcgccggcaagttcctggatgaggagcggctcctgcaggagtacccgcccaacctggacacgcccctgccctacctggagtttcgatacaagcggcgagtttatgcccagaacctcatcgatgataagcagtttgcaaagcttcacacaaaggcgaacctgaagaagttcatggactacgtccagctgcatagcacggacaaggtggcacgcctgttggacaaggggctggaccccaacttccatgaccctgactcaggagagtgccccctgagcctcgcagcccagctggacaacgccacggacctgctaaaggtgctgaagaatggtggtgcccacctggacttccgcactcgcgatgggctcactgccgtgcactgtgccacacgccagcggaatgcggcagcactgacgaccctgctggacctgggggcttcacctgactacaaggacagccgcggcttgacacccctctaccacagcgccctggggggtggggatgccctctgctgtgagctgcttctccacgaccacgctcagctggggaccaccgacgagaatggctggcaggagatccaccaggcctgccgctttgggcacgtgcagcatctggagcacctgctgttctatggggcagacatgggggcccagaacgcctcggggaacacagccctgcacatctgtgccctctacaaccaggagagctgtgctcgtgtcctgctcttccgtggagctaacagggatgtccgcaactacaacagccagacagccttccaggtggccatcatcgcagggaactttgagcttgcagaggttatcaagacccacaaagactcggatgttggtgagttctgcccacctgggcgaccctgc

SEQ ID NO: 461 - protein, 351 aa, Homo sapiens
MDGPGASAVVVRVGIPDLQQTKCLRLDPAAPVWAAKQRVLCALNHSLQDALNYGLFQPPSRGRAGKFLDEERLLQEYPPNLDTPLPYLEFRYKRRVYAQNLIDDKQFAKLHTKANLKKFMDYVQLHSTDKVARLLDKGLDPNFHDPDSGECPLSLAAQLDNATDLLKVLKNGGAHLDFRTRDGLTAVHCATRQRNAAALTTLLDLGDDYKDSRGLTPLYHSALGGGDALCCELLLHDHAQLGTTDENGWQEIHQACRFGHVQHLEHLLFYGADMGAQNASGNTALHICALYNQESCARVLLFRGANRDVRNYNSQTAFQVAIIAGNFELAEVIKTHKDSDVGEFCPPGRPC

SEQ ID NO: 462 - DNA, 6268 bp, Homo sapiens
ccccttctcgccctaccttggtcttcgtgccccgacgcggcccccaccccagctccgggaccccttcctccgccgcacccgccccggtggtccgcggatgcccgcccttgccgctcagccactccccccgcaccgaggcctaggactcccccccccaaccccgtcacagccccccagacccccgccccgtggctcggcccccgccctccgcacacacctcccgcccccacccgggaccccgcaagtaaccccccagcactggccctgagccctcccggcccccgcctccggcgcagccccctcgccacccccgcttccctcccgtctcaggccccctccccccgccgcccccgcccccggggaaggcaggcgccgagctgagccggggccgatgcagctgagccgcgccgccgccgccgccgccgccgcccctgcggagcccccggagccgctgtcccccgcgccggccccggccccggccccccccggccccctcccgcgcagcgcggccgacggggctccggcgggggggaagggggggccggggcgccgcgcgcggagtccccgggcgctccgttccccggcgcgagcggccccggcccgggccccggcgcggggatggacggccccggggccagcgccgtggtcgtgcgcgtcggcatcccggacctgcagcagacgaagtgcctgcgcctggacccggccgcgcccgtgtgggccgccaagcagcgcgtgctctgcgccctcaaccacagcctccaggacgcgctcaactatgggcttttccagccgccctcccggggccgcgccggcaagttcctggatgaggagcggctcctgcaggagtacccgcccaacctggacacgcccctgccctacctggagtttcgatacaagcggcgagtttatgcccagaacctcatcgatgataagcagtttgcaaagcttcacacaaaggcgaacctgaagaagttcatggactacgtccagctgcatagcacggacaaggtggcacgcctgttggacaaggggctggaccccaacttccatgaccctgactcaggagagtgccccctgagcctcgcagcccagctggacaacgccacggacctgctaaaggtgctgaagaatggtggtgcccacctggacttccgcactcgcgatgggctcactgccgtgcactgtgccacacgccagcggaatgcggcagcactgacgaccctgctggacctgggggcttcacctgactacaaggacagccgcggcttgacacccctctaccacagcgccctggggggtggggatgccctctgctgtgagctgcttctccacgaccacgctcagctggggaccaccgacgagaatggctggcaggagatccaccaggcctgccgctttgggcacgtgcagcatctggagcacctgctgttctatggggcagacatgggggcccagaacgcctcggggaacacagccctgcacatctgtgccctctacaaccaggagagctgtgctcgtgtcctgctcttccgtggagctaacagggatgtccgcaactacaacagccagacagccttccaggtggccatcatcgcagggaactttgagcttgcagaggttatcaagacccacaaagactcggatgttgtaccattcagggaaacccccagctatgcgaagcggcggcgactggctggccccagtggcttggcatcccctcggcctctgcagcgctcagccagcgatatcaacctgaagggggaggcacagccagcagcttctcctggaccctcgctgagaagcctcccccaccagctgctgctccagcggctgcaagaggagaaagatcgtgaccgggatgccgaccaggagagcaacatcagtggccctttagcaggcagggccggccaaagcaagatcagcgagcctggcgcgcccaggagctgtattcgaattcgagctcggttccccgcgccccctgcgccccccgcaccgccgccccggggcccgaagcggaaactttacagcgccgtccccggccgcaagttcatcgccgtgaaggcgcacagcccgcagggtgaaggcgagatcccgctgcaccgcggcgaggccgtgaaggtgctcagcattggggagggcggtttctgggagggaaccgtgaaaggccgcacgggctggttcccggccgactgcgtggaggaagtgcagatgaggcagcatgacacacggcctgaaacgcgggaggaccggacgaagcggctctttcggcactacacagtgggctcctacgacagcctcacctcacacagcgattatgtcattgatgacaaagtggctgtcctgcagaaacgggaccacgagggctttggttttgtgctccggggagccaaagcagagacccccatcgaggagttcacgcccacgccagccttcccggcgctgcagtatctcgagtcggtggacgtggagggtgtggcctggagggccgggctgcgcacgggagacttcctcatcgaggtgaacggggtgaacgtggtgaaggtcggacacaagcaggtggtggctctgattcgccagggtggcaaccgcctcgtcatgaaggttgtgtctgtgacaaggaagccagaagaggacggggctcggcgcagagccccaccgccccccaagagggcccccagcaccacactgaccctgcgctccaagtccatgacagctgagctcgaggaacttgcctccattcggagaagaaaaggggagaagctggacgagatgctggcagccgccgcagagccaacgctgcggccagacatcgcagacgcagactccagagccgccaccgtcaaacagaggcccaccagtcggaggatcacacccgccgagattagctcattgtttgaacgccagggcctcccaggcccagagaagctgccgggctccttgcggaaggggattccacggaccaagtctgtaggggaggacgagaagctggcgtccctgctggaagggcgcttcccgcggagcacctcgatgcaagacccggtgcgcgagggtcgcggcatcccgcccccgccgcagaccgcgccgcctcccccgcccgcgccctactacttcgactcggggccgcccccggccttctcgccgccgcccccgccgggccgcgcctacgacacggtgcgctccagcttcaagcccggcctggaggcgcgcctgggcgcgggcgctgccggcctgtacgagccgggcgcggccctcggcccgctgccgtatcccgagcggcagaagcgcgcgcgctccatgatcatcctgcaggactcggcgcccgagtcgggcgacgcccctcgacccccgcccgcggccaccccgcccgagcgacccaagcgccggccgcggccgcccggccccgacagcccctacgccaacctgggcgccttcagcgccagcctcttcgctccgtccaagccgcagcgccgcaagagccccctggtgaagcagctgcaggtggaggacgcgcaggagcgcgcggccctggccgtgggcagccccggtcccggcggcggcagcttcgcccgcgagccctccccgacccaccgcggtccgcgcccgggtggcctcgactacggcgcgggcgatggcccggggctcgcgttcggcggcccgggcccggccaaggaccggcggctggaggagcggcgccgctccactgtgttcctgtccgtgggggccatcgagggcagcgcccccggcgcggatctgccatccctacagccctcccgctccatcgacgagcgcctcctggggaccggccccaccgccggccgcgacctgctgctgccctccccggtgtctgccctgaagccgttggtcagcggcccgagcctggggccctcgggttccaccttcatccacccactcaccggcaaacccctggaccccagctcacccctggcccttgccctggctgcccgagagcgagctctggcctcccaggcgccctcccggtcccccacacccgtgcacagtcccgacgccgaccgccccggacccctgtttgtggatgtacaggcccgggacccagagcgagggtccctggcttccccggctttctccccacggagcccagcctggattcctgtgcctgctcgcagggaggcagagaaggtcccccgggaggagcggaagtcacccgaggacaagaagtccatgatcctcagcgtcctggacacatccctgcagcggccagctggcctcatcgttgtgcacgccaccagcaacgggcaggagcccagcaggctggggggggccgaagaggagcgcccgggcaccccggagttggccccggcccccatgcagtcagcggctgtggcagagcccctgcccagcccccgggcccagccccctggtggcaccccggcagacgccgggccaggccagggcagctcagaggaagagccagagctggtgtttgctgtgaacctgccacctgcccagctgtcgtccagcgatgaggagaccagggaggagctggcccgaattgggttggtgccaccccctgaagagtttgccaacggggtcctgctggccaccccactcgctggcccgggcccctcgcccaccacggtgcccagcccggcctcagggaagcccagcagtgagccaccccctgcccctgagtctgcagccgactctggggtggaggaggctgacacacgcagctccagcgacccccacctggagaccacaagcaccatctccacggtgtccagcatgtccaccttgagctcggagagcggggaactcactgacacccacacctccttcgctgacggacacacttttctactcgagaagccaccagtgcctcccaagcccaagctcaagtccccgctggggaaggggccggtgaccttcagggacccgctgctgaagcagtcctcggacagcgagctcatggcccagcagcaccacgccgcctctgccgggctggcctctgccgccgggcctgcccgccctcgctacctcttccagagaaggtccaagctatggggggaccccgtggagagccgggggctccctgggcctgaagacgacaaaccaactgtgatcagtgagctcagctcccgcctgcagcagctgaacaaggacacgcgttccctgggggaggaaccagttggtggcctgggcagcctgctggaccctgccaagaagtcgcccatcgcagcagctcggtgtcgatcccccatggtcgggctcaggctcttcagcagcctcggtgagctgagctccatttcagcgcagcgcagccccgggggcccgggcggcggggcctcgtactcggtgaggcccagtggccgctaccccgtggcgagacgcgccccgagcccggtgaagcccgcgtcgctggagcgggtggaggggctgggggcgggcgcggggggcgcagggcggcccttcggcctcacgccccccaccatcctcaagtcgtccagcctctccatcccgcacgagcccaaggaggtgcgcttcgtggtgcgcagccagaagccgctgcagctctggagcaagttcgacgtgggcgactggctggagagcatccacctaggcgagcaccgcgaccgcttcgaggaccatgagatagaaggcgcgcacctacccgcgcttaccaaggacgacttcgtggagctgggcgtcacgcgcgtgggccaccgcatgaacatcgagcgcgcgctcaggcagctggacggcagctgacgccccacccccactcccgccccggccgtgccctgccggcagggccccccacccccaccccgggccgcgggctcggcctgccccttacgacggcgcccgggccaggaatgttgcatgaatcgtcctgtttgctgttgctcggagactcgccctgtacattgcttagtgccctcaccggccgcccagcccacccagcgcacagtcaggaagggcgtggaccagggaggctggggcgggaggtgccgggggtggggtgccctagcgtgaccacctccttcgcagctcctggtggccattctcccagagggggaacctagtccagcatgcgaggtcaggacccgccttggtgactcggggggaggggggagacattgggattctcgatgggggccaaggagcccccctgttttgcatattttaatccactctatatttggaacgagaaaaggaacaaatatctctgtccgtaatagtttcctctcccctcccttctacttccactggtcccactgcagctgcc

SEQ ID NO: 463 - protein, 1683 aa, Homo sapiens
MDGPGASAVVVRVGIPDLQQTKCLRLDPAAPVWAAKQRVLCALNHSLQDALNYGLFQPPSRGRAGKFLDEERLLQEYPPNLDTPLPYLEFRYKRRVYAQNLIDDKQFAKLHTKANLKKFMDYVQLHSTDKVARLLDKGLDPNFHDPDSGECPLSLAAQLDNATDLLKVLKNGGAHLDFRTRDGLTAVHCATRQRNAAALTTLLDLGDDYKDSRGLTPLYHSALGGGDALCCELLLHDHAQLGTTDENGWQEIHQACRFGHVQHLEHLLFYGADMGAQNASGNTALHICALYNQESCARVLLFRGANRDVRNYNSQTAFQVAIIAGNFELAEVIKTHKDSDVVPFRETPSYAKRRRLAGPSGLDRPLQRSASDINLKGEAQPADGPSLRSLPHQLLLQRLQEEKDRDRDADQESNISGPLAGRAGQSKISEPGAPRSCIRIRARFPAPPAPPAPPPRGPKRKKAVPGRKFIAVKAHSPQGEGEIPLHRGEAVKVLSIGEGGFWEGTVKGRTGWFPADCVEEVQMRQHDWETREDRTKRLFRHYTVGSYDSLTSHSDYVIDDKVAVLQKRDHEGFGFVLRGAKAETPIEEFTPTPAFPALQYLESVDVEGVAWRAGLRTGDFLIEVNGVNVVKVGHKQVVIRQGGNRLVMKVVSVTRKPEEDGARRRAPPPPKRAPSTTLTLRSKSMTAELEELASIRRRKGEKLDEMLAAAAEPTLRPDIADADSRAATVKQRPTSRRITPAEISSLFERQGLPGPEKLPGSLRKGIPRTKSVGEDEKLASLLEGRFPRSTSMQDPVREGRGIPPPPQTAPPPPPAPYYFDSGPPPAFSPPPPPGRAYDTVRSSFKPGLEARLGAGAAGEPGAALGPLPYPERQKRARSMIILQDSAPESGDAPRPPPAATPPERPKRRPRPPGPDSPYANLGAFSASLFAPSKPQRRKSPLVKQLQVEDAQERAAVGSPGPGGGSFAREPSPTGPRPGGLDYGAGDGPGLAFGGPGPAKDRRLEERRRSTVFLSVGAIEGSAPGADLPSLQPSRSIDERLLGTGPTAGRDLLLPSPVSALKPLVSGPSLGPSGSTFIHPLTGKPLDPSSPLALAARERASQAPSRSPTPVHSPDADRPGPLFVDVQARDPERGSLDAFSPRSPAWIPVPARREAEKVPREERKSPEDKKSMILSVLDTSLQRPAGLIVVHATSNGQEPSRLGGAEEERPGTPELAPAPMQSAAVAEPLPSPRAQPPGGTPADAGPGQGSSEEEPELVFAVNLPPAQLSSSDEETREELARIGLVPPPEEFANGVLLATPLAGPGPSPTTVPSPASGKPSSEPPPAPESAADSGVEEADTRSSSDPHLETTSTISTVSSMSTLSSESGELTDTHTSFADGHTFLLEKPPVPPKPKLKSPLGKGPVTFRDPLLKQSSDSELMAQQHHAASAGLASAAGPARPRYLFQRRSKLWGDPVESRGLPGPEDDKPTVISELSSRLQQLNKDTRSLGEEPVGGLGSLLDPAKKSPIAAARCRSPMVGLRLFSSLGELSSISAQRSPGGPGGGASYSVRPSGRYPVARRAPSPVKPASLERVEGLGAGAGGAGRPFGLTPPTILKSSSLSIFPKEVRFVVRSQKPLQLWSKFDVGDWLESIHLGEHRDRFEDHEIEGAHLPALTKDDFVELGVTRVGHRMNIERALRQLDGS

SEQ ID NO: 464 - DNA, 2945 bp, Homo sapiens
gcccggccccgacagcccctacgccaacctgggcgccttcagcgccagcctcttcgctccgtccaagccgcagcgccgcaagagccccctggtgaagcagctgcaggtggaggacgcgcaggagcgcgcggccctggccgtgggcagccccggtcccggcggcggcagcttcgcccgcgagccctccccgacccaccgcggtccgcgcccgggtggcctcgactacggcgcgggcgatggcccggggctcgcgttcggcggcccgggcccggccaaggaccggcggctggaggagcggcgccgctccactgtgttcctgtccgtgggggccatcgagggcagcgcccccggcgcggatctgccatccctacagccctcccgctccatcgacgagcgcctcctggggaccggccccaccgccggccgcgacctgctgctgccctccccggtgtctgccctgaagccgttggtcagcggcccgagcctggggccctcgggttccaccttcatccacccactcaccggcaaacccctggaccccagctcacccctggcccttgccctggctgcccgagagcgagctctggcctcccaggcgccctcccggtcccccacacccgtgcacagtcccgacgccgaccgccccggacccctgtttgtggatgtacaggcccgggacccagagcgagggtccctggcttccccggctttctccccacggagcccagcctggattcctgtgcctgctcgcagggaggcagagaaggtcccccgggaggagcggaagtcacccgaggacaagaagtccatgatcctcagcgtcctggacacatccctgcagcggccagctggcctcatcgttgtgcacgccaccagcaacgggcaggagcccagcaggctggggggggccgaagaggagcgcccgggcaccccggagttggccccggcccccatgcagtcagcggctgtggcagagcccctgcccagcccccgggcccagccccctggtggcaccccggcagacgccgggccaggccagggcagctcagaggaagagccagagctggtgtttgctgtgaacctgccacctgcccagctgtcgtccagcgatgaggagaccagggaggagctggcccgaattgggttggtgccaccccctgaagagtttgccaacggggtcctgctggccaccccactcgctggcccgggcccctcgcccaccacggtgcccagcccggcctcagggaagcccagcagtgagccaccccctgcccctgagtctgcagccgactctggggtggaggaggctgacacacgcagctccagcgacccccacctggagaccacaagcaccatctccacggtgtccagcatgtccaccttgagctcggagagcggggaactcactgacacccacacctccttcgctgacggacacacttttctactcgagaagccaccagtgcctcccaagcccaagctcaagtccccgctggggaaggggccggtgaccttcagggacccgctgctgaagcagtcctcggacagcgagctcatggcccagcagcaccacgccgcctctgccgggctggcctctgccgccgggcctgcccgccctcgctacctcttccagagaaggtccaagctatggggggaccccgtggagagccgggggctccctgggcctgaagacgacaaaccaactgtgatcagtgagctcagctcccgcctgcagcagctgaacaaggacacgcgttccctgggggaggaaccagttggtggcctgggcagcctgctggaccctgccaagaagtcgcccatcgcagcagctcggctcttcagcagcctcggtgagctgagctccatttcagcgcagcgcagccccgggggcccgggcggcggggcctcgtactcggtgaggcccagtggccgctaccccgtggcgagacgcgccccgagcccggtgaagcccgcgtcgctggagcgggtggaggggctgggggcgggcgcggggggcgcagggcggcccttcggcctcacgccccccaccatcctcaagtcgtccagcctctccatcccgcacgagcccaaggaggtgcgcttcgtggtgcgcagcgtgagcgcgcgcagtcgctccccctcgccgtcgccgctgccctcgcccgcgtccggccccggccccggcgcccccggcccacgccgacccttccagcagaagccgctgcagctctggagcaagttcgacgtgggcgactggctggagagcatccacctaggcgagcaccgcgaccgcttcgaggaccatgagatagaaggcgcgcacctacccgcgcttaccaaggacgacttcgtggagctgggcgtcacgcgcgtgggccaccgcatgaacatcgagcgcgcgctcaggcagctggacggcagctgacgccccacccccactcccgccccggccgtgccctgccggcagggccccccacccccaccccgggccgcgggctcggcctgccccttacgacggcgcccgggccaggaatgttgcatgaatcgtcctgtttgctgttgctcggagactcgccctgtacattgcttagtgccctcaccggccgcccagcccacccagcgcacagtcaggaagggcgtggaccagggaggctggggcgggaggtgccgggggtggggtgccctagcgtgaccacctccttcgcagctcctggtggccattctcccagagggggaacctagtccagcatgcgaggtcaggacccgccttggtgactcggggggaggggggagacattgggattctcgatgggggccaaggagcccccctgttttgcatattttaatccactctatatttggaacgagaaaaggaacaaatatctctgtccgtaatagtttcctctcccctcccttctacttccactggtcccactgcagctgcc

SEQ ID NO: 465 - protein, 536 aa, Homo sapiens
MILSVLDTSLQRPAGLIVVHATSNGQEPSRLGGAEEERPGTPELAPAPMQSAAVAEPLPSPRAQPPGGTPADAGPGQGSSEEEPELVFAVNLPPAQLSSSDEETREELARIGLVPPPEEFANGVLLATPLAGPGPSPTTVPSPASGKPSSEPPPAPESAADSGVEEADTRSSSDPHLETTSTISTVSSMSTLSSESGELTDTHTSFADGHTFLLEKPPVPPKPKLKSPLGKGPVTFRDPLLKQSSDSELMAQQHHAASAGLASAAGPARPRYLFQRRSKLWGDPVESRGLPGPEDDKPTVISELSSRLQQLNKDTRSLGEEPVGGLGSLLDPAKKSPIAAARLFSSLGELSSISAQRSPGGPGGGASYSVRPSGRYPVARRAPSPVKPASLERVEGLGAGAGGAGRPFGLTPPTILKSSSLSIFPKEVRFVVRSVSARSRSPSPSPLPSPASGPGPGAPGPRRPFQQKPLQLWSKFDVGDWLESIHLGEHRDRFEDHEIEGAHLPALTKDDFVELGVTRVGHRMNIERALRQLDGS

SEQ ID NO: 466 - DNA, 197066 bp, Mus musculus
  misc_feature (1)...(197066): n = A,T,C or G
ctatggagactcaagcagtctctgaaagcgcaagcttccttttcgctcgccgggcaaacgtgcaccccaggcgctgtgtcctctagcggcgaactctcgcagctcgtctgtgagcgctcacctacagctagggggtccggtcaggagtcaattgacactcaaacctgagccctgagccgggaggaaagactcccgactgtaatgatgctgagaggctcgggtgcagtcgctcgaaccgcggcgcagctgattgtctgctccacggcagatggtctttgagcacagatttgcattcattgtcttcaaatctgttttcgcgctggcgttctagatttcaacagcagatctacgcgcagatcagaatacaaaaagagaagcaagaaaataacacccagccaggaggatttttttttaataggcacctccagccgtctagggtttcagctattttgtggagcctcggcttcccgaccaccaaccttcgcgaccacagcgctcggcggacaaagtttccaggacttcttcacagacgcctcgtgtctctaacgcagggttccccggccttcagggattggggagggagattttaaaaggggggaggattcgaaacttcatcccgcagttctcagccagccaagctgtcagcaacctctcctatctgcaaaggtgcgtactcccgccctcccggggctgttttccttaactccttcaccatttcccttcacagtatatttatttaaactgcacttgagcctcattcgtccacactccgctctctccttccttcatctcgcctctccttctaacacttgtggccttcgcacgaaatgattgcttccctggaactctctgagacttggtagaccggttcagaaagacggatgccctgagggtagtgtttgcgaaaagcataaatacaggtggtcacaggtccaaaccccgggaatgaatctgtagggtctcccgcaggcgacaaaaaacctgcatctagaggcaaatccgcgctggcttcctgctcccgcgatcggaaagaaccatcatgatcctaactctcagagtcctgctactctgttttggtgcaggatttggggaccccctttcccactcaggccaaacactcgggactctggtcgggactcggtgcttgtggcttgctgtagcctttcacctcccggacttcgggcaaagcaaagcttggctaacgccgcgggaggacgtccgcccagcttgcccagagccggccaatcccgggcgtccatgcaaatgaggctccttatcgggcctcggctccgcctcccgcggcctgggttgtagtaaccattcatggggcccgcgcgctgcagcagcccggctctgcggcgctctcagccaccgcctcctccccgctccgggtcttccccttcctcttacaactgatcctgttggggatttttttttttttttcctatatcggaacggtggggaggagcagggaggggggaacaaggaggaaggggagagatcaggcagctatctatctcctcctgtttttcccagaacaggtgatgcttccaaattgtggccactttctggagaacgttctgcagctggaaggatgcgggcgacctagagtggaagccccgaggcggcagatctgaagccaccgaggataaaaaacgcaaactttgcattgtgcgtggaggaacgggctggctatttctttccaagagggcccccaaacttcggcccttgccgcctttctcggattgcttttggagaacaccatttgctggcagcattggagagtgaggacggtgttgttgtaaagtcacttttaaggcgacagtagaggaccagactttttaaatgtttgggattcaagatacgctaggaagaggaccagctctgaaagacaagtcgctgggtgccgagatggattcggtcaggtcctgggtccggaatgtcggcgtggtggacgccaatgtcgcggctcagaggtaatgagactggagccgttgtgctctgaaagtctctggttgtgtctgtctccccgaatatctcttccctttgctccctctctttctctctgtccttgtctctcctccctggctgtgcgcactggggctctccctgggcgggcaggtcgctgcgactaggggaacccttttcccgcagtcgacactgtagtttctgaactaccgaggtcacgggtgtttctccccacagtccgttctttgaggacaaaaaaaatttattaaaagtagcgttcaagctcacatcgtggcgtttactcttggactctagcggagtggcgcgtgaagatccgagctggcagccggcgcagcggcagagccggctttccggtcactcctaggttcccccacgcttcctgcgagcgcctctcctccagcatcattcaggatggcttggagactcggggagcccagcggccagatggtggcggcggcgagaggatccggagaggcctgaggggctgcaaggaaagcaaggcggccgggagctctaggaaaggggacatgcaagcgagtcctgggtgagggagagtgggacagacaaaccgaagaggccgaggatggaccgaagcacaggagtagtcggggaagaggagaaaatggagccgcagagaagagcaccctccagttttgcgggttcctcaagttgattttgtttccaaatcttcgcgtttacggatggttaaaatttgtctagggttccatcccacgaagacattccagtcccgcttctcactgtcgctactgaactgagattcatggccctcgtgtccagactacaagagccagctcctttaccctctccagacacccacaaatttcttccaggactctcgactcttcctctgcgctctgcgttctgcgccaacctccttaaatctccggacttcacgttgagaaatgaccccttttgcagataggccacatctccaggtgtcccgggtagagcgaactggctgccacccttcaaggagtggcagcaaaggccgcaagccggatgcctgaagtggcagctgcggtacccgattgccactcctccgaagccgaatgctcagttgtccccgaagcagatggtacttcgcagaggccttggctctcgaaagcggtctaggggttcgctccggcggtgacaagccgagggaaccaagacagttccgcagatccgctccttagcgggggcttaataacatttccctccagtcttcccgtccgaaataaaatgtactttattaaagttcgaaacagcagtctgtggtggtctagcgaaaattatacactttcaaaaaagtgactgagaccatgcccagcacaagaatccagaagacctcagggccaccaggctgccctcaccatctgtcaattcgccggctccacaaggttttcagtcaaatgtggcactatcagagacaggcatatagggaggtcctgtggacgcatccaaggctctggcaagctctgggtccagctatacagagtcagggaatttgagaaaacactcgagcgcggatcgcccgagtctctggccggggcgctgctgtctcttaacattctggcttcttctggctttgacacgtggagcggttcttgggggcgaaggtcctcagcagtgagtcctcaaccctggcccgttatccccagcaatgactgtaggggattttgcagtgacactgtcctggatgcaaatttcggtagagtaaggcaaaccttgaggacagaggcttggactccacaggcttcctatcctgtagtctgtgatccaaaaattcactagccaggagttaaaaggggtcacttgttcaaatgcaaaagaaccctatccccttacatctgagtcacagctttgagttttgcgggcaggcacctggggtttagcagcgcttcttaagacttcgccggcagccctggtctttctattctactaaaagccgtctggtgacaggattctgggtggctgtataacggggtggcggaagcaaggtgcctattgcaacccctctgagagagtgtggaaaagacccagaaggtttctggtcttgagtcccttggcccttctgcaatgtgtttgggcatgttagtcactgcctaacacccagtctttctgtctttcccccttgtcctgtttctctctcccaacacttcctgtgcagcggagttgctctgtcccgggcccattttgaaaagcaacctccttcaaacttgaggaaatccaacttctttcattttgtcctggcgctctacgacaggcagggacagccggtggagattgagcgcacagccttcgtggactttgtggagaatgacaaagtaagcggaccccttaaaccctcccccccctaagccggcactgaggattccatctgtcacttgcgacactctcccgctagcatcaggaatgataaattgaggtgtctcacccttagcttctaactcagtagattttccctgcacctcaatgggccccaactctgaaccaggcgttttcggctgtgcgccctagccttggggtcagtagtagcggcagtgcatcgactgacctcgcagaaaaaagttttttagacctagttttaaaagtatacccaacgctgtcgctgccagtctccagtttttcttaaaattattattactattattttctctctggcagcgggaaagagggcaggggtgtagttggttggattccgttttatgtgggaacttggggccagccttttatggctcgcttactctcccagcgactgagcaccttccttgaactcaaaccctaatttgaaagctatgtttaatcctaaacgaagggttgttttcctaaaccaatatatgctgggcccattggctgtgcaaagaaagggaaacctggggtggctagtcgccaagcccctgaacactggaagtggtcattcccagtttgttccccacccctccccaaaggcgactaatattgccctttctaaaggacaggcaggcttacccttttttgtagagcctgggagctcaaggacagatagacaggggtggggactgcttaaagacagctttgatgctggcatcaggcatcggccggctggaggcaggggtacccttaggaaatttttaaaagagagacagggacggtgaaggtcaagcggttgtaggccttgacaaatttcccaagatggccaatggtgggaaatgctccttgtccattggtctggatctggttgtgtgggggcactgcaaagttgaagaatggagggcttctgtcttttcaggagcaaggcaatgagaagaccaacaatggtactcactacaagttacagctcctttacagcaacggtaagtggcttcatgggcaggcactggtcatcaggcagccaagactggtggctgctgtgtctgcctcctactgtgcttgggagggtagaaagctagtgagtgcagtcctgtggggactctgtgtgtgtgtgtgtgtgtgtgtgtgtgtgtgtgtgtgtgtgtgtgagccttggtcgggatgacagttgaggggtgtctctcttcatgtcaattccatctaggggtttgtggcttgactgactgggtcaggctcggggcagggaaagggttggggtgggtgcgaaagggtcttggctattcttgccaaccgcctgtccccctcctgtgcaggtgtccgcacggagcaggacctgtatgtcaggctcatcgactctgtcaccaaacaggtgagaccaaagggagcctactgtggactccccacttccccgcgttgtccggtgacttctgctcctagcacgatttgcagcaggggattcacagttctctttacctcaagtctgctctggggaaccccctccccctgctctggtggccctgtttcatgtgctatgggggagattctgggtgttgggaggtgacaaattaatgactgaagacagcgaacagttactgaagattcagttcgctggagaattcctctttgctgagaactaagggcaaacttcttcttctggctgttttaaccgagcaaagactttggttctgtgctgtgggagagggagaggagggagctctcttcagggcccggtgagagggaaccgagttagggcttgttctaaagtctccaccctgtctgtgtctccttcctgacagcccatagcctatgagggacagaataagaatcccgaaatgtgcagagttctgctgacacacgaggtgatgtgcaggtaagaggcaccttttccttgggctggaaagctagggaatcccggggctgagttgccaagggaacctggtagattggaacctaagctgatctgaagctcagaaaaccctcctagttttctaggactgggaaagggaaaccagagagtggattccatccacctgacttcccagagtttcttccacaggatgggcaatctcagctgcttgcttaggtgttgggccaggcttcattttgaatctgggacgagggctcgcaccagtctctgttactgcttggccttaagcttagggtagatttctgagggtgccacttgttgagccctgggtaccaccagagagctgagaggcctattcccaggcactgcccaggtcctaggcctctctgtcctcggtgagatgtctgggcttttcatcccctgctgttaaagtcacttctcccactgcaagatttcacagcagggtcatatcttaggccaagaaggaattgtggggcagaaaatcttttgcgggggtggggggggggagggaggggacagggaatgaataggcacacagggagaaacccatgcttgggacatctgaggttccaggaacgatggattcagaggatcacactgtgaaaggcacagtctgttggagttcttggctttcccacctgccctccagagcccagtccattctattttgagccgtgcacattgtccccctttcttctactcaaacagaagaaaatagatggggacggtggtgtagggaattcactctcacattaagtctttcaattaatgttttcggagtgcctggtgtgtgctgtctagcgcatagggtgttaataccgttcacgggagggaacataccgaggagatgctgggaaggactcacttcagcaggaaccatcaacgtctgttttctacacacacatcttcctctctccacagttcgactggaggaaaagccttggttttcttccagtcctcctctctttctgagcagtctgggggtaactgcaggacacctgacttagtagggttgctccttaggcagctctctcaaggcaacccccccaaccccccaaccccttaacccagccagtaaggaaccataccaacctgacatgcttgttcaggttgtagccaagccttagaacagcaaattcaccaagaggcaaagttgaggcctggccacagcctcgacagaagtgtactgaggtaccacagcctggaaaagcctgggcctcgggtagatactccattacctcagagctcttgacaggtctggttagaatgaaaacactgttctaagatgtccttgtcggtaatacccagactccgcaggcacagtgctttgatttggttggctagtcaaaaggacatttcatctgtcactacctgttaagtatctttgtttggagagacagtcttaaaagataaaaaaggcccaagtagtccaccgtctatgacaccgccccatcactttaaataatactcagaaccccgcatgcagccgtagttaaggatgacatttttattttttaagcctaatcaaatcttccccattttatgctgtttaaatagcagcatcaatttttaaagcccctagtttagtctgcattagtaacacaatataaaaatttaatgtactgtaacttctttgcagtggagagccaggaagatgaactcttactttctctctagattctcaaacaaatattaattataggtggataaattatccattggatgggttactgtctgtagtgtgtacatgcatgcgtgtttgtgtggtgtttgtatgtgtctgggcatgtgtgtgtctgggcatgtgtgtgtatgtgtgcatcgggtgggtatatctgtgtgtgtttgtgtgtgtgtgtctgtgtatatctgtgcatgtgtgtgtttatgtgtgtgtatctgtgctcatgtgtatttttttgtgtgtgtatctgcgtatatctgtgtatgtgtctgtgtgtgtatttgtgtgtgtgtgtgtgtgcgcgtgtgtgtgtgtgtgtgtgtgtgtgtatgtgtgtgtgttgggagatgagagacatgtgactccacaggcacaagggaacttttcactagtcaaaaagggctgattctcttggaaggggacacgttccttcttcatttgaacagtcagtcacagctgtcaatggtggagtatgaataaggtgcccagttcttcagtgaccaattagtacacatagttcctttgcatggtcttgtctggtgtacctgggcacttccggaaatggtttgctattctgtattcattagtaaagggttcattaattgtctttagctttggtggtggggatggtgtgtgtgtgtgtgtgtgtgtgtgtgtgcgcgtgcgactcggtgtatgtctgtgtgtgtgataaaacaaaggggcaaaattcatctctttaggaatatttttttcttgcttccccagtgatctctgatcctctctttgctgcgttagttcatttcgccaattattagcaaggagatatctaggtgttatgttgctgcctgccacccctgcgccctcaatgctcagagggttaaaagatattataatttgaacagaagtcgtctctaggcctacagctggctaataacagagttgtattgagcgtgagcaaaccccacagctgtgacttttcgccacaaggcgcaggctagacagggccctaatcagatgggccagccgggcagtggggccagtgtctttatcggccagatggtgtgaatttagacacttttgttatgcaatcgcagggaggagttggggagaagaaaacaaaacaaaagccaccatgctgtgagcttatttgagtttgaaattagagacagatttttgaaagttgagggttgaattttaaaaaatgagtttggaagggaaaaggacacattagcttatcttgggctggagtttggctgactagacatcctcagactgagaccagggctttttttttttcccttccccagccatcttttcatctttctctcattttcccctttcctaaaaaaaaaattcaggtaagattcagaattgtgataaaaatttctcagattcaatctccactcccccaagcctttgtttttctttttccctcttcaaagattccatagggaggagaggccttgtgagcaacttgagagtgttttaagcagaaggcaccccaaataaattgtagaattaactaaaccaaacctaaacaggcagggacacagagagatagctttcactttcacacatgagaaaaagaaaccccacaaaccctcagggtagttggtagtttagttttaacctattgaagttagcctgctttctttctttctttctttctttctttctttctttctctctttctctctttctttctttctttctttctttctttctttctttctttctttctttctttccttctttcttgtcattgccagttaaaagcaaaacaaaatgtaggacagtggtggcacacatctttaatcccagcactgggacaggcagaggcaggcagatctctgtgagtttgaggccagcctggtctacagagtgaggtccaagacagccagagatacacagagaaaccctgcctcaaaaacaaaacaaaacaaaacaaaacaaaaaacaaaaaacaaaaaacaaaaccaaccaaacaaacaaaaaaccaaattaaaccaaacaaaaaatttcttctcaggaacttcagaccgaggaaactgtctgttgaagtataaccctaagagccttgaaacttaagtaggtaaacctgagttggtcattcagaccttgttcagagaggaaagaaaacgggacaatgtcacctgagtaattcagggacccagttcctgagtgtcagctcccaacagtgtcggggaccatgggtttctatgtgtcttaggtttactgcttctgttgtttcttaggaatgctaagactgactgctacttaaggatcaaactaaacacaaccagaccacattaatgagagcttcctttaaaaccaaatcaacccaaaaactggaaaaggaatttgttttaactgagagacccagagaattataaggaacattcaaatggggcaatataactagttcctattatgtttatatttttactattgaagtttagtgccccagtgaatgtctgtgtatctcttctctgctgggtgctgatattagatagaggtgatatttcaatatattcctattggaaacgaaggctcagtttctctgcatttctgtccctgcctgactccctcacgttataccatcctggcacaatagagaaaattctcatgaaaagcagctgaaattttgcaaacttacaggcctcctcagaatcgttccaccccaagctaaacagattggcacattctaagggcatatgtgattgtaattaaattgtaccagtgctgcgcacattgttgggactaggccgacaagctggtgatgtcaaaggacagtctagctttggaggtctttagctgtctagtgtgtgggtggggggtgggcctggtgcatgaggagtttgcagggaatgcaaaggctttggagggtggagtggagctggctgggaggattttatggtgttcatattggggtgcattgaaattttaagagttaagagctaatataatttcaaaggtcaaatattattttggaaggtcccagtggcaaaggctggcaatcaggaaagttgagatcatttttaatatttactaattcgatgtgtgtcttagagctgcctcgtgctcattgggtgggcaggtgttcctgtctctcaagggtctttcacgctctgagggtggtatggtggcccaccagtgaatctgtatatctctggcgagagaggggtttcaaacgtttgtaaatattcattttattttttttataaaaagatggctggagagatggctcagcagttcagaacacttgccactcttgcaggggacccagttccagtttctaacacccatacgctagctcatagtcacctgtaacttcagttctcggggactcaacatcctcttctgccccctctaaacaccaggcacacgtgtggaacacatacctgcaggcaaaccacttatatgcgtaaagttgaataaaatataaaaataaataaataaataaataaaggcagcacacacccctttaatccagtacttgggaggccaagccaggctgatctttgtgagtttgacgccagtctggtctacagaacaaattctaggacacccaggactgtccagggaaaacccagtattgaaaaacaaaacaggtggggcagtggtggcacatgcctttaatcccagcactcgggaggcagaggcaggcagatttctgagttagaggccagcctggtctacagagtgagttccaggacagccagggctatacagagaaaccctgtctcaaaaaaccaaaaccaaaaccaaacaaccaaaaaaccaccaccatcaccaccaataacaacttctttttctacctgtgttttgtttctatatctgtgtgtgtgtgatatgcatgcctggtgccctaggtgactgtgaaaagacatgggatcttctgcagcagaagctacagatgttgtgagccaccacgtggtgctgggaatccaatttgggtcatcaggaagagcagtcagtgcttttaactgctgagccatctctccagcctttacatttgcttgtgtgtattcaatcctgtggagaatcagagggagaatgggcaggctgcagagggtcactgagcagacccttgcctgggctgggacaggttttgtggtaccttgttgccacatgggtcttattcctgtttctttttgtactgttgtaatttgcatgcactccctcccatcacttccccctcatcagctgaaacctagaagcccctctaaagataatcaaccctaatgctttctggagaaggaagcagaactcagagggattcaggataatggactgagttcatgtggttagttagtgatgggttagatgtcagacctcttattcctggtctagcagtttcttagaggtggcgctctaggtctgagcttcagagaaaccatggcatggaagccttcacatgcagatggttattacgaacatgtattaggtagctctggggctggagaaatggctcagcagttaagaacacaggctgctcttctagaggtcctgagttcaattcccggcaacgatatggtagctcatgtattagatagcttcgacatgtagggatggttgtggttttcttaggagctatgccatggctacaggctgaatcaaccatacttgatagtgagtgttcaagagagtgtggtctgatgagcagcagctggggatttgtgtacagggttggccacctcacgtttgtctgtttaatttgaacagatacttttgggctggcatgttgcttcctcagagccatttggggccttttctcattgttgtagttgctctgtattctctctctctctctctctctctctctctctctctctctctcctccctcccttccacctttcttcccacgcttcctctctcagttcctcctttcctcaacatttctctgtctgtctgtctgtctgtctaccaggctccctgtacgttacagagggggacacctcaggaggcagagactttaagactggaacttggatacaattaagtcctatttctgctttgacagaattgttagctactcttctccaactctgtggtttatttccttcctattttaaaatgtataacattcttttttttatatgttcatttttaaataaaatgtataattttataatgcataaaattaaaaatgtataaatttgtaatatatgttttattttaaaatgtataaaatgtatacatttaaaaatgtataaatgcttgtctttctctttggagaatgacaacaataagtggataaataaatgcttagaaaggacacccagttctccagagaaagctggcaggccagtaaggttttacaataacccaggcagctacctttggtctattttctacattctcgcaccttttctttctttaaatatttattgggatacaaagacctgaaatacactttcatagaaatcgtcatacatcagcctggaagtaacctcgtagaccttaaaatccaaacatctgtggttaagttccagatctggctctcgggaaagttgagctctggcagcttggagagcagagaatctgagtgagtttcccagcttcagattgagggtttgaaaaataaatagaacattgttgcaaagtttgctgtgatgcagcttggggtcccgaggctacctaggctgtttccaggtgttcttactgcagtaggcttgtggagcctttttggtttaacgcggtttctctcacaccatcttgactccttcccgttctacagtcgatgctgtgagaagaagagctgcgggaaccggaacgagaccccttcagacccggtcatcatcgacaggtaggggaatgtcgccgccatttctgctcttcagtttctttccttcctgagtctccactctgaggactgatcctggaggacttctgctgtaagcttggctttgtattttctacaaggcacgaagctcctgcagccaggatttcctcatgttggcgatgtctctggaaagaaatcagggccttccttttgttatcctttatccactcccttatttaatctttggtgttttgcgatgtgactttgacagcccaggttgtgcttaaatgcgtgctccatcctgcatcagcttcccaggcgctggggtacagacttgtgccgggaccagcctttcagaaggtgaccctttaaatcactggcagatttatttgtatgtcttataacatatgtggatgacagaggatggtgaggcctttgtccaaccccagtacctctggcaggtgtggtcgatcacttccctggaggaatcagtacaccacaacctcagtgacattgttaaaaaccgtgttttgtggcttctgctggacttgaagtctgtcacctcaggtaaccatgtacgggctcctgacaaatttgctcttgtactgaggaagagtccttcctaacacacaggaccgtagtctgggttctacgctgtgttcagagtgagatagattctctgggacaagatgctaattcactgaaatgtgatttaagcgtcctcagctgtctgtttttgtgattggaaacagaacttacaaaccgacgaagaaataccaaattaacttccagcaatcatgtaatttttaaagaaaccccatattcccatccctaattttttctctttcgttaaaaaacgggaagaattccctgttgtttctttctgtgggttttcgggtttctagccaggtcctgaaatggttcgaagagacctccgtctccaaagttgttattctaatattccagtatattctcagtggggaggcggaacctctggcagtcttcccaggaaagtcagcttgctttctgcatggaaagtatagcacagccatagggacttaggaggctggacttgtgagcctgtcctagctcttgaccttggccaaagcactcagcatcactgttcatccataggaaagtgatggctgccaggggatgctgcctgctgctgtaggccgcaggagaggatggagatgcttggaagagggcaccgaacaagtggaagtggttgtgggatgtgtatgggaatttaatgtgtatttgtaatttaaagggggctgtttggagtttctctggtttttataaaagaatatatctatataccattgggagaactctctggggccattcatctttctcattttatagattaaaaatacaaaacaaaacaaagaaatggagccccagagtggagacgtgttgtgcacagttggcatggcagacttggcaccagaatatagtagatcttactgtcagacttatgctcccctcaattcaacaactgcattctcccagcatgccctctgttctaaccaatgcctagggcctgctgactacacagaatatcatctctgcccttcccacaatacctttgggatcctctgggaactggaagcatatgcaagtgcctagatacaagtcttgccctttggagtgtatacataagctcactgatcgtcatctagtctttgtggggtgtgtgtgtgtgtgtgtgtccgcccgtccgatggtgtgcttccacagtgcttgtgtgatgttcagagaacaaccttggattgtggtctttgatttctaccttgttcaagatagggactcttcttattcattgcccattccataggctagctggcccaccagtgtctgggcagtgtactgttacagcctcccatctccctgtagggggcgccagtatcacaaacactaatgctactgagtctggctttcatgtgggttctagggatctaaacaagagttctcagacctgtgctataagcactctccccactttgcccggctctcatctagtttcccccactaactccagtgcctctttcagaaaggttacctagtttcatgactctcatatctcttctggggataaatatcccatacgacagttttagaaatgcttgcagacctgtaaatgccagctgacccttgcatcttacaagcacacatcccaccgattctgcttcgcagtagctttttactttcaatgctgttggtaaaatgcattcctggataaagctaattgtgctctgagaaatacatggtaagagcaccaaagaacccagcggtggtggggtggggtgggggaggtagctgcatgtctttaattgcagcactcaggagacagaggcaggagaatctctgtcagtttgaggcagcctgggatacagagagtttcaggacagccaaggctacacagagaaactctgacttgaaaaacaaaacaaaacaaaaccaaccaataaaacaaacagcaacaaagaaagcagtctttaaaaaaattatatgtacttgtctgtgtggggattggtacacatgagtgcagttcccatcaaggccaggagagggcattggggtggctagagatggatgtcaggaactgaactctggtcctctgggagagagcataacttcttaaccacttggctatctctgcagctcccagaaggcaatattctttcttctgtggagacaaaagagtttcatattaggtgtcttcatgggttgtgttagagtgcttcacatttttctaagatggtagaaattgtgtccttacaaatataatgtgacggtggcatttgttttaaacattatgtacacatccaaagagcctggcgaagtctctgagtcacctgaaatacgtgctacttccaaacactgcacatgcacacatggaaacatacaagcagaacaatgctatacacttgtttaacgccaggtcttaggagaactgcttttattatgaacaactataaacgtatgcatttgtgcgtcttccttattgtagagtccttttctgaagacatggcttcctcaccagagccttatctcgctgctctcaaacgtctcttgggtataacctccattttaaggtcttgccttcatttttaagaagtgagaaggcacgtacgcagtcaggctcctgtttgttaggtgggaaggtgggtggagcttgtatcgtccagcgatttgattggccctgttcatatggtccttgggttcaacggctgccagcgctaaggtgtcgcatttccttacggagcaccaaatgggtgcaaagcagttgatttcagctttcctctgagtaaatgtccaggtctctcctttgcccttgttcccatactaccggctaattatctcacccttccgcacccagcctcgccagatgcagttaatttacacgtctctttttgagcctcctcgaagcgtaggcacatccctcactctctccactccagctcaagggaagaggacttactcccttggatttgtaaatgttcatggaagggggaggcacaagcatgattctccaacgttccatcccctttcaagggtttcttttgtatgtatgtgtgtgtgtgtgtgtgtgtgtgtgtgtgtgtgtgtgtgtatgtatgtatgtatgtatgtatgtgtgtatgtatgcatgtattgccttggtgactgcaacaccgcagtgaaaggatacgggtatatcgatgatataccctctatgggataacgaaacaggaggcagaaaacgtcatagagatgcccttcacatcagcaatggccaattagagtctttggtcagggtgaggcaaacagcactcctacatgacacaagggattctaggctgcaaccaaacaactgcgttgcccaaggagcccctgtgatcacaccttagcaacggctcagtttccaacaggccgctccaaattcgaaaagcagtgttcaacattgtgtggccccttaattgatagttagcttttacagtaggggatccttaccaggaacttggttttctgtttaccaagacttagctccaaacttaagaggtgtatcctgctaaatgtctctctaccttgatggctctctctagaaacatacacctactttgtgtgtgtgtgtgtgtgtgtgtgtgtgtgtgcgtgtgatttgttgttttattttattttattttattttattttatgtgcatgagtgttttgtctatatgcatgtctgggcactatgtgagtgcaacgtctcagaggtcaaaagaaggttctggccttcctggaactgaggttacagatatttgtcagccactatgtgggtgctgggcattgaacctgtgtcctctggaagagcagttagtttgtttaaccactcagctgtctctccagcccctttcaggtcagggtttctctctgtagccctagctgtcctggaactcacctgtagaccaggccatccttgaactcacatatctactagcctctgcctcctgagtgctggagttaaaggtgtatgccaccattgcctggatctattttctcattcttagttgtatcttcagcatgcttttgggaagttttgggtaaccaccccttcttccagaaagctcagaccagtagaattacaaggatttgcaaagacactgaaaagtcacgtgaattgaggggctcagattcacccatttttcagtacaaaaaaatgcaaagttcttcgggaaaatacaaaacatgacagatgtatcgcttattttatgttgctgacctgacagagctctattttgatgaggggttgcaggaggtccagcaaggtggagaaggagtggaacgggtcagcgttgtggcagcaggagccagcagaagtggcttaggaaatggcttggaccaggaagcagagggtcttcagccggaagtcggcagagctgtatcccttaagcctgtagccggctaggccccatgacacagactcaaaacagcaccaccatttggtaaccaagtgtttcatgtttcatgttcaaacagtaacaatgacacaatcctctctgtggtcttgggcttcttttggcggagaagtcttgtctggtaaatagaaatactttccattttgtagttctgagggaagctctaactcagctctggtgccacaggctggatgctctttaaactctctcttctgtctggaagtctctttggcctgatcattgagccattgggttggatacaacctcatactttgttcacatgaagaaaattttagggacaggctcataattagattggtgtgaacttcaccctttaacatttcagcatcacattgtcatctgcagagtagttcacatccaggaacctcacaacggcgaggcttccttttgaatctttacaatattgattgatgattgattgatcatgtgagtctgcacatgctctagtgcatgcacagtggtcagaagacaacatgaaggagttagttctctccttctatgaagtaggtgctggggatggaactcagttcaccagccttggcaggaagtacctttcccctgtgagccaccttgtatgaatctctgtaggaggagcctccccataggtaaccctggagggtaagaaaagaacatgcccaacccatttctcacacactaactgagcagtctcgtctgaggattctaatctcacacgtgtctgagccccctaccccaccccaccccaccccactcaggagaatcttttcaagtattgatgtgtttttattcttttttctttttctttttcaagaagcccaatgagcaacagaatggctatgattcagaaagtttgctcaaacaattgcccacagagactttttgagatgttttctcttcatcagagccttttttttttttttttgtatgtttgtttaaatggtagtaaaatatatgtgacatgacatttaccaccttgaccacgatgaggctttgggtttagtcaggcgcgttgtcatggtagctgtaagtgctctccatccatagagcactgtctagtcttttgaaactggaactatgtgcctattaaacaactctctattccttcctattcaccccacccacccctgtacctacctgtctatctcctgcatcacagataatggacttgtgcatcctttgttcttctgtgactgccttgtttcacttagcacagtatcttcaaggcagctccacattgcagtgtgtgtgtgtgtgtgtgtgtgtgtgtgtgtgcaagcttgtgtgtgatatgaggatacatgtggagaccagaagttgaaagccagtatctcccgtcacctctctctatcttattttttgagatcatctagactggctgaccagcaagtcctagtgatcctcctgtctctgcctccttagtgctgggcttatgggcacatgctgcctgctgtgtgacgttttgcgtgtattctggggatctgcacccaggtcctcgtgcctgcacagcaagtactttattgattgagtcgtttccagagtccctatttaaatgaagttgtcttcatttccggctgtcatcttggtaggcaatcttaccaggggctgttagccgggtggcagtgtcctcatccacccttcctccagttcctagaacagccacttcccatctctgagtgtcctgtagaatactagactaccttcctcctgagaaccacagcttagattcccgggctgttgctgtcgttctcctctcttgagcctgtcactcacagtccggagcttcttaagggctagaagcatgcagagagtcatcactataggattgaagccctaagtgttttgctctgtgtgtccatcctggatggacagggagctctttcccttatcacaggcatagatgtaatcctatttgcttgtatttctggtttgtggcgtagtccctgcttccccttttattatggagcctgcactcaggtcatcctggacttgagctgcacatgagatctctgcaaagccgccaaggctgggaccactccctcctgttccctggaaaagagcaagtcagatagctgagagtcattttcctccaacaactaatgtttagctaatatttaattggcactcattgtgtgctggtcattatgctaaccgacttgtggtaattaaatagctctagtagttgctttaaaaaaaatcttcattatgcatgtgggggtgtagatcagtctcaaggagttgggggtcgattggttaaggttatgagtttcagcagcaaaatcagattttactccatcaggtagttatgaatttaaagccatttggtactatgggggggggggtgtccagaattcagcgcctttgaaagcagggagacttgggagcatgacaagtcaggacccctgatgggagcagtggagcagtgaagcaggaagcaggggtgcgggcaggggttgctggcctctgcggtgttagctgagactgtataagtcacattcacctgagagatggaatggagctgtgtcagtcctcactgtggtgacctagatcaggacctgggctcctacccacctactaaccatctgtgtgacattacagagaccatgagccacctctcagcctcggtttccctctttgtaagaagagctacgttggattggtagtctaatttccctggttgtactaagcccagaagtaagttctggatgtgacagtctgtgctcatcagtgatgcttaaagctactgacctctgtgaagacacccatctccacagttggggcacctagctaatactgttaaaaggccccaaaagcctggtcttggggctctctctctctctcttttttctctctctgtgtgagtgtgtgtgtgaaaattctgtcccccagggaaggtttagattttttttttcaataaaatcatcaattatctgttcgatgtaaattgttcattcttttatgttttttctgttgtttcccaaggaaacgtctgctattttctcaacccttttggagagctacaggtgggaaagggcttgctcaggaaaggtggccctgctgcctgtgatgtagagagtctgtcaccctgtgttgaggaggaacatccctgggtaatggttaaaccaaggaagaggaaatgaaataaacctttcttctaggaagcagttctgggctattacttggttgatgcttgcctagcgtgtgtgaaacgctgggttcagccctcagcatggcataagataggttgtagtgcacacactttccatctcagcacgtgggaggattagaaattcaaggctgtttttttctgctacataataaattcaaggctagcctgggggtatacaaagctcaaaaacaacaaaacaaaacaaaacaaaaacagtgcccaccaataacatcactcctaactattcagaaggtggttgtgggtccatgaccaactaaatatacacaaacagagtacacagtgcttaggggacagtcgatgagatggcaggtcacttgcctcttatgctctgtgaccccctgctaggtctactgtgccagtctgaagcatttgtgttcttctcctttcgatgctctgtttcctcctagactgcccaccctaggtttcttgtagataataatcttccagatacaaatcctgtccttttgtcaggacccgagtcagagtctgcgtcctcagaggagtctgtctcagtaaccaaggtctttccacttgtcacgttctggttgggtattagagattatttattatcctttagcatatttgtgtctgcctcttttccctgctatggtcttatttttgggtatcagatgtcacatgtcttttaaaactcaattgcaggattgtcaaggaatttgtttgtgttaatgaaactgcctctccctttgagttgtattaaatacatgaaggtacccacgtacatgatacagtgnnnnnnnnnnnnnnnnnnnnnnnnnnnnnnnnnnnnnnnnnnnnnngggcattagaggttgcatcaagggtgcccacacatgctaggaaagtgcttcgtttccgagtcagtcattcatacacacacacacacacacacacacacacatacacacacacacacacattaaagcaaagggctacagagatagctcagtgattaaaagtacttcttgctcttgaagaagatgcaggtttggtttccagcatgcacattatggttcatgaccattggtaactctagttctaggacatccaataccctcttttgacctctgtagatatcaaatatgcatttaatacatattcatatacgcagaaaaacaagcatacagaataaatacaatagaaacaataaaacagaataaatacaacttttaaaaagccacagcaattgtcctgtttctcctgatatatctgcagtggtttggatgtcaggggcattcagttgatgttaactggcagggtgattttttttttctttttctttttttttttttttttttactacaaaaccttgaggaatttaggtgactgagaaatttgccagttcatagaggaactttcctataactgtaatcagttgaaaatgacctagcagtcttaggacaagtggttgatagattgaaaaaaaaattccaagaacagatgtcttaggttataaagcagaatgaatccttattagttcaggaagtatttacaaagggcatagtgtgtcatgaactttgctttgtgccccaaggagtaaaactgaccagaaacaaagctctcccttcaagactttattgtttagacagtaagacaaaggggcctcagacatgtcatgatgcagaaagagccacacaagagacaagatagaaacctccagggcttgtgaagggtggaggtgattgcagatttgacagaggtgggtgtggcgaaggttgtactggctgacctggagctgaaggactgagtctgagaggaggaattatgggaaggaacacatttcctggatgtcctcatgggtttagaggtacatgggcattgtgacgggaagggaggtttggaagagtatttaagatcagatttttggggaacttattatgtccccatgaaagcactgggacattattttattggtaacagaaaacataaaggatactagatagtacagttgttaagttcaaactagtattccaaagagagaacttggagagtggatgagtggtttggaatatggcagatgaaagggaacttcccatcagaaagtcagctcttccctgtctccctggtgtcaggggaagctcatcttcttgcctctctacacccccacttcgcgcccctccccactccaaagctttgctgatgttgccacgtgtccccaggaacacatgcctccagaagcttcgatcccttacaaagtgctgcagctatgccatctgtcgatctgtgagtttctcagtagcctcgatgttggtgaggaagcagaggctctaagtctagcattcaagccatttgtaagcaattcctaaatgacaggaggaaaagccaacctggttctccattaggagacttctttcctgtttaatctccccccatcagtttccagtgcagtctctcctgtctggcccgccgggtgcgcggagtcattgagaatggacagtttttgcttccgatttttttcttataaaattctaataggatcaaataacagatttgccaagaaatggacgagtcaggatgagtaagagaacaaagctttgaaactgagctctgtgacaaaaaaaaaaaattgataattgtttctagaaaatgtgtctcttcctaaactcatctacctggctaacactggaccaacagagttgtggagctggggaaagattatgattaagatggctgggatataagccagtagtggagagctcacttagcctggctaaggcctcaggctcaacctcaccccctcacccccaaatagtatggtaagacttacacacacggggtaccttttagaacttctgatgtgtgtgtgtgtgtgactttctttttatttatgttctatttttatttcttttctttgtatttatatatctgtgcttgtgtgggtattttatttcttttctttgtatttatatatctgtgcttgtgtgggtattttatttcttttctttgtatttatatatctgtgcttgtgtgggtatctgccacatgtgtgcagatgcttgggtaccagaagagggtgctgggttccacagagctggagttgcaagccattgtcagcttcccaagacggatactaggaatcagattggggtcttctgaaagagcagcaaacactcccaatgctgaatgctgtgccatctctccagtctgcctttaatttttatatttgggtaaaagggcctgagtaagttctttggggtatatttttgactcagccaagaaactaacaggtcacatggttgggagatgagacatacatgccaaggagatgagaaaatattgtctacgtgacttggagacttggggacctgcccactaggacttgaaggactctgtggatgttgatcaaagtcttgtaggaattattctttgagggtttgtttccacattgatctggagataaaaattggaggctcatttctcagaaaggaagttaggagatgggagcttggtgtccgatggcccatctaagcccaagtgtatgcggtgtgcacttgttagtgttttttttttgttgttgttgttgtttgttttgtcagcttgtcacagactagagtcatttgaaatgagggaacctcagcttaaaaaaaaatgcctctgaaagactggcaagcctctgcggcatttccttgatggatgtgggaaggctcagcctactgtgcgcgcgcagtgccatctgtgtccagtggttgtggggtatataaggacataaacagaacaagccaataagtggttcctccactgcttccattgcagttcctgccttgagttcttgccccgactttccccagggatgcagtgtgccttgagagttctaagaagaaataagcacttttccttcccaagttgcttgtggtcatggtttttattgcagcaatataatctgcgaagataaggtatttgcatcagttgaacgactgtcctcctggaaggttttgttcttgacttaaaatgactatcgtagacttactttttttcttctccacaaagattaccaggaagacagagtcgggcctggggtgcaacacagcagtttctcccttattacaaaaccttgtgagacaggcataaggaagaaatttttcatccatggatacaatggcagggatggagacatttgcaggaaggggacccctgggtgtaggctgatacttcagggatgacagctgtatgctatgagccccatatgatgccagggctttttcaaaggacagatcacaagacagtgttgaggggaggttgcaaccatggtaggtgcaaatgctctcgtgcctggtccctccaggaaagccctgaagtgggtctctatgggaagttttatctgcatgagttcagaaggtatttttccagttcactcaaaggtgtccccgacttattttttaactacatactggtactgtcaccccatatttcaagggataaaacccatctatagatgaatggtttcataagccaggtggcaggtcaaagactcatctgggtttctctctagctcccaggtcaaacactgaggtgacctgggcaagggacaggagaaactgtgggctttttgagtatcacattacaatactgaattgtaaagcttttaactggtctgaagggctggggcatgcaccaccttctaagcatgtaccatggggcagagccaggataatgaagaatgttctgtgtagccaatttcttccatggtcaagaatatttcttttatcctatgcaaaaagcattttcttatttcagaataactaagtatacattcaatacagacttagaacatgtggtctgagggcttaaagtgaacattagtcttatagtatgataatgatcacagtaaaatctggtactagaattagtttgaagcctcctctgccattcattcattcattcattcattcattcatttcttccttctcatagaagatggacttgcaaataaaactataagatacccagatagatttgtatattctatgagcaggattattttaaaaatataagtatttctcagttaaacttaagtttcagagaaacaatgaagtctttttttcttcttctgtaaagtctgtctcatgcaacatccttggaataaagttacctgaaaaaattttatttattatttatttgaaattcaataaataaccatgaatcatgtactttatacagtaactctaatggaatccatgttatctgaagaataggaaagtaatgtgtgatttcctaggcttgtggggaaggcaggatgacacatgaccctgactggtcccagagcctttaaaaatcttttctctctatgtgtgttttctctctctgtatggcttaactccttcaccttgtgttttatagaagttgattcattcgattcattcttaagcattatttaaaagagtataggcatcaggatttaagcttagaagtcacccttagctcccttcctcagtttcttgttctggacagaaattcactccttcccagcccccacattcagtctcttcccttcttttttgtcgtttcttggtgccttggtctcatgctgtctagaccctgttttatggacttgtcacctctcctggattgcttttgtttagtcccctgtctacttggcgagtcacattctgacttctctaaaagcctttgttccacattccccgggtctccttccacagtgcttcccacatgtgggaccatttaggcggcggtgataaacggcagggactaagaggtaaggaagctccatgctctctgctctgtccaggctgacgtttgaacgagagccagacttgacttctgtttaatgctgggtccacttgcgggtcatctaagtcagctcggagtgttggacacatctgagcatccagatgctaactcacaggaggaggaggaggggctgccctttagacccatgtccagataacgcagtgaacttgaaaaaaaacctggctatgagtgttggttgtcgtgtagcttcaacctatgcagaagaaggtatagatggtagattaaaaaacaaaattaaaacaccccaaaatcttccacttccttgtagtaccctcctcttccctgtctttcttgtttcttcttttcctcctgtgtccctgtcctcctgcctcttgcctcctgcctcctgttttaggatttcccttgctgtttctccaactgctgcacctctcttgtgacagatgtagccttaagtcccactctgacagtcagtaatgttttggctaggggttggtgatgtgattcctttgctagaacgctcactgagccctggatgtggtccatccctagcatccattgcataaaccctaccaggtggcaaggctctcgttctgagcactggggagtcggaggcaagatcaggagtttcaaggtcatgcgctgctacatggcaaatttgaggccagcctgagctcagtgaaaccgtctcagaatcaaagagttgaaaatgcagccaagtgggtagagttcccgcctaatccattggctacctgcaccccgacacctttcccttacatctctcttttcttccttccgttccctcttggaggaatgaagctctgccttcaggggaggagttctgatggtaactccagggtgctggctttctcctccagtggtgtccagtgggcttgtgagtggtattggatcagggagcccataatgagacccctcaacctaaacagtgaaggcccgtggggactttattgttcataaagctttgtccccggggagggatagagtcattaggtgtgcactgtgtttaatatttggtcatgacaggaagcaatcattttctatttttatggtggctttggagtttttttttttttttttttggtcttaaagcaactgtctaattcccatcagtgagactggcagtaaacgaactagacaatgaagaaagcctcgtagggtttccattggggtaagtcttccctcatgactttcccgagacccctgtgccttacccaaacgttcactccaatggctgctacctgcctaccaacgggggcgggggggggggtggcgggccgggggcaggctccgaggttttcaaaactgatgccacctttgaaacggttgcctccccatttcttgacaattcccagtaaagaagttattcttaagtgtgacatccattctaaagatgtcagacttaaactagcttggaaaggaaaaccccatgttgaggcacaggctagcttacctcatatagctataacatgacacgcagcttgggtgatttagcaagccagggtgcttgaagaataccgcagaaagaagcaatgggaagttggcatcgatctaggtgtaattggaacgtggtggccctggcaaggctatcccagagtaggtttagctgttctcaatggtgactggaaccagcaggttaccccagaggccacagggcgatgacccatcacatcaagggtactagcctgttccaacaacaggaattgcagtttcattgcatggaggttctctgaagtcattctgaggccaatgagctggtgaccactcactttgacggaggaccggtctgcctgtggaagatctcagtctctctagaatcctcctccttcctcagggacggaaagtggggctcccgaggcatgcttctatgggaagtcactgcttgccgtttattttgggttttaccagctgagcaaaactatcctgcggggctgccatactaagaccttgggaagtactactgaatgtcccccttgcatttggtgcctaaacttgtcgcctattagagaggtctagggaaacttaggagatcttggtctagaggccgaaatcccattcaggaagcctttggaaggatttctccccgctgacagtcatgcatacctctcttctgaagagcttcaagttaaaggatgccagccgtttctggtgtttctgctcctttacctctgaatacatacctcggtgatgactcgagcacatcgcacatggaaggagatgctgagtttctgttaggagttaaaaagcaagaaacaaataaacacaaaaaaccggacctccctcccccccttttccctgcccccagatatagggtttactcaggaaggtccgcgttagtttccaaacacacaggaagtgcttcagactgtacttcctgcctttcctcgctccacctgcttctctctgttgctcctgcctttcttcctacgcgtctatacttttcgtcctttcccatttactgtcgtcgtcgtctgtggggctttcctgtctctactgtctgtcttcccttatggtgtcaaatgcctgtgtctgagagcagacagcaaacacccgaactttgctttcgttcttcttctttcaatggttcccatgtttgctcctgagaaagaataaagaaaaaaaaaaaaaaccaaaaaaacaaaaaacttttccaacctaccagttccgttgtctccctagggaatccttgtttgaatctttgttgtaagatttcccccccctcctctcaatgaagtaccaaagaaataattgccttatcgttaacaaacagaacctggctcttatcaccccgcaccccagagccttggtgtgaaagttgggctgtgccaagtgcatgcgttaacctgatacgcaaaaccccctttcaaagctggtccttggaggatgttcattgagggtggtttttctttttcttttttctttttttcttttttttttttgttgagaggtggcacggcaaaaccacttcgtacggtactgggtgccaaaagagattggctggcgtttacacctctcttacaacaaaaaagagtgcatttttctttgaagaacattttcagattgttctaatcgtcactggcagtgagcgatccttggaacttgagtcttactgcagccctgtggaggtttaacgcttcctttggcacagggggattttgggttctgtgggtgcgctgcggtctgtaaaagcaaacggatcataaaaaggaccgagtcttactgcccacttggccctatgaaaggaggtgacacgaactggaaccccaggctaggcagtcagtgtggactctgggtttgtttttggagccacagtggcttcccctgagagctcatttgaatctggtaatagccccttggctctgacctgtttgtgttatgtgttataaagagccaccatcttcctctggagcctgaagaggctgcaatgtctttcccccagtaaatgggtggtgtgacttgcaggaaaacccattgtggaactggcctctttctgttatgatctattggatcggtacaacctctggtgccatttgggtctttaaacaaggcagatgcagggaccccagggagacatgtgcttcagggtcagtttgaatcaccatgctttaaaaaaaagttttccctattgtgtcttctttgttaacatgaaataaataaataagtaaagcccacagcaaaaccccaaaaaagatatatgatgttacatccataccagatatgacagcaagcctccaaagatccttggggaagcttttgtttggggtgggagagatctttcgttgaagcatttcccagcatcccttccaaacatctggctctctcattttctctctgacttctgtgccttaaaaaaaaatagtaactccactactgtcattattttttattatttttaaccatttcactaaatgtgctgaatggcgatctcacgtgacatcgtgtctaaaacttctttgcccttcagaagtgatgaccttaaccagtttttactggcaagtgtcctgactttattactcaagagacagtttatttttgtgagagagagagagagagggagagagagagagagcacaggagagagctgagagggcttttcttgagattcttgagatcaaggaagagagtggggatgctcacagcccattttaatgctggagtaaacattttctccttctctacccagtttcttattgttcccagcatccttagagctaaacaaggcgattcctagccttacctccagtagccacatctccctctgaatgcggctgggcccttttctgtttgcagtttaaaactggctagtgcaactattgagttattttctcttgcttagcatagaggctgagatgattaaacggaaaacaggcgcgggcatatgggtggttgaaagaaaccaggatgctggctttgggatatagcttccctggacataggtctgagttagaagagtcagcctggttgctctatttgtcctttggacactcaccatccctggtctctctcactgaataaataagcaggctaagtagtgtatagttagcacacagtagctaaagaggctcccgtgtgaatgagcagaataaatacattgctgctctaagctggggtggagggagaagattgaagacgagagatagatggtcactgggctgcctcactctccctgaactaaaaatgtgtacatatcaaagacctgcctatcgaccaccaggaagaaaagaaagaacagtgcgatgacctttgatctggaaatggaatactcccttctgggtttgttggggagacagttagggctacaacgtggagcatagtctagtgaggctagagaacgaggcttcctttgatggcagaggtctggaagacactgtagtatagatagagggactgtcaatccagagctaggcaccactaactgttcacaggcagagttgtctactactgaccagcatccattcgttgtcactgtcccagggtctttcaaggctgtgtgggtcccatgggtggagactttgtcatgtacacataggacaatgatgagcttggccaagagcttgatcaagtcaagcttgggaagcagccttcttccctggttttctggaccattgtttcctatttatagctaaaggtttggctcaataacgtagccacaaatcactttgcggtaagagtgattgctttatcagaggcaggctcagatttattctttgtgtcacctcaccccacttcttgtctttgccattgtgtgaccctaagtcattgaaggcaagtgactcattgattcagctgcctaatcaactgcttcatcaacctaacatatgtagtaagtgtgtgggaaggcttagcactacagttctgccgtgaggcaggagatatgggaagttctggctaaggcgggtggggggagactctgtggctgacagaggtgaacagctaagggttctgtggtgtgcatgtgcatatgtgtgtgtgtgtgtacatgcgtgtgcatgtgtgtgtgtgtgtgtgtgtgtgtgtgtgtgtgtgtgtgtatagtccagaagtcaacagagcatctttctaggacctgaggcttgagtactgggcaaactggacagtgaacctctgggaaccatctgtgtcctcttgcccagtgcagggactgcatgtgcacactaccatacttggctttttacacaggtgctggggatccactcaggtcctcttgtttacatggccagccctctaccaatggcgccatctccccagcctcacatgctctgaatttcatctagaggtatctgggtttttaagagctccgaagatacctcacatgctgctaaggctcaaacagagtcatttgtcctgggaggttttgttgatattgttgctggattatttttcttctgcggtcagttttattttcttgacccacccctcacaaaacagaggtcactgcggcacgacctttccctagtggaatggaactgctcaaggagtcacatggccaagtttgtatcggggggtccacatttgtttcctctactcttttaatcagaatgctcatttaattctatcccagcacctgttcagcaattaacaccctccgatttgcatcttaccctgacatttgctatctttccaattagtttttatatcagtataattaggtagggttattacagtgcgtcaagcagggtcatggttattccccagcctttaagcgctttcccagatttgtttagggaagccgctaagggcaaacagtgattaggatcactgtttttcttcttcattcagatcaggagaaaactgtttccccatgtggctcatgaaagatcagggaaatatgtcaacctataagaattagtattatgtagttcatgacttttgggcaaatttacagaggattataaacaaggtacatagggtggctgtaccacagacatttgctatgcaggggccaaggcaaaatcctccctttacctgcattgggcatcaggggcaagggcagaaggaaaatgtcagggcacatagaaacttctgaagtcaacttgcacacatagacttacacaggggatatggccagagggatagatattttctccgtaattaaggtgattaacataaggttatttcaaaattcagccagtatctctattttgatttaagcttgattttgtaagttttcaaatccacttcgagggtatggaagaaaccagcccctaaatctctaccaataaaatgccaagttaggggtagagactttggtggacccattggtgtgcctactgatcagactctggatattgatcaatgtgcagaatggaagttgatccctgaaaagctcagattcgaattatatttcatcttagtaacatgttgccctataatatgtcataatactatggtatttctccacgtatatcaatatcgaatttctaggttattctcatatgtgtataagtcgtgtatatgacctacataatcgtgtaggtcaaattccattccacagctacactgaggttctgaaatttttagagttgctaattgttaaaaatagttgagaactttgcaatcttttggacaagtgtatgtttgggggacctgtctcctatatccggggctcaaaggaaagtgactgctgaatcaagagatgtcatagccatgtctgagactgagtctgatatagtttgttggagaaataataccatgattgatgggggatgtaataatgccacgttcctctgggagagaattttacactgtctgattccgtatcgacaaggtttcttttacctgtgactcaggcctgcacagactcatcttgtggtggcttgtcttgatgttttttttttttttcttttttcttttttttaaaatagcgagtagaaatgtaatttttaggtagaacatatgagaaaatgcagggactcaaagtagtcctgaatggagcacatctgtttattatttgtgtgtgtgtgtgtgggtgtcggaagagaggcatccaagttctgactgggattgctcttaagcttttaacgttgggaaccacagggaaatgagtggctggagagaaggatggactttagacccatgtgacacagcggatgttgcttccccaccaacttgatgtttcttcctcgacgggtttaatgtagcatagacactcagtaggcattacctacagcatagttaaaacccttgggtaagccagcaaagactcacaggggtgaagtggatgacagcagaaacagaaaagggtgtggcataatgtgatctgaaagaaaaatgaaatacaggtatcttgtacatgcacactgtgactgcagtggtacaagcgagccggacatctcattagttactgtgtgtttaccatgtaacagggacagtatgttatgctgtgatatactagccctgtgtcttttgggtctttgtttcaagatcacttcagtgttgtacctactaatccagcactttccaatcctcttcctgacttaatgatttcaacacttgaaagtttatttttttaattgtgtatgaatgtgtctgtatggtatgtgggtatatgcgtgtgcatacagtgccctcagaggccggaggcagtgaatcgtcaggagattctaagtcaccagagatgggtatgggaactgactttaggtcctctggaagaaaagtagtgcttttaaccaatgaatcttctctctggtctttctagctttttgttttgttttgttttgttttgagacaaggttctactgtacaggtctgtctggcccggaactcaatatatagattaggctggcctcaaacttacaaaggttctacatcctgagtgtctgcctcagactttaaaatatcaacaactaatatgcttactattttactaacttacccattgtctgttttctctccctgactcttactactactaagctatggggcacagatagcaacacagtaactttggcttagccttgacatcttgaacagtggttctcaacctgtgggtctcgaccccccccaaagaaaacacaaatatttacattatgatttctataacagtagcaaatttactgttatgaagtagcaatgaaaataatttttatgcttggtcaccacagcatgaggaactgtagtaaaaactcacagctttaggaaggttgagaaccgctgaggcaggataatgtctttcccacagcgtaggtatcagtggtcacttgcacaatgagtaaatgacagagcgccagtaccatggagcgctgtttctctgcaaaggctggagacacgcacacacgcacacacacacacacacacacacacacacacacacacacacacacagagcctactgtagtgaggaggcaagggtgtctcctctcatctgtcgcgtcagcagcagcagcacttgccaggaatctggaaagcaccccaaatgtggaaaatatcccaaaggcatagtgcacacagggacataggtcaggaagagggagggtagctatgtccattggtagaaatgtcacagccttgtcttctgacttttggagcatgcttcatcttcatcttggtagagttcaactgggaatggaaacatagtaggaaaagggggcttgtgtcatatgagatgcccagagagaatgtgtggtgaggagaggagagggggaggggggaaagggcaannnnnnnnnnnnnnnnnnnnggagagggaggagggggagaaggaagagggagagggaggaggaggaggagggaaggggagagagggagagagagaaagaggaagagggagaggaagaagagatggagagaatggggagagggaggaggagagggagagagggagacagacagacagacagacagacagaataagcagaataagtaccaaacatcttgctgttttgggaacagttttatgtagctcaggctagcctcagtactcactatgtagccaaggatgaccttgaacttttctaattctcctgtctctacttcttgagtattgacattgccagcaaaccccagcatacctggtttatgcgctgttggggacagagggacggagggctccatacaaactaagctagcactctgccagctgggccacatccccagcctccagactttcaatttaaggttagggaaagttccttagctgattttcagttggttacctttggctacatttttctttgtattgctttaaatctcattttattttacattaaaatatacttactgtaatattcctagtaaaatcgatgtcaacattagcactcatatttatgtctgtcgaaaatggggcagccttccttggaaaggaagtttggggagtctacctatggcttctcttccttccacaccaacccctgccccacatttaatttcaagtacaaaattaaagctccaatcctttaactagtatcagtgacccaggacctctcacatgtttgcaaagatgtggacgaagtagaaaaataaacaggaacgagttccctgctcagccctggagtctggcttgctaaggtgaggaagttgctatccttgcttgccctgttcctgaggttgtagctccctggggttcggttccctttgcacagttcccacagtaaggtgagagagagtagcccccgaggaccgggctttgagatgacccttgtccagccatgtgtttatcattgttgtaaaaaaaaaaaaaaaccaaaaccaaaactaaaaaacaaacaaattttgggctacctacatgtcccagatagaggataacatagaacttcaagaaagaaaggaaaaaaaaggcaaaaccaaatatccaaactctaaacaagtgttcttccttcttgaaagttgctaccttgctgagaggagcctactatggcaggacacaaactgagcttggttctgccaggggtcctttgagccaatggtagctgttccatgagttctcatgtttccgttccttaaagacttgctgggaggctgagccttgtgttagtggccatctctgccttaggcattgctgcatgtgacatcaatcaaaggagtatcagatcatttgtttatttactacctatttattcgctttcaccagtgtttacttattaatagttattattgccaatgttcaagaattcaaatggtgagaagtgatctgaagagattatttatgaaaaatgttagtatagataagggcagcatttaaagtctgtctatatttccttccttccttccttccttccttccttccttccttccttccttccttccttccttccgtgtgaactcacatgaatgagctcacatgaatacatatacaagacacacagaaaacaaggctgacagacaattgtatgcacgaactggtaggcatggggaagtttcttgaatagacaggtaaagagctgctcactgatgcctacttgagcccacaactggatgtttctgaaatctccgccggcatcagagaacagtgctgtgccctcggatccagagaaggcattccaagatgtcataaataaataaatagcatttgccgttgtttataaatcaattaatttgtaagttgaaaggtcatgcaaaatatttagagctctcagaggcagctctcacactccacctcctcggcccccagcagcagctgtcagaatcctgtacccctctcctgcactcagtcccacatcgctgggtattttctgctgggaacgggtgaccgcttgattagtcgctactgggttttgttcaagggagggctctgcatggttgctttttaacaccttctcctctaagcaggaggccagcacagggtgctaaattcctgtctgtggctgtctgcgaaataaatctgtgttgtgccgttccaagctgtcagcagtggttcgccctgatgggcccctgaaagaagtttccttttggtctgtgaaacagtgagcagccactagggagctgtctttagctcagatttcagagttagctcattagaccaataacagtgggcaactctcttaaacacagtcacaaagttatatttgaagaagtgggaaactcaccgcagccatacagtgccaatatttgctttctcttccccaacagcctccattggcgacaggagggcctcatgacctcaggctcctttttcttctgggtttccccacttttttttcctccctgatgtccagcctatctcttagacacgtttatttgtaaaaataaagtctcttcccatcctggctgggcagtatctctgatccattttctccatttctccttaatgggagtctcagccaacagtctctgtagccgagggcgtccagtgagacaattattccatgttctggcttctctccttgttcttcaaacacatgttttcccccttggcttaggaagtcagcagcgtctacagctatttatgtgagattcatgaactcagtaactacatttctgagcgaggtgtttccctgtaaactagtttggttttctcctccgtacttaacttgtttagcccatggactttcaaacgttttggactgtctactcccttctaccctagctgttcattattggcatcatcactagattgtacatgataccccatggatattatgtttgtgaagaatctcggaaactttcatttagggggcagtgagcctcttacagattaccagagttggcagagacagcacctaggagtatctatatccaggaagccagtgttttgcactgcttgctcctgttccagtgatacccctcattgacaaaattatttctgtgtttaatgcttcaaaataaaaaaatttaaactcacacacacacacacacgtttctggctgatggatactaagtacgtgtttgctttatgacttgggcggttatctatcactgtgacatgtgatctgatttgcgtctggtaatgctagttttatggttccgaatagacgtgcctgaagaactccctggtgctctctcttacggcacactgaatccgttcatacttggcttcggctggaaggtgattctgtgctttgtggaaaagcagcaacaaccaccgcaacaaaaccccacaaatcggggaaatcatgctgagccgctgtgaagagctcaaggatcagaagagaaagagcaaaatgccttttccttctttcatgacaaattccaactcccacttcatgcgcccccccaccccccctttgctttcactcatggataacttaaaaatggctcaacttgaaattttccatgtgtccaggcaaagccctggggagttctgaggatatgtaggcaggaagcacttcagagtatgtaagcaatccaaaaaacgttttcagtttttaagcatgttatattaaaaacaaaacaaaacaaagcaaaacaaaaacgcacaagcattttggcgtaaaagctttggatctacaacttcatctatactctgttattgtttttattttatttttttcacttttaattgattttgggaagttgagaaactggaccaaagctagctagattatactagaggtggtcaataaactctgcatttccacacagagtagctcccgccctcgttccgttttagtttctgggaaaacaaatgtcccaggataagacgaacacagatgataaaatgctgatttaatattgatgttaacatttccaatacttagggaaaaatagcaagtctcaagttatctccagattatgctttcttgatttttatataaaatgcttgtttatgaattcatttatttgactgtgttgctggatggcatgtcggatgctgggctgtacgcctcctgaggtcttcggtgacctctgttctatctgacagtggctccagcagactggcttgttgctctcgatcagccgtgggacatacatttaatggctatggaactcaacctttccagatccttctcaggtgacacattcactgtggtaaaggtagagttggctttgcagtattgcctgccgctcagatacagaaagggaagagggtagacgtggaatctagcaaccagagggagaaagcccacgcatggccacgctagggccctcgtgattttccacaaagttcttgagcttataaactaggagaggagagtgtgttgtaaatactacttggtaaaaatagactcacccccgggtgtcacttcagtccatcttgtatgctattggtgaaagctaatattgacctcaaagatctcccaggccctgctggtcatgatgattacattggaattggggacagagtgtcccaagtgcattcaaatattagcctctgtgaacagcccaaatgtaggacgtttgaaactgtttcacgtggaaactatgcggccatatctttctttgcagagagaactgctgagatatctggtaagactatatgtggttgtnnnnnnnnnnnnnnnnnnnnnnnnnnnnnnnnnnnnnnnnnnnnnnnnnnnnnnnnnnnnnnnnnnnnnnnnnnnnnnnnnnnnnnnnnnnnnnnnnnnnnnnnnnnnnnnnnnnnnnnnnnncacacacatatacagacctgagatgtctatttttcatgttatacaaggctgggcttgagtgttgtcagaaccttctttctccacggtatgtgtgtgtgcgtatgtacttgcaaagctacaagaatatgggaaagtgattttttttttttttagggatctgagatgtgaatgagatccagggtctcagtgcagtcctagtatccagcccagctcccactcagtggcttcatagtgtgttgtcctgctgtgtcttaggcttttctggagtcccaggctcatttccttctgaatttgtacttctgttttgcttgattcagttgtcgtccatctcttgacacacctgctttgagtttataaacatttaaaactttctatacgtgagctctggatcagagagtttgcaacagacagctccaaggaagtggagagcaaaccatatccaatgggatagggccactgagggaagcaaatgatatctctggtttcccataggagccgatagggaagtgagtcacataggaatggatagggaagtgagtcctttttctgagcggagtctataagaggccacaaggccctggacttccttcaaggtcacgtggtgagtcaaagcagaagactagaaacagcctggtgacttctctactcgtcctgccctgctccgtttgctccaataacacatcaggaccgaggcactggaggtgtggctcagctgagaggatacttacccagcatgtgcagagccttggcttccatccccaacagcaaataaaaccgagtgctagtgcacacctggaagttcaaggttactctacatagtgagatcaaggtcagcttgggctatgtgagactctatttcaaaactaaaacaaacaataaaatggaatattaagacttgcgggagaagtgtctagatcataggcaggaaaaggccacagattttctctgctattgcatacctggtggggattatttttttaaggcagttggtgcctttgtggtatggtacgttctggaacctgcttttccatcccgtctcaggagggaacaagtacctcctttaggatctcctttcatgttcaggtggagggacaagaacattctgatggtagcaacatcagattggacagagagaaatgcacagcaaatagtcttgtgttcttccctctgcaatgccgtgaccctccaaagggaatagaagtgactggttctgaggagccatgatgcaaagattagaatgcccccaatctcttagaccaggggcagcagggacttggcggtatgccctgttccacaaatgccaacaccagccttgctagtgggcttctgggttttgtgcttaaagaatgcctgctgagtactgctgcaaggagatgggatcacagaaaagggatggattaaccacaaagtgtagcccatagggataggatacacttttattcagttacttagaagagccactggaaaccatgtctacaaccctaggatgcaggaggcctcggcaggagggtcatattttgaggccagcctggactacttagtgagaacctgtctcaatcgagtgtcaccaaaccatactaaattagaacaataaaacctgtctctaagcatggaaactatttggtaaaaaagaaaattatacacaatgttaatttcgacaggtttgggtgtcctttatccaactgcatggggcctaggaatccttcatatttcagcgtattttagatcttgggatatttgtgtagaatgtactcagttgagtgttgctgttctgaaaacctacattgggagatgctttacaccccaaacccttcaagtggcgccatgttttcgctaaaaatagttttaggtttttggagcattattggttttcaggtttgtggatatggggtgctcagtctgtaatgtaaatgtggcatccgggaatcagaggaagtaaaataatctatgctctgagcgctgtgatcatggcgctgactctctttcccactgctaatgtacttatcagtgacgcttcagagaagaatcgcttggtccacattcctgacaacctgtcttcccacatttcgacccttaaaacgttcaacccccagtgtgtttgtgttgaatgtggggggtgtgtgcatgcgttgggtgtgtttacctccccccttgttcaagactgtcttcagatcttcttgggggaggggcttctctcaccacctcccctctagtcatcggagcactggtcttacagatgtgtgtgtaatatctctgtctttgcatggttctggagatttgaactcagatcctcatgtgtgtataccaagaactttccccatggagccatctcccagttctgcatgttttaattttttacgctggatttgtcttggaccaaagatacttaactcttttaacatgagtgtttattctgcagataggggccattttaaaatggccactagactgtaacttctttgtgagggacttgtattctggagtaactgtttcaaagcatgaattcttcttagtagcttttcccacaaaataaaccaaaacaaaaccaaaccacacattaagaaaacgaaacacaccctggcttgtaatagagtcgttactgtggacatcagtatagaaaacatgctcacacagagcaggccagctgttccctaccatccacagagctctattacagtgccgcacaggactggagagaagaaaagaaaggcgtgcacttttgtctgatttctgctactgaacttgcgtttctgggcaggtggttcttctctgtgcctcaattaccgtcttcatgtctcttgtctacctcaaaggaataccaccagcctcctgggactattgtgtacggatcccattattccagataaacaaagagctttgagataattctgtttactctttacaaagtccctgtgttttgggatgagctgagagccatttgaaccatgatatttatctcagagccctagttatgaagttaccgtttggactggcagtagcttaggagactgttgtttcaaaaaaaaaaaaaaaaaaggtttgagaatagttttgtagaccacgttttactggagagcactttgattctagccttgtctcaagttcaggcaaaaaatttccagagtatcaattagtagttgggaatcaacacagatcatggtaacccttttctctcccctttatttttatttgcagtaattgtatcaaatgtaacagtttagagagcaattttcccaggaaaaagcagtaggtgaaagtatttctgcttcaagagtgcgccttgttttgtagctcagaatggtcttgaacttggtacgcagcccaatgatagcctagaacttgccatcttcctgcttctgccttctaaattgggattatagtccggtgtcaccatacgtagctggagccataatggcaacaaactacctgtcgctttcattagaagtgttttaaatcaatttttagaaaacatgtcagtgtgtcctagggccgttggaggaaatactatttcagctactaaacgatagctagcagtgaaagaccttggcacagtgggaggaaaacgtccctcctaatgagatagaaaacacagatgagggtgcttcagagacaaagacctttggtacacatggctcccagtctccagagagtaccagcacttgctggcaagagagagcacttgggttaatccttaattgttctcttggtgcttcaccagagagatgatttttcaggcaaggatgcatggttcggatcagaagatccaagcattcgtgatgggaaggctcagtagccttgcggtgcttgggtggggttcatatcaaacctggctgtacacaggtggtggtgtttgcctacctgctgtcatttggtgtggaccttaaaggctttctagccaggcagtcctgaccactgggaagatgtttcccctagacttgctctcctgagccagagagagggtccccctcctgccggggatcctcataaaaactgtggcagtctctgccctcttgacaggggaatgtccagtgagagcacagatgaatgcacagaagacgctgcaaagagcaggtaacttctcctccgtggagatggtttggaaaccaaaataaagatagagccacaggagaaattctaaaaagcctggctctcagagaatgactcagctctatcgatgacacacagagaggaaagacgttggtgagacgataggatcctttaaccttaacaggttccaaatctctggccccagtgcccagggttgaattgtatcactttgatacgatggccagtcttactcaaacatttccaaatataaaagttcccagagttcccagagactaccagggcaggaggacagaagtaacacagaatagtctctcaaggtgtaggtgggatcgcacaagcctctaaccaccccggggaattcttctcatctcaggattccctacttgcaaagccaggcatggctggggccctcagatgagagaagtctctgaactgtctggagccacttgctgtctgccccaaatgggctgtttcacacgtcggcttcaaaatttgaatcagtaaccatgagccactgccctgactgcggaggatgtgctgcacccaaggggagaggcgcagccgggaagaagagggcccattattgccttcattatttacctctcacccagcaccacagagcctgtgaggagaaggagcctaattccctccgcatttcaatcctgcaatatttactcgaagccagagcctctgactgctaatattctctctgaggagtagagctggctttgaggcccgggccgtggggacatagaacacaaagggcaaaggagaaagagagaagtggtcaggcctgagccttcctgaagaactgggctgtggtaatttacacacctctcctaacttgcagcacatgtgtgcgttacaaaaggctttcgggagcctggtctgtctgcctcgcagtgggcctgctgggcacgtgtcagcaccattaacaatgacaaaatagtagttcatcaataatccccacccacccttatcctagaacagagagccaaaatcaagtgcaagtcccatatagcttgaacctctgcacacgttgcccagacccagccttagacaccaggaccgaagatcagcccaacagtgggatcctgcttccggctgggctgcccatcagaaggctcaagatatctttttttaaaaaattattattatttaaaacaacaacaacaacaacaacttccttctctttatctctgcctatgtcaggcaatacagtggtccttctgattatatgtctcccctacaaaggggagcagtctaattctttataatgttgatagcacctttatctccccacttctcattgctcatgtctggtggtctcaagtgcatgcatgcgtatggtatcagtagatcagtaggatctggaggctgacgggggagtgaatatagggtctaaaaataagtcagtgtcttaaacaaactggatcacctaatactctgaccctcccgcttctacctctcaagtgctggtattataggcatcttccatcatatctgtttaatgcagtgttaccaattaaacctagagctttatgcatgctaagcaaacactctatcaactgagccagttctccaactctgatcagttcttaaaaaaatttttttattacatttatttatctgggggccgagtaatgtatgccacgccaagagtgtggaagtcagaggacgactttgtggaagttggttctctccttccaccatgtggcatcctgaggatccaactcagatcataaggtttggtcttgagcacctttaccccctggcccatgattagtcctccgtctaaaaaataagtgtgctccgtatttaagagacaaggatgaaaagtgagtcccatgtgatagaattacccactattaatatgtagccaataaatagagatctattcagctagattgttggtaggtctttccgctggctgtctttcctctctcattcatccatgctctttcttttctccaaatatttttgaaaggttggagccagccgcaccagccaaggcgctcccctccccttccaggtctgaatggctagcttgttggaagtgtatctttagaagtccggcttgcctctgctaaggctggcactcagtgatgcacatgcataagacaccattcaggctgtggcttcgtgtttctttggagcttggctggatgccatgaagttgctcctcattctagaactcacatctagagacatcagtgttctatctgccgtacatgctggtgggtagcagttagggttgccatgtgtctggctgtcaccccaggctttccgtcttactttgaatcagtcccctgttttctactgcatgaccaatggtggcctaaccatacaatattgatttttatttattgattgtgccaacccccagctggcattttttttttacagttgtgtcttgcctgttgattgtttttggctaaagaacaaatgcctggctaatgtccatggggagaagcaatttgcaaatttcttttatccttttgttggtatttcagttccaaaagcttgaggttagtttgcttgactaatgctttatccctcaatcccaggtgttttcttgccacaatgtcatctgggcctgactccctggtgtgacattcaagattgctagaacatacatatccttatggtatactaaccgctccacttattagggcttacagaatcaagcttcagccagtcgatgaaagggacaaatgaatagtacgtttatttatgtgtcaatagaggctgcttatgagtttgccttatttctctcataccgtatgctctccgtgttggcacacactgctggctttctggccctaagagaggtgatcagagggtcatgtgtgtccatctccctaaaacccagcaccataccctagctatacctgagcatcatcagtgtgtcctgtgcgtggtgatggtgctgctgctgctggtatgttgttgctttgccaacggataagtcagcaccaggatgcctgacagcaagtcacacaacccttctgtttgatccctgaagggcagacatccacaaccatctcaaagccccagtatggttagggagcgaggtctcaaaacgtcagattttcatgtactatagtttagaaggtgccaggactctggaaatacactgggacaatggctttggcatctgtgcagcgttcctagctggtatgagagtgttctccaccatggtgggcaggcatattggttttaaattgcccacagtttgttagttctgagattgtgaatccagggaagttccaggtcagaaattttgtttggatgtctgatccaaacggggcggcagcgtcttgacgcacacagataggactgggttggtttagaggattgggttggcagaggaggaaaaaaagacatagcaggattgttaaaacatggggtggctgctgtcagtgacaagactctcaaagatatgggtggggatgcagaatgtggcagaaagaagggtggggagaggggaactctcctggaaaagagtgtgagagctcagggggcaaagaaagagggacgcaagcaaagatcgagagtaagaatgtttgtgtgtgtgtgtgtgtgtgtgtgtgtgtgtgtgtgtgtgtgtgtgtaaaacctaacataaaccatcagactgcagaggaaaaagaaggagaaatagagtctagtgggatgtggggtgggggggtgagatgtacaagagggcctggggcctgggggtatgttgggagtaggaagtatgtggggggtctggggtatgtgggggacttgggggtggtggtggagggtgaggcagctctccttacggggaaattaacagtctctcggtcagctgaaacttctgtaagacaagctgcatttgttagctcactgctgtcactgagggccgaagcaatgaaatgtgtttttatctgatgagtttgaaaaatatattatttatttatatttttgttggcacccaaatccatgggaggcgggaccaaaccatcatgcaaaggtgtttccgggaggaggcaaaaggaaaccgaaatgattttccggatgggtgtggcacctttctttttacttcagaggcaggttcatggcagtttgatattgaagcccttgcttcccgctgtcccttgggcctatggggtgttgtcagcttgccttgctgattagcatggtctgtttatagctgagcaggagactaccctctctctccagtaaccctgacctgacttaaggctggatatggaataccttcctgagaagggctgccagcaaccttcagttttcttgaaaagtttttttttttaatttccctcagcccctgtgagtcacccagtgactctgttaagtgtgtgtgtgtgtgtgttcctctgtttattcagaaaagagactcagatgagtgtattttctgtattgtgaaatctgaactcatttgctctctggtaacaagatatcagtcttttgtgtaaagccaggtactgtgtgtaattaccctcttgtaatgtgttatccctgaaatgataatttgagttatttctttgttaacctttacacagccaataacaaattaaacatcattatctgagtttagaataggctgtaaatctctaagccctggtaatactcagacacttacaaccagggagtcataaaatgacattaaatgacactttgaaacacaccccagaagtgccacaaataaatgggaagggaacagagcgtctccaacagggttcctgagaatgctcccgcagaattgccaaacagatgccactgaaggagtcgattccactctaaccaagaaccacataaagatcctttccagagtctccctgctgccccatcctctttgagactggacattccagtgtgtgtgtgtgtgtgtgtgtgtgtgtgtgtgtgtgtacatgagtgcttggaaataactccagaaagctcacagttactcctgcttgcctgttttgttttgttttccccaccaattgcatgagccatctatttggagatctccttctgtccctgctgcccgggaccgcagtcatatcaccctggtgatacagagccactctggtgattggatttttgtctcgcccttatgtcacagagcctacagtctggtgaccatggagatgggggatgagtaagggggcataaatatccccacagcttcttttgtgttcttatgaccccaaacaacagagatgaaaacttgaaggagtaggggcagatttcagctcacagcttcagaggtatctgtctatcatggtgtagagggcatggtagagcagaacagctcacaccatgttagacaggaaacagagaaaggggacaaaatacaatcctaagtatataccccagggacctactctttccaatgagtccctcctgttttccccacctctaaataataccatctccttagggacccatcaaagtgttagttcattagctcatgatctgatagtttctggaaaccttgtcccagacacgctgagaagtgtgccttaccagtctcctcggccatgctcagtccagtcaggcagtcatggcagaggactgggttgtagttcctagcacccatgtggtggctcaaaaccatctgtaacaccacttctatgggacctggatggcatcttttgaaccctatacgtaccagtcacacacatgatgcacagacatgcatgtaggcaaagtactactaagataaataaatctaaaaaggttaattgtcacagcagaaggcactgttttgggcacaaatgtgataactttatttgaaaaccagctttgtggcttcacggcacatttgagctaaggatcaaagagaaagtggcttctccaagaccccagactcgtgtttggaagctcattcttctatggaaactccatgttagactgagaggctagaactggtctgtttgattagatttaataataaaaaaaaaagattatgtgaacactagcgataatctgagaggaggggcctcatcatcaccccacgatgctcctggggatacaaggccacagcacaaaccaagatatgtttaagtctaggactggcagggtgtgggggctgtaccccattacgtccaagctctgcttccaccgactttcaggatcttgtggtcagccatgcttgcctgtattctctctgggcttctcacagcacacatctttgctcacagccaaagaagacatttttagtttcttgcaaccgagctctgtttacagtttctgcttcttgaggtttagtctacggtgctgtgttttcatagaaatgctggcatgaacgaacgttttcatcctggcgttagaaacagtgttctctcacaatttaaaacatccccacttcaggggctgcagagagatggctcagtggttatgagcattggcttatggagaacccaagtttgactcccaacacccacatgccagctcacaaccatttgtctctccagtcctaggggacctggtgcccacttctggcctctgagggcatcaagcatacatatagaacatagatatacacgcaggcacaacacccatacacacagaatatttaaataaaaccaaacaagccccttcacattagctgtcatcaaagccctcatgttccttgtccccagtaaggtgggcacatctctgcttctctctttttcttctagcctctcctttgtgtgagtgctgcaaacttagttcatactaaaattatttatttagacctgtttgctagttctacttaattatagtctgaatgatgctcaacttcccacctcattaatactatcctactttctgaaggtttgtttcatggtcaagtttccttcattgaattgttgcttctttctctctctctttcttccttccttccttccttccttccttccttccttccttccttccttccttccttccttcctttctttctttctttctttctttctttctttctttctttctttctttcttcctaaccaaagaaataattttgagctatatgttttcttgtctgtgcagctttggcaagaagcgcccatgaattttatttctagttgtgatttgtttataagaacttaaactgcaattttgattgctcagcgatttaattaacaaacttaatttgttaaaatggaaggctgtcttattactggccacattgtggtttggatactttgtttctttggaacttgacaaaatatatatcaaaattggaaaaaaattaaaaattcagctcagtgcatcacataacctggcgacgatggatcaagtctataatcccaacacttagatgccagaggcacgagaatcagaagttcaaaattatttttgactacatattaaattcaacagcagcctaaaggacatgagactgcctcaaagaaacaaataacaacatgaatagcatatagtttaatatggttttgtccagtgttcactttcttttcaatcaaaatttcaatcatttacacttattgatatagctatgtcttacctattgccttgttcttttcttattgttttctgccactttccatgccttttttgggtacagacattatttacttgcttttaatttaaaatatttttataatgcatacatcttctttgaaactatcagttaagatttaaagaaagtattccttagcatatattgccactcagtaaattgatgtcttttttattattggacaaagttttgacttcatggcaacccttttctagcgttttctggcacttcaaaaacttgttaaaaccatacatgtaccttctctattcatatgaatgggattccaccctatacccggtctttgagtgttttctaatattgtagcctgtgcttgtactgttaggctcacatctgtattaattgatttcattctccctccactgtccctttggataacaatgtctgcacctttgaggtttttgagaattagattccatcttcaacaatcatatcaagaagggtacgtaggtgatattttttctgaaactgagcatctaagagtcttttctgaggtctctacgtacctaatattggccatgaaactcttgggtcatacccttttctacttaaaactatttagagagagtgtattctagtatttaatgtgaagtagaaaactctgtcagtactttgactcttgtttcattgatggttcctggaacacaatggatgcttagcagcagcacatagctcattaactcagaaggacatcccctgggtgcttctcatgtttcttccattgcagttgtttgtccctcccttctgtgttttaggagggcaggcccagcttgtgctcctcatggagtttacagtttcctcaccagttgctgggtagaaaatggactggaaggtagcttgggatagagcatcatagaaacacagcggagacgacagttcaggtggtttatatgggagtgtagagagcaaattagcatagctcctaatgaactggtcaagtgcaaagaagtagagatacatttacgaggcagtctttgggattgtagtgagcttgcctttgggggtggggtggggaacatctctaggtcttgaggtgagagaagacatgggggctgctaaccagaggtcattttgaactggaagtcctgctaacatctgagcagatctataggtatatttttctttgtgtaacaaaatgcccaaggtaattgatttttaaaaggaaaggcttttttttagctcccagttgcagaggcctcagtcagtggtctcctggctttgttgctttaaggctctggtgaggttgagcaatatggcggcatgcactggtggggttggctaggctgctcaactcacagtggccaggaagcagagagagccagaggaagggcctggtgacaagataaacactttaaggatacccctcccctacatccagtgcctagttactcaaccaggactcacttcctagttttctcccaataatgttgccagactacctaagtctggattagattagtgccctcatgacccaatcacttccctaaaaccctacctctgaacattgtcttaggaaccaagccttcaacatataagctttgggaggacattttgtgcccaaaccacaatggtttggcttctgaaaagtgcttgaaatgtatacaaccaggcctcaattaaatcttggatttggcaatatgggtaaaaataaggagaaaacaaaacaaaaacctcccccaaaacaaaacaaaacaaaacaaaacaaaataaaacaaaacaaaaaacctaggtgcttctgccatttgcttgaaggccccagtttgtcagtggtagaaacatgaaagtcttccacagtgtggtacagaggggggctttctgcttgcccctcatattcaaaattcatcggtgtctatggagaccctgattggtgaggtccaggaaggtcagctgagcagctgcgtcatctgtgttccccattacctctgcattccccagcgctgctctcccctgcctccccactatacctttataattcataaaaacatgagctcttgatggagaggaattcaggagtgaacaaggagggccggcgaccgtctcaggccaccttgaggtgccgctggtctttctgtgggaggggtcagtggctttagaataatggtcactggccatcttcttcctattcttccctgatctagattctggcccagcgcagccgctgagggaaagcagaatgacagctgggagacaggctgtgtgctttgtagttcagctccactgaactgggagtttggaagaggtgccactcccaggctggacctgccaccagcccggacctgcctctctcctctcgccacactcttgtcctctctcagtcgctcttggctttttgtggttgttgtttttgtctttttgttttgttttgttttcttgttgcatgcaatgccttttcttcctagctgttcttcctttctctgtgtcttcctgtcctgattcctgttcctcttttccagtaccttctaacctgacttccttccctggacttctgttcatgaccttcttttctgcccttattctttgcttcattctgccttcatattctttgcctcatttttctctgttctgttttcttcccccagtctcctgataatatccaacattcatttttgcaaacattgaaatgtacaacattagaaagattttacaatgatatcaatatgtttcccacccagagtgtattaccggcatttggttaaactctcatttttatttctaccctcctttcagcttgtatgtgtgcaaatgcgtgtgcatttatgagttgtgtgtgtatatgtgtagtgtgctcctaagtaagttttaaattttgtatgtggatttatatgctatgagtgtgtggtggcatttgtgtgttgtgtgtgtgtgtgtgcatttatatggtgtgtgtatatgtgtatgtatgcatttatatggtatatgtgagtgtgtgtgcatttatattatggtgtgtgtgtatgtgtgtgtagtacatattggggtcacaggacaactttgggtatcagttctcaccttgtctcagatgggtctctttgttgttttgctgctgtgctgcgctgcgctgtgctgcgctgcgctgtgctgtgctgtgctgtgctgtgctgtgctgtgctgtgctgtgctgtgctgggctgggctgggctgtgctgggttgggctgtgctgtgctgtgctgtgctgggttgggctgtgctgtgctgtgctgtgctgggttgggctgtactgggctgtgctgggctgtgctggactgtgctggactgtaatagctggttcagggacggctcttacgtgagttttagcacttgcattcaggtctgcacactttgcaagtgctttttgtactgagccatctccacagtccccgccccccaaagcaagtttccacgccagtcattgatatagttccctaacatatgccatgcataccattaacttgacctcagtagatgttgacattccctgtttttaaggtaaaattttatagaatgagtcttaagggtgggaagagataggttttaacaaattaatactttggataacccaaacctctgctgctatggataatgttccaggtacctcaaaacctccttcccatcccatctcaatcaatccatctccactcactcactctccagaacacagtgtgctctgctaccttaccactctaggggaactttgcttgttctcgatcctcagaaatagaagcagaactgtattcctttgttgttgtttgtttgtttgttttgtctgtgtagctctggatgtcctggaactcactctgtagaacagggtgactttgaattcacagagatctccctgcctttgtcttcctaagtgctgggattaaaggcatgcgccaccaccaccagtccagaattgtgttcttttaaagaagacttctttcatctggtagagtcatgtaaagattaatcaaaattaatatttgtatcagtagtttttcctttgactttgttaagtagtgttccacagcaggctgacaaagtcagccatgtgttcccctattgacagctagtgttggttgtggttgaagttgctaagagcactcctttgattttcctgtcttctcttttccttttatctctgtttctagaacacgttaaagtagagaggaccacaggcttgtactggggaaaaagggaaggcatatgtgacagacatgcagctcagccccagacacaaaataggcactcagtcaagaacagtcttatttagacaaaggctttcccttgtagactttttttcatgaccaaatttatgacctatttttttttttctgtggctttggccaagttctgtcacacctatatgcctttacttattcctctgaaatctcccccattcctcatgagttacatagggataaacacacaagcctcccttgtgctgttggaaaagaatgatgaagaaagatggtggtaaaagaattcgcaaaggaaatagcatcttctctctctctctctctctctctctctctctctctctctctctctctctctctctccctctctctttcccaccatgacttgagttttgcaagaaattgctttgagatccttggatgagagaagcatggtcaaacgccaagtgctgcggagggagggctgcctggttcccagacccattagctgccattcagcgaggacttagcagtttccattggagcggaaagaagtttattttgccattttaatttggtgctgttttatttaccctgtttgtgctagcccaaatttggcacccacgctgcactccaagtgctaatttaagtggcatatttccgttctgcctgggaagaatacacagaagagctgaaagacgtgtgtttataattataaggtactgagctggctccagcgacgtctcgtagcatatgggaactatgtgggctagttagcaaaagtttatgctgaagcctgatgctgtttggctgagttttgtaaactcagggttgttaagctgtgtctaataaaacaccgagtaaatttaatatttccaggctagtgtgttgcagcagcgaggacagtccaggtcccttctcttggcatgaaaagctagaggctttccattccatgctggagatggtaatttcgttgagaaaagagggataggctaattctttttataacagcatggttttttgagacgcggaacacgaggctgggctccaaacgggatcaatctgacttatgattttcatttcagatggacatggaagagaattctgggtttgtgcttgcactttatgctttctgtttatttaatattttaaatattctattttatgtgtatggatgctttgtttggatgaatgtttgtgtatcatttgcatgcctggtgcccatggaagcaagaagagggcattagattaccctggggctggggttatagacagtcgggagtcactatctggttgctggaaattgaacctggttcagagccatctctctagccccaactttctgatatttaaaatttaatttaattaaggtttgttttttgttttgttttgttttgagacaggacccaggctagcctcaactccttatacagccaaggatgatcttgaacttctaatattcctgcttctgcctcccatgtgctaggattttaggtgtataccactatgtgtaccagtttatatggtgctgggattgatcattgggctctatagattctatatactttaccagctaaggcacattctcgccatcaagctttctgtctataggcagaactataaacaactgatatataggatccatggatttctttttataggctttttctctaattatacagtatagccatgtgtatgtaagtagggcagaatattttatgtttttctgtattgaaaccaagatctcattgatgctgagtgttctaccacccaagctatatgtctcaagacccttaatatctgtctatgtgtctatcaatgtatatatgtatgtatgtatccacatactaatctgtgtgtgtgtatgtatgtatgtatgtatgtatgtatgtatctatctatctatctatctatctatctatctatctatcatttaaattttgagacatggtctcactaaacttcacagtctagccttaaactcacactgtaacccaggcaggctttggactttgattccccttcttcagcctcccaagcagctaggactacaggcctgtaccattaggcttgaccataggtagattatccccacccttacccctgcccacagtagcagtcctgtgtagccctagctctgtggccttgaactcaaaaatccatctgcctctgcatcccatgccctgggattagggctgtgtgccaccacacccagcccaagtattaaacacagtggaaaggtgtcttactgcagagatggatctataaatcatgtgtgtgagtacatttgtccacccagagccctgccttatgtacatgcttgtgtataagcatgcttgtcgctactatctgattatacaaggaacacgaggggcttctgctcacctactgtgtgtaggctggcagagatcttgtctcctgatcttcattctctatcggcactgggaagaagagttgacaagtgacagccaccaggctctgaatccccacagtaagccccatgaagctctgatcccgacccttaggccaatccagctggcagagaggaataccactagcactccaaggaaggcaggcttcctgggcagtctgccctgcggttcaggacacatgtctgccaatgattagaaagtcacctgctggccctttacccagagaaccgagccaaagtggcttgtggcgggggacctcttgaatccctcttctggttatttacacggaatatacaatgcctctacctcaggagggctgcgcacagagccgggtcgctagcaaacagaggcagcgtcctctgtaagtcacagtgtcacatgtctgaatcaatttgattcccaagctccacaggctcatgaagcccgaaacgacgtaatgtctgaagtctctgaaattctttatccaggtcaatattacctgaaagacttggaattttacctgtcaaataatgtgctttgcactcacgtctggttcagttttcgagttgaaaagctgagctgtcgagttcacaagttttctatgacaggggtcccatgacccacagttgaatgttacaaaccaaaaccttgccctgcatgccatatggggacagtgacatctgctctagggtgggcagcaataattcttttatctgtgggccctgggcagaggccatttctttccacccccactctgctgaatctcatataattccccctttcctgtttgctgagcattaattgtgtacaccatgaacctcctgcctttcaccagcctgcatcagaggctgtcaacatctccattttgagggaaaccgaggtgctgaatacaaaggcatttgagtgaagtcttccatgtcacctgcaaggggcagaacccagtcgtgacatgctaagcctggagcgcattctctgcgtctcgtgaagctggtcctcagttgacttgacatgacctgctgatgtgatgtgattgtcatcagtctaatgccaccatcagtgtcatcttgcagacagagctgtgcgggttgcagaacttcactgaagtcctccctcttctgccttttagccatttgaagtggtaccatgccatccatgcctctgttcccccatctgtagaatggggctatagtaggtggacatagtgactacaggggtggtgtttggagtgagcctcttggaaagtggaaatcaatggtgatcccagcacttgagagggacataactatcaaatgcacttgaggacataattaaggtctgaatgcagcttggtatgtaggcatcgtgagatacatgccgtatgttctgtagattattactcagtggccaggagcctttagaaaatcagatttgacatccttgctctatgtccctaccttgggagaccacagagcagaggagaaggaagccagtacaggctacagtctagctttgtgagggagctaggaatggaaaaatgggcagaacttgacctagtggcacaaggccattgtcaccgctacaagggaggttatggccggaggattgcaattaaagtcctgcctgggctgtagaagttcaagtccaacccagggcaatttctcaataccctttcttaaaatcaaaattagacacggggctatggaggtagctcaggggtaggatgtgtgcctggcacatgaaagacaatccccaagaaatccccaaagttcaatccccagaacagcaataaaacagacaaagatagaagttaagtaggtgagggggagctgcagtcgggaggcagatccagtccggcatgtgtgaataagtaagaaggcacttgatagattcacaggcagctgccatagcaaacctgagcatcataaagggcaagagccactgtgggtaccctgcagtccatttctcaacaaatacgtgatgggagtgaatgtgtgccttatggctgctccacgagtaatgaaggagcccatcagacctttccgaaacctcgagtcttttgttgttgttgttgttctcatcagtgaggttgttgatacttcttgtcctctcctgactggaccaagcacaacctttgagggagtgccaatggtgtgattgcatgacgggtcacatggctcagtagcagtcacaacactgtggtcactctttctcaagtgtgtgccttgctttctcatttgggacaaagtgacagtggaccacaagacccttttttttcctctggaagtgtcccacctggatttatgtgcatgtcaggtgtgaagaaattggactgtggcactttgcattttattctatttatttatattttagtcagggtcacactatgtagccttggctggactggaactcactaggtagaccaggctggcttagaactcagagttctgaccatcactgtatcctgagggcttcaattaaaggtgtgtgtgtgtgtgtgtgtgtgtgtgtgtgtgtgtgtgtgtgtgtgtgtgtgtgagactatgcttggttattttggtcactttaattgatttttttccttatttacatttattagattattttttatgtgagcggatggaagggtgtgagggttcagagaacaacttgggggagcagattctttttgccagcagaggaggttctggaattcagactcagcttgtaagccttggaagtgtatggttcttcatactcggaggagccttgttatctccttccttatatattttatacgcagtcactgggtatttcagagaaaacatcagctggttccacggggcacttcatacccactattggcacaggaggctccctccacaaaaccctggtgggtttctagaactctctggagcctggaggtagatcggggagctccagtcttggcagcctctctcccagctgtagtacaggtttggcttccttctactttatcacgtttcaaagataaacaattcccctgcctcctctaagagcagaatccttatcccggtgtcccctggagacagaagaaaggtattgtgggctttgtatgttgtattgccatgattattcttattctagacttttccttcttcttcttttcttttctttcactctttttctcttctcttctcttctcttctcttctcttctcttctcttctcttctcttctcttctcttctcttctcttctcttctcttctcttctttttattggcagggccgactttcttgcggtccctcaattgcaggaggtgggtggctaagaatctttgagaacacccaggaagaaaagccacagatctgagctcattctgcaaactttattttgcaaaattattagaggctccatggcagtagctctccacctggagggggagactcctttgggggtcgaatgaccctttcacaggggtcgcctgaaaccactggaaaacacaggtgtttacattatgattcataatagtagtaaaattgtaggcatggagaagcagtgaaaataattttatggttgggggtcatgacagcatgaggaactgtattcaagggtcacagtatcaggtggagaattgctctatgggaagcaagaagcagttctcaaatgcaggcagcagggaaccctgggcattgcctggacactgggggtttctcaggcagactgggcttctggggctcacttgcttttccccaggctctgcaccttgcttgctcactgttggtccatggagctgggggtctagttacttatcccgtcaatcacgtgctgatggcactttgagtgaggctggggggaggaggcagttccttctgtgaactgagcttggctgtgggctggtggggttcctgttctctgctcatcgcaaatctgggagacccagctcttcctttcttcatatcctagaaagagtttattcggattccagtctacacccacaggcacatgtcaacacacaaagacatatatcctcttctcatcttctgttaccctggtacccactgtcaggagggattggaggagcaggccctcacagaatggcaaataggttgaaaaatgttagctttaatttttttcattttcactgagcgtactgaaaaatgaaactgagatatcccttttctccctgagacaaggtctttggtagcccaggctggccttagatgtactgggtagccgaggatcactttgaacttcctaatcctgcctctacttcccaggtacttagatttcaggcatggatgaagtccagggcactgtgcagtctagataagctctctgctagcccctgacttacttggagaaaaattttaaacttcccaccaatagagtagagagttccctgagccaagcggaggggtttatgtttacattagcaacaagggtgaagttctttgttatggttctggctcctgggtctcagcccatcctttggtatcagcgggcacaccctgcaagtttgtgtagtttataagcccagaggcagagaaagttgggactacccagagccaaagccaagcattgtgcttgggaagtggggggtgccaggactgagttctggaggccagtgctggggatccttgcctttcctctcattccagcttcctggggtgtgttgagtccctgaggacaacccagaggaagacaggaaagagaagttcccattgagtcaaggggctggcatttaaaaatgttcttttaatcatagcataaaatggtgaaataaaagaaaagtctaggaaagaaaggtaaaaaataaaatcactgtagttttttgataagttggcatatttttatctgagtcatgtcatctgtacttctttgtgggcctattttatatggatcagcgcacagttttttttttttttttttgtattcagttactttagtttacatattgaactgagtgcactttctatgcctttaaaggtttttcatctcctccctttaaaaaaaaaagattcattcattcttattttacatgtatgtgcatttgcctgtatgtgtgcctgtgcaccatgtgttcagtgcccttgaagtttagaagagggcatcaggttgtgagttgcccagtgggcactgagatccaagcccaggtcctctggacagcctcttagctgtgaagtctctctgtagcccctgctgtcttgtttaaacactgttctctcaagtgagagagtagaacataagctatttaaagatttcaataatatttctagtatggagaggttttctctctctctaataacttttacaaaatgccacatgaacatacccatatgggaatcagggtgtaagcccttgcttgagggtgtgttagaatcatagccagtgactggtagagtcaccttacttttttgatcagagaatccagaaaattcttattttatctatgaatgtaagtcttagaactatataaatataagaatgagacataaagatcaggtattatgttggtctagttgtatgtgtataacattttaagtatatgcatatatatcatatacacattgtagtatataaaatggatgctttgggtgtgtgcacatgtgtttctcttcaagataatgaaagggctcatattctgagaatcaaaataatttcaatcaaccttagggctcctattctggaaatcaaaataatttcaatcaaccttagctttaaaaatataaaaacaaaagaacaattttctatttctagtggtgacagataagaggggaggtatttaaaaaacacataaacaactcctgaaagtttagggggccatcaaagggccttaaaaggcttggaggatggtgggaagacagaacaatcaaatgggacccagggcctccttttagagggtagctttagtgccttcccccagggatcctggtgctcagacttcctccactgggcatgcgctgagcctcacgttccagatccgagctccacactgtggtagagggtcagctgtgtggtggaggaagacaaagggccactgctagctggaccccagcctgcctgggaagtctgactgcaaactggggtggccccacccagtgggggctctgggaaccaggagaagaagagttcagtgtgggtgttccaggaggattgctcaccacttgccatttagcacatgtctgaaggaatagctcacagaattggcagcggagttcagaaagctagactctgggaaacaggaatgcttaactctttttttttttttttttttgaagcccaaacgggaatgtcagcccaggtgcgtgagagtggggagctaaaaatgtgtccacacccagctctaattgggccaactctgtctataagatgaggggccgggactgtggagacagccctctgggagacaggcagccaagtgctttttaaaacagcttagtccatgagctgaaagagactcttcctaaagtgtctggttcagagaaagcctcacactattttattaaccaactgtgcgattctcttaatttgcatcatcacggagagagccatgttgaggcttggaacccagtcttctgtgttaatggagggggaaccgggtgcctaacagcatcgtgtttgccgagcgattaaagcgtccacagttttcgatggagaaaaagactgcgtgctctatgtgactccacatactgatctttgccccagctctcttggcctttcttcttggaacccatgctcctcagctgcttggtagagagcagcaccatcccagagatttagcttggcacccatccgtacagtgctgggcgagggagggcagaggctgcagggaagccagagggtccaggctactccgctgcttacaagttataagtatgtggatagggtgagggagctctggatcagggtgcttatcctgtaggtcctacatgaagacggaagatgaaccgatgaggcgagagaggtgcagggagaccagccgcactgtgaggcgatggaagctggaatggagggtcattagggtggctgaggagaaaggcgttaaaggcgtggaaaggagggcttggtgaggacaaggcttagagaagacaaagagatattttgaatttagggcagatggttcagcccttcttaggagctaggaaccaaaacccatggtaggtttcggagtcacatagatcacattctgagtgatccagttgaaacttttcaagaaccaatcgcagttacacagnnnnnnnnnnnnnnnnnnnnnnnnnnnnnnnnnnnnnnnnnnnnnnnnnnnnnnnnnnnnnnnnnnnnnnnnnnnnnnnnnnnnnnnnnnnnnnnnnnnnnnnnnnnnnnnnnnnnnnnnnnnnnccccactccttccctccaaggcatgtggcatccttccttctggtggcctctcagtgtcattaaacaagtcaaaggtcatcactccagaaattgacacgtttgacccatttctcttctgtgttggacctggagtctggagccagatgcccccagggaccatgtggaggcctcaaagcccagggttcattgctttcttcccatgaggtatataatttgatatttattgcctctctccccaacaaggtctatggtgccactgggatccattcgctaaagactgctgatccctttatgaatttttgatggtggaggaggagcgattgagaccactgggggaccttgtgaaatggaaatgttttttctttttgatcctctctctctctctctctctctctctctctagcttgctctcgctctagctcttttattttctttgctttcttcaatattgttgccactcggccttttctgagtgcaactgtttagctcagccttttctgagtgcaactgttcactctctttgcaacaaggcataatcccagcttcttggggcaggaacacccctttccgtgtctcaatggctgccgttataaccactgggaactttattcaaggaaagagatgttctggccagaaaacaaaagtccaaacaaaaacaaagcagccaacaagattcaccctggacaagggggatgagtgagcctgtcactccgcccccactgctccctttttggtggtctgcaggggcaggactccagggacccagacaggatcagtatttcacttcagagtggctgacagcctcagtgcaaagcactgcagtcctgctttttattagcctgtgtgagtccagtgcagaaaaaagtttctccttctattcttttcatttttcaggggtacaagtctttttgccaaaccatgagatgatttaactacaatttccttcctggtttgttttccccggggggggggggggggagaaggatgagagagccgggtgggtgttattgtttaataagatttaaacagggtgcctattttgtggctggaacagctttccgtgccctttatctgtactgggatttcagctgggtttttattttagtgacatatggcccatcctataataaaaagagacgaaccattcagatttaatttgaacgactaagggcgtcagaagggctgtaagggggaggctgtacctgagccttcatttatttttttcaaaaaaaaaaaaaagtcgtgaagagaagttgagaaggtgacttttggaattagtttggtttggaggcattaagtcccggatcaagagggaaggtcaattctaaagtttgggatcgatgccagctctgctcgctcctttattggagtgttgcctgtggggcctttcagggggtctgcccttcaggggtactgccttccacctgctacccccttgaacagggaaatgggctttttaaaatattatgcagcatgccccagccggctccctgtccaaatgccttgtggcatgtcacaatgtgacttgggggcagggcttgggtcggcagctggcacacagaacctgtccattgaggggattgccttttagccccaacacgagctgccttctgaggacacggcccacctggcttccacatcccccttggcaaccttcccaaatcatttactctctttcattccctgaacactgccaacagaggaaaggctttctgcatctaggggccgtacaagcaacttgtgggtatggtagaggctttgtgggacctgggctttacaaggacagaacaagcagagagattagtgggactctcaccagtaactcgtatgcacatgagagtacatttgaatgcacactgtatacctcaggtggcttctctgcagcctgaagcctctgcacgttgcaggaaggaccatcccttatgttggtcctatttgccctgagcatctaagatgtctcttcactataatcttttacaagttttcactatgtgacttgtgtccactgtgctttgaattatccctttatgttccttctaattgacttgataatggcctttgatatcacccatggtctgaaggaaggggacttggctaggtctcctttggctagaccaaaggaccatgggggtaaagtcacatcttatagttgtgctctggttctgaacttgtagccagaaggcataagtgcctttcttcttccacctatgttggatgccaggaagacgcccactctgcccttctttagcagtcatatacagcttggcttggtatatagaccattgctgggatgtccttcactctggaatgacaaggatggctgttcaggctactctccaagacagctgccaatagcatccttgatttacttgcaaagacttagagattggctgctaacagccatcttgatgagaaacagtaccgtaattgcttggggagaaaggcaggcatttagcagtcgtaaaagaaaatctgcccactgccaagccaaatgctgctgttctctttccatgtggttggctgtctgtcccctattccgccccctctcctgcagccaaggtgggtttggggctcccctgccttcttcacctttttcatttctaattgtaggttttgtctgttccccatcggagagcatgggcgggcaagtggaggggggggctgcaatattcagtccatgttttccagggcgtccagtgtgacgatcttagtgacaggagcctcctgacgggttctggggctgcccagcagcctgtgaccacagttgatcagctgggggttcacagtgctatccaccttttcagagtgacaacggagcagagaaaaaagaatgacaataaggcccaaagcttagctcgaggggactgcatgaaaccagctcagatccttgctttgctccctctcaggagcagcaggaaggcagccatccaccatcacttcattatcgttactctgtgtccacaatctcttgcccctttttgtagctctgtatttaaaaatgcttctttgacactgtcagccagtagcatttgtgcttcctgcattgcaggtaagacagtcgagttggactcaaaacctgccctgctcatgctggccgggggagggacctacatcttgtcttctccacaagggaaacaaaggaaaataatggcttggccttcgcctcctttctggcgcttttcgtcctttgagcttctacttgcagtgtctatcaaggtccagatacagctcaggacaggagacagaatgaaaagaacgcataggcttagtgaatcactcaccatttaccatgagtgtagcaagcacccttctgcatgtggggtaccgcacacctgaatcacaaaatcgcaggcccttgcttgtgtcccattgaggacttaggctcgggcaggctgtgatgtactgagctctccagaattgaacagagatagcttatgtgcaagtatgtggtcaggtccctgcctgctgggggtggggggtattcggtgtgggttaaacgacacagcttagaaccactgtcttataatcagtctgcacctcccagagttccaggccagagaaggaggccagggtctgggttagaaatgcctgcttgttgcattccctaatctgatctcagtcagataacagctcagacctgggaacacgagattttaatgtgaaatgaataactaccctgagactgaagcttgtcactgctgcgcatctggaatcacttacagctgggtaaattcgctgggagctgcaacgccagtgagcaggggtttgaaggaggcgcacagcgcgttccttttaatgtctaaacaatctgatgttgacaagcctttcacattaacccccaaatggcaaagtttaaaccctttattattcgattcagtttggcaaatcatttagaggcttaggagttcatatttacacaggaaaggctgatctctttctgtctctctgtctctccaccccccccccaaccccaacaacacaagtgccactaatagatgcatattcatgtttacttagaaggtttaaaagaccttgaacactgagggagattcagcctagagaaagtaagttgattctccattcccccccgcccccccccccccaggaagcccctaatgtcactagaatacaaaatatctgaaccttccaaatcctggaaacactatcaggttaacaaataagtagagaaaagaaagaacaggaaatagtttccaaatagtaggagtcttcatttgaaatatattgtcttttggcagctaaccccagcatggtatcatttttctaaggttttgtacagaacattatgagggattctgaagacagagaaaggtagtttgagttctatagggaactgccaaatattatggaagttagaaagcttaactattgagctgtgcttcacaactgtgtcttggacctgttgccaaacagacaaaacctaaagtgtctccattaaattgcatttaagaacacagaaaaaaagattacaagtggttttttgagatttagattcgataatgatttattaattttaaccacatcctttaaaactaatgaaggcgtcttaattcttcttcatgaaaagctatgatgcaagagctgaatttttaattttcatcagaggaagagtctttatgtggttggattcattaatatttatgttgaaggagaccccgaaactgagaccatgatcatctctccgaatcacactaaaacagggatcctgtcggaagtgttcgctgttcctctggattctctgggagacgcttataaagatggatatgacagggtaattttgactgcagctgttcaccccttagataaaaaaaaattaactttcctttggcagctgtacagagtcagagctcaaattatgagtctccagctttgcttaagtagaatttcagattcggtcctaatttttaatgggtgtactcagtaagttcacacataatgccagttttgacagctcaggatacctctatccagtttccgtagatatgaagacttttgtttgatttcagtgttgcttgggaaactaaacacggcatttgacctaacctcgcagtttcggcttaggcgggaaagagaagctcttagactctcacatcataaggacacttatgggctggaaagatggctcagcaacttagagcttctgtgtaatgttcttgcaagggaacccaagtttggttcccagcactcatgacaggagactcataactaactgcctgtaactctaggtctgggaggaataacacctatggtttctgtgtgagcctgcacttccgtgcgtacacctacacacagacacacatcatacacataattaaatatatatctaaaaaaaattccctacagcaaacatttgcaagttgcaaaataaagagttttcctatttaagtattcatttgatagtccgtgtgtagcagctgcatactaacgacctagagtgcaggtataactcaacttacaagtgtgtaggtgtctatttaaccctgtcatattatttaatcaggataatttgcatctgactttctgcagagagaatgggtcagacactgcttgccacaggcattatgtgttcgtggcatgttttcctgaggcctctaattcttcatcagctacatctcacgcaaagggaagccaaggcaaactgcaatgcaaagttgaagcctgtggtgctgcttttatttttccccctgtagccccggctcccagccttgagcagaagatgtgatctccagctctgctcagagctcccatgctctcccaggcttctgagggctacgtgcaggctcattgcattttctctacctgtgtgtgcagtgctgcaggagggattcagagcagaaccatttcactgtgcagtctctccagttggtgtgctgtttgggctttgtggttgtcctggaaaaataacaacagcgaaggtgatgctgatttgagctgatttgagatactgatgtcagctccgtaatgagaggggtggagcagccggtagtttgattgttctggatgaactagtcgggatctgctgggaatactggcgtcttgacctccacagccctcaaagtgctgagtgtggagaacgggaagggtctccctgggcctcagaatgtacgaatgtcacaaaaatgcagttattggaaaactgtgttttgccagctacgatggtgcagtgtgtgtgtgaatgtgtgtgtgtgtgaatgtgtgtgcatgtgtgtatatgtatatgcatgtatatatatatgtgtacatgcatatgatgtatatgcatatatgcttgtgcatgtgtgtgctggtgtagggggggtgaggataaggaggtgtgaggagagtggaggctcaagatgtttttcagtgtgagttctactttttgtgtcatgaatagctctgcgcattgtcagaatctaaaaggagaagaaagattgaattgtgtgtgttgcatcacttagttgaataacgaaattctaatttcctgttgtgtgtttgatccacagtccagtgaaagttcaaactaagattttttttctctttaaactctgtttctggctccaggcactatctcagatccaaatggaattttcccaaacaggtatgtggactgtggaaagttttcctttgaaagcaagaatatttctctagccacagtctcagttatagcaagagcagggactaccctgggctccatcccttttctcaagactcctggagagcctcaggccttagaaggaggtcactgaatctcaggtcatcactgggctgacaggaaattgataggaggagctggccagagcattgagttagagttccagagacctggctcctcgcctggcttttgcccattccgtagttgggacatgtcacattagtgacctcatgtgtaagaaacagtttgttagtttggcctgagttgcttcttcctactctaaatccttatttgggggttagaattttcaaatcttgtatttctgtttgaactgctgagcaccgaagctcaggccttacctttggaaatggctcaaagccttctaatcacttcttacagaacaaaactagaaaaaaaaaagccacactccctcgctccagtggcacacacctgtaatcctggcactggggaggcagaggcaggagaattaggagttctaggtcatttctcagctacacagtgagttggaggccaacccggctacatgacaccctgtaaaacaaaacaaaacaaaacaaaacaaaacaaaacaaaaacaaaacccttttattagtactaaaatgcattgagaagacagatctcagggtgggaatacattcaaagttgtttaaaaagatttttttttttaaatcacgtttccatgaaatgtggttgacatctagaaaaactagtctcgtttacagttttataaacatttggaaacaccactatttctaagtcactttggaaagcgtattcccactagcttactttggtagaaggaagagtctttctggtaaatatggcagcaggaacgaggcctaaaagcagtggaaaagggtagaagtaatgccggatgtggggtggcagccaggaagggccaagaaaggtatttagttaaaaggatagattctctaattttaaaatccccagatacgtatcttactgtttaccttttatttattttttaaaagtctgtgcacgttcttatttacctgagatcaattggcacggaaagtcagccttgctcccctgtgtaaataacaagtgctctgcggacacccgagtgctccaggcctggaaacagctgcctctggggtaaaggctgagctctggagacttgatttaaaaagatcacaaagcaggaagcaagtgtattaccagcctgggtggaaggggcgtggccagtggaaggggcgtggcaagcgcaagcacctgggctgcacaggcaggtggcaatgcaaagccacttgaacagaatgtaggacgacgttttaaaaagggatgctcaagtccagagtggtggcgcacacttttaatgcaccgggaagtggatctcggtgagtttgaggccagcttaatcttcatagggaactccggggcatccagaactactacacagtgatgcataaacaaacaccaatgttcaacactgtgccctggaagcagtgttcatggcaataacttgtttttgtgtcaaatatcgcctccctgtgttggtattgtgggtctcagttctcaccttcagggagaaccacacacgctcatcatgcacagcatcccagcaatacatgtgtgatctcgcatgggattcaactcagagccggatcattttaccccacctccacccccaaaccactttctcaaatgccaccaaaccctcataccccaccccacaacttatggttggtttgggcaagccagagatggctgctcccagtggagacccaaggtatgcttactgatatctctgctcctgagtataccaaggcccttttggcagccggggggtggggggcccattttgcgttcctggggaccagcgttgtgcccatccacatactctgctggggctcttcagccttgtcagctggagccagcccccgtcatcccctcgcagagctctaaccttttgattcaactttatttgccacagtaggactatcaccagaaagggaacaatacggcctcgccatctggccccggcagcctgaggcgcccggtggtgctctcagcccagggtcctccgagggggccgctgggagccgggcgaacagaatcccaccagcatactagacgggtgccctggtttttgtgtatttgcaaatcacccttttaagatccagatgcaggctgcagccggtgactcagaaaaccataaataatacagcaggctttgctcgaggaaaaagaaagagcacacaaaggtgtatctatcattatatttaggggtaacaggccagagataaagctccccctttctccatgacccttaagtaaatgtgacaggcattaacccatcaatattagtgagtgatttaatataccaaccaacatttgcctgcaataatttctgttgtaaacgactccttttggaccctcctaccaataactcagtgctcataagtcagaagccagaatgtcgctctattcaggccctgggcgattcttgaggtctttttaatttttttttcctggggagggaagtctggaatccattcacattgtcctttgcctgccatggtgtctttctgaagagctttattctggtgacggggagctcagctccattttcgtcacttttcctgcacaccttggcaaggactaaacctggctttgggtagaggggattctatggagatgctgagggcatgacagccagaaccgttgtgaagttccctctagaaggctttctttgaggtgagatcgataggaggtagcacttacaaatccaaggggagttggttgggagcaaggacagggaagcaggcccagggaaagagtgcgccatagaaagttccagatcagtaagaatgtaagcaccaagccaggccagaactatcaggcctcatttctgtgccttacagtcttccgatccaggtatctgctggcagaggcaggaagggtaacttgtgccaccaaataatatacccacttgaagacgggtgatttctttagagtgaaggtttattaggaaagcccagggaaaggggaggggtagtgtctgggagggactgagacccatctggtttgttgtgggtctttttttattagaagaggaaaaaaaatcactctgtgggttcatatgtccaaggagagctcaattaaagttatttgctggagcttaaaatatgcccacacctgcttccgagccaggctcggagaccgacaggcactcccagaaggcggagcggatgaaggctcctgtcggagtgaatggaggagcagggaacagacatgcacgcatgccttcttgggtatcactccaggatgggagactccacagccaatccagaggtagctttcaggtttatcaggagaccacagaggtctacggtttacatctcagctagctctacggtttacatctgcctctgggctctgtgtgtgtgtgtgtgtgtgtgtgtgtgtgtgtgtgtgtatgcctgtgtgatgtgtgtgtgtgtggggggtcttcctttcctaagcaggtcaggagtctgaagaagcaatggcatgaaaagggctgtgttattttgccatctctctgtgtggccacttccttgttgattccaggactcataaaaatcttttcctaagtcctgttgtgagaataataaataatagtggccaacattttctgtgtattagcccccaaagtaagctctgcttaacacatcagcccgtggacgcttaccacaaccccgagaaacaggtaatgttttcaccctccagtttatagatggacgaggaaattagtgccaggagagatggaattccttgctgtggttgcccagcaactaagctccatctggtcccccaaacctgtgttttcaaccaactcacctcaaaagagacttgtgggcaagaaaagttcttgatcagagaaggtacacgaacttgccacaccctggagatgttctggctgagcaaacgcattgtgactgcaccatgttttctgctctgcttgtctccaaagagaagttcttcctggagactgatacgcagttcagcatttagcatgccggagaggacctgggttcaattcccagcactgtatataccaagtgtgggcgtgcaaatctataaccccagcacttgagaggtttaaaagctggaggacccacacttcaaagccatcctcaactatgtagggaactcaaggccagttgggcgccatgagaccctgtcctaacacctgcctcaagcctccaaagaacaaataaaagcaatcctttgagaacagatgctaatgtatgctggtactgcatttcttgctagatgccagagtccaggcccggagctagagccacagctccgttctctgttctcagaagcacagggaagccagcctatcgaggcagtcgcctctgttgtctctgtgttcagagcaggtgattgatttcagggtctctatttctactccacagagcctggagaactttttttttaatgcctcctcctaatttgtgctccacaatgagaaagagagttcagacattagagagcaacctatgcacaggcagggaggaactcaccggctttctgtaatagatgctcttaatagacatcttttgtgatggtgcctttcactctaagggatgacttgggggatagctgaagaagaggaatctctgctacaggggattcttgagatcagtggcagttaattcctacttgaaatgtatctttgtgtgtgtgattctttgagattcttatttttatgttatctacttatttattcatagagacttgtttttattttatgtgtgtgagtgttttgcttgcatgtatgtatgtgcactatgtgtgtgcagtgcttgtagaggctggaagagtgcatcagatctgtttggaattggaattatggatagttgagcttccagtggatgctgggaagcgaacccagccaggtcctgtgcaagagccattcatgcccgtgaccactgggccatctttccagtttcttttaattgtattatttcatttcttgtcagcttaagtttaaatttaaaaaattgtgataaaacacataaacctgttaagtgcatgattatgcagttaatggtaccacccatctccagaacctcttcatcttaaaaaactaggacattgtacccatcaatcaataactcctattaactttgggtagccatctcatatcatgtgcctatgagtttaacttctccagatgctccatataactggggacattcaatttttgtcattcaaggcatattttacttagcataatatccttagacttcatctatctaatagcacatcaaaaaaaatgtctcccctttaaagggtaactggtattctattgtgtagctatatgatgctttcttcttctgtttgtagacacttccatgtctcaaccatcatgaatataggtcctatgaccattagtgtacaaacataatttctttgggaagagaactccaggaatggaggtgtaaccgtgaaccactgagattatagtttatagatcgtagccagcaagagcaccagacttcattcgacagcccactaacatcgagaaatactagcagctgcagcctctgctttgtcaccttttcagagttttcatcctgattctaccaacttcgctgtgtactttaagtgcatgctgagtgtgggcacagaacgtgtgtacttgcttgtgtagaaggtaccgttaagtgctttccttggctgtgggccacctcgttttacctttctgcttttgttgttttgtggtgctggggacagaacacagaacctcgcacgtgataagccacactctgccactaaactgaggcaccatttcctatttcatcttcatatcgcaggtaccaagactgagaaaggctaaggaatttgcccccattaataagtacagaaacgtgaacttgacccaggcatcctaactcccagagcgatacagtcccaacagtcaatgtttcaacagttgatctttgctgggtctcatggagactgtataagactgtataaggaccctagtctgtttttaccattaagaacagcaccccctagtccccagtatccccccccaaaaagagctcttttctctttatctttgctaactgaagacttccgaagctcttgcctctcttctgtctttaacaatgatgtaacaaacatgtatcagtgtttcctcttcagcctccatgtgatgccagctcacccttagctgtgcgctccattaactgcaaatttgacctccccaatacacagatccatctgcaattttttatgacagatgaggaatttatttattagtttccttctcatctactgcagatgtatacactgggattctcacctcccactgcctcacccctacaccccaccaccgccatttttttgacacaggcttcaggagttccatatattcaaggttggtgtttgggcagggaatctaatggcaatctacagagaaagttacctggcagctgtggcaggaaggtcccagggcttgctgcctgtataggatctcccctggtcttctcctcttgtccactccagcatgttgactgactggcttgtggaggaagagtttccatcacccatccgacttgcttcagggatgccgtgctcagccaaatgtcaagaagtctgaagcaataagagggagcaaaagagaactagtcttttctcaagaactcagggaggagacagccaagccaactcctcattggaattttgagaaaggactcccaccttgcatataaagacagccaagaagtccctgccttctatttaccagatgaaaaccctcttggaagtaacacggtcctctcaaacttcatttaccttctaggaaccccaactgtctagctgtgttgttactcctttcgagattgcagaccagggcaatgtcatagcagaagtgattccttcaggtctcagatagggtaggggcagcaggaaggaagctgctccctaaaccatgtggtcatacattcctcttcctttctgtatctccccgtggtcaggagcagcagtgagcgactccgtggaacacatgagttcctagaaccctcatagctctcctccctggcttagaagagcattgctgtccctgaggtccagaccttgagccaacgccatcttttctttggagaatcagccatacttgtcagggatggattaacttctgtagctcagatggaatctgcccagttaccctctttttcctcattaatttcctacccagctctgttgcaagccgactgttgatcagttaaggaggagacccttttccacagtcatctgtccctgagagaggtgagccacatgcagagtatatgagccaccatagttggtgtaaccaagagcacaaataccttgcttatgcccccttggaagtgatcacagattgatgccccaggtgactatatatcttgttcataggacttcttcggggagaggcacagcctgtacaaaagtagactctggggtcctcagatgagtttgtaggtggggtggagtctcctacagcagtggcactagtgtccactggtggcctttatagcagttgtcctgtgtctttacttggaacctcaagcttcagttgaggttggtgccatttctggtatctggtatctgtgctgaaagctgatgaagtctgatccctccccgggcgcatgcttaagtttcttgcattcacttttctcctcctatattatttctggcaaccgagagaacaaacagaactctctgcctccaaacttgtcagcatttctgtgcatggtggagctgaactctgcatagtctttgtgagaggactagctggggatcaaaagcacagagatgctacagagaagcaatgtggtatacgtcgagatctatcagggagtgcttctaatgttgcttaacaaagtatgttgcactaaatctttatagactgaatgagcgctcagagttccagcaaagtaaagccaagtaaacatcgctctgatgggaaatagaatttcgtgtgggtagggcagggctgtgattaattctgtggcaatgaaaggaatatgaaaatataggaaggttgtcgaccctgagacatgatttatatctgttgtatatatgtttatatgtaaatatctctgcatattctttaataccaaatgattggcggtaggagaactggtgtttctcatctttaattataaattaatgtgctgataccctaggtatatagtcccatcaattattgatgctggcctcgatataggaattggtaaggaaaacagtgataaaagacagcattgcagagaggaggtgtgaatttctttgacatctcgtgtgtgtgtgtgtgtgtgtgtgtgtgtgtgtgtgtgtgtgtaatacgtacacatctgtgcagaaaacccagtttgcctttagagccattatcttcttgtctggggatttttccagggctcctttggactgcagccttgtccagagtgcatgccttcaaaatgcgcatgttaacgttaaatgatttttaatattctacatatggtttcatggttttgaggctcctctatgggaatgaacagggctgtggtgtgatgaatagtggactatgtccaggacacccacttacttccctacatatcaaacatgtggcgctcccattagagggggctggtctctggagactgcagttgccctatctaatccagtcttgttttggtccctcggccccagattgagaaggatacattgttctcagacattcttcttttaattaaatgcagtagatatgtcacgtccatgaaatagtccaggtctgtttgcacatctgtggctgtgttctcctcctcggcttccacttggtttcttggaaagaaaagcaagcctacatttattcttggattaattgattggttgtgtgcaattggcctggacagttcagatatgatcttagtattttcatttctatttgtagcagaatgttctctgtcacggtgctttgcagacattcgctgaaaccttcacaacccaatttccttttttttttttttttttttttttttgaatacagcacctcattcaagctggtccatctaggttcacacatgtccctattcaagcacgcacgggcggggagggcttaggagaacattcaggtgtagggacacggctgtgtgtgttttaagctttaatttgctaggctaatttgctcattaatcctatggctacaaagtactgtgaggaaccttctatgctgggcagcgattcctctgctgtgaaggcaacctgatagctggtaaaattctccattcaattataattttaaaatactggagtaaactcagcaattcacaagaggctaaactagagccccattagaagggtactacaagtaaacattattaattataaaaaattgcctaaattagatttttttcacacctgcttcttgcttaattagctagcaatccacatattccattcagttgaactcttactatttattcaagcatacttgacattaacatactgtttgatgtttgatatcctcagttttaatttaaccacatgacaacaaatggtgtttatgaaataccagtgagctggaaaaatatcatgtgttagagtagcacatgggaagtgaatagagagtttcttcaggaagagcctgaaggcaataagaccttcattttcttttttattttatgttttcatccctggttttttaatcataccccgtagaaggactgaagatccttcaagaacagcccccaactacaatgcaaatatcctgatggcatttgggatggaaaaagtgggtcctcacgctggctattgggaagggtttcacagaactacgtgccatgtcttagagacagcatgctctctctctctctctctctctctctctctctctctctctctctctctctctgtgtgtgtgtgtgtgtgtgtgtgtgtccctctgtgtgaggtgtgaggtaaatgaataagtgtgcaccagcatggagacagaggttagccttgtgttcctctattgctttctggcttattttttgagacagggtctttcactgagcccagggttcccccaattcggctagatgggttggcctgtgaactccaggaatcctcctgcccccacctccccagcacagcactgggattataggttcacagcgccatgctcggcctgttcataggtgttgagactctacggtgaagagcattaccatcatggaacttaagcatctccctaggcactgtgactgttgtttgcggggaggagataatgaggctcttataggtccccgcagccgtctgctgtcagagaggggaaaatggctatgttgagaccaatggctctgccttggtctttatctcagtcattccctctggtttgactaaccaaggtgatctggcaaccacagggtgaggtctgcaacggagcacctcctggcattgttacctcttacaagtccaaagtcatgcctgtaaaaggggcttggggacaggcaggaacagttcaaaaccaacctgccaatgggcccttggactcgctatctaattggatttattccttaaacttctcctcggcccctccaatagagccacaggagggagtcagggctgtgattcctgtcagccacttcgtaaggcgagcaccttgagatctgatgataaaaatcaatgcagaaaattcccggggctgagagacaaaggagaaaattgtctccataacgtattgattctgactaatgacaaacttgttggagaggattcggattgatagctgctggctcctctccaggaagacaccgagttccatctgactctgatcaaactgtctgtaaatcattttgaacttgggtcctgcagtttttgtgttcacaccacggaactgtggttaggatttgacatccttattcttcttctttttttttcttttctttttttttttggctgtctttgtttaagaaccacttatggcttttggctgctggtgaatagagaggcttgttagccgaggcaaacatgatgtcacacactcccaggattgttttgttcttcagtgtgggtcaggctgtgtggatctaagagagtgtgtagtgtcccatgtaatggatggctctttaggttcagaggctggatccagacacatctggataatagtgggaagttgacccaaaggggttgacatctctagggacttagactagttacatttagagctaatagtctttgcttctggaaggctaattatcccggagctgagttggtatccaaatcggcccttgtacatctgggtccacagaaaccaggtacagtaaaaagccaccagtactagcaccggtgctcactgcttctcgtcaacagggtttgggtaactctcatttctttgttttacccgacatgctctgtaacatatctgagcggagccggaaacaggaagggtttatgtttggtattcagtattgaaaacactgttaccatttgtgtccaaaggcagctactcctgtgaactggcagatcagagatccattgggtagtaggtggaggccacacttaaaaattatctaaagaagtttggaaaatagaaagataatttaaaatattttcttttcacttaggtaaatgtgtgtatatctgtgcccatgtatgtgagcgtggctgcaggtacccacggaaacctgaaggaggggcttttaacaatggagtcatctctctagctcctagaaagatgactttttaaaaatgagctctaaagctggtaagaaccaccagccgcccaccagctgcacccccttctgagcagtgtgcacccccattcaactgcttcctgccatcttcatgtttgcttcccctgtggaggggccctttccaacaagacttactaaaattttctgttaacgcctcacctttaaatcagtgcaggaaaaccagcacaataaaaccctttgtgtgtgtgtgtttgtgtatgtgtgtgtgtatatgtgtgtgttatatgtgtgtgtgtatgtgtgtgtatgtgtgtgtgtatatgtgtgtgtcattgactatttgaaatagtctatacatgcaaattataagatttatctcctttatgccagggaatattattcctgtctttgaaattttaagcattctgttaaggaaaaattcaaacacatgcagaaatatcaggctagcaatccaaagcgcttcatgcactggattacccagacttgctgcaaagatcaccactctctgtgaattttaatctcaatcccttgcctttttttttttttttaatgcacgtgaactgagatagtatacatctaaagccatatgttacttaacaagaggggatggttctgggacacttttgtcattgtggagtcatcatagagtacacttgtgtaaacttagtggcttaagatgtcactagttggttgaatattaaagaatataaaatatcataagccaggtgtggtggcacacacctctaatcccagccctccgaggctgaactgtggattcctgtgaggttttgggctagcctggtctacatagtgacagccagaacagccagatctacatagggagactgtggtaacatcactactaccaccaacaacaaccacaactataacaacagcaaacaacaaaaaacaaacaaaagaacaccatcagaaatgccgtctgtcatcgaataaacatccttacatagggggtgttcatctcttttccatcatgtgctgcatgtaaaatgaagtcagggtttgaggagggtcattttcttattggttcatataggtatttatgaatgtatgcatagttacctctgtgtgtgtgtatatatatatatatatatacatatttatatatgcatgtaaatatgaatatttatagatttgtggatatgaatatctaatggtagcattatcctcactcttaatttttaagtgtctaaaacaggggaatcatgcaatgaattgaaagcgaaggagacaataaccttaagtggaggtattaatttcatattatattctggctttctggagcatctaccggtgattcctttagcaagaattatgattactctaagagtttcccctctcaggggaactttcagtcgcacactagagaagaaaaaagagtcagcgagtagagactctcgattggagcatctcttctcccattaatttgtttagtgtgaggagtgtctacaggtacccttgagtaaagcagaaaactgacagcaaactgagcctttccggtggggataggacaaaggacaccccacgattaggcccccacttgtttattatgctggagagctttggtaaatatttattctggccatcttcttgctcatttgcatgtgaagtttattttcgaaggctgtggttttgctttgcctctagtccttggaacaaagggtagacaggccctgccagctatatcagcctgctttgagggctctgcaccttggtcctatgggggtgggagagagacagagagagagagagagagagagagagagagcaatactactgacagtccttcaggagattggatannnnnnnnnnnnnnnnnnnnnnnnnnnnnnnnnnnnnnnnnnnnnnnnnnnnnnnnnnnnnnnnnnnnnnnnnnnnnnnnnnnnnnnnnnnnnnnnnnnnnnnnnnnnnnnnnnnnnnnnnnnnnnnnnnnnnnnnnnnnnnnnnnnnnnnnnnnnnnnnnnnnnnnnnnnnnnnnnnnnnnnnnnnnnnnnnnnnnnnnnnnnnnnnnnnnnnnnnnnnnnnnnnnnnnnnnnnnnnnnnnnnnnnnnnnnnnnnnnnnnnnnnnnnnnnnnnnnnnggacttcttctagtcatttaagcttgttccttggatttgcatcctatcctatatgtataatggtgtgatattgtatacaccttgttgatgtacttgagatgatccgaccagacatgcacagtaaatacttatacattctcttgtgtgtgtgtgtgtgtgtgcacagcacatgcacacacatacacacacacactcttaaaagatctgacttggaatgcctttaatcccagcacttgggaggcagaggcaggcagatctctgtaagtttgaggctagcctggtctacagaatgagttctgggtcagccagggttacacagcgaaatcctgtcgaagaaaacaaaagtcaagcaagcaaacaaacaaaatctgacttggagaactgctttcagttctttcaatgacacatgtttaagcacaccatctcagagacagatttgggctaagaggatctaaacgaacactgctctcctggaagaatggctttgctcttaaaatctggataaagtgagtaaatgaaaagccatgctttctagggacatggcacacctgagtgctaacattgtgcaggaagattttctcttgttttcataccatgtcatgtgttgccactgtgcaagccaacagtggaggctacaccatgctttgtgtgtttggaaggtttctccagaaaaagaacatagcctgggaaaacccagggctaggagccataaatcagcttcagggagatgagattccagagacacagcccttcagagagcggagggtccgcctcagggacaactgtgaaggatgtccaaagaagtatcagtattcttgctgccttggtgacgggataacaggatgtactttcttgccctttaatcaaatttacttaggaggcatctgtgaatccttattctggaatctctggccctgtccattttggctgctgtatttcagatgtgactacagagagatcaccttagatggagaaaggtccagaacaggtaagcagaggtgtcaggacctggggcaaagggatctgaactgatcatggaacgggctacagtgtaatagccaaggctgggcagctgagccatgaacttgaataaaaccggagacatccccaaacaacaggccagaaccaatcacaccttggaacggaagatggtgtctacctttgacatgtctggtcattggcttataaattgttatgttggcactgaataggttagccaggaaaacagccctgagtcgttactggctaggcagagccatctaatgcaaggaagagttcctcattgccaagaaataaatagcgagcgtttcttccttgttctcccaagctggtcttcagctcatcctccctgagggctctcacctgcagtcctctcccggtgcttcacgtgccgaggctctgataggcctgaccctgacaggccttctcatgggctcaggtggactgtgtcagcaagggtggaaaacaacgcttctggattcgattttataattccccttgcaatcgaaatggaaagagggccacttcagcgcagagcggaacaataacaaactagacatcctgggtcaccatatgtgggaaaaagttctcctgggccttattgtacacacccagggagtgaaagagagaaagggggggggggggggggagagggaggccctaccagcaatggcaacatcgttaggtaggataaacaatggctagtcactggtgtggagcagaggctcagattccaatagcactcaatggggagccttccttaaaaaaattacaagaagctgggctggagctggtccacgctgggaaaggcagaagaagcaaaaacaagagtcaatgaatggaaattaagcagcaggaaacagggatttggcacaaagttggaatttgaaactgtggagaggtgtcagtgataaggttgtatagggtttctggccaagagaggagagagagaaaggagaaggagaaggaatgcagatgtgttcattgaataaagtgcagatggggggggcaggaagaaaggatgcagggaagtcggactgagcggaggttacatttacattcaagcaaggctttaaaattattttctccgtatgtctggatgaaattacaggttggttcagattgttccaatctacgggagagattaaggcaacgtttatttgcttttacctcttcctgctttgggcagcctggcttatttctgatggaaggctaagactgactccgggcagctgggaccagctcagggcagctgggaccaggtgtgcatcttgggccgaggctctgttcagcttgtttttgttggaaatatcggggatgtctctgaagatctcagctcattgtgcaggttccctggccatcacagaagtcccatcaaccctctgcttctgtagtggccacgggaggaagcctggccgttggggttctggctcttatgtgtcagtgctaggttggactgctcctgggcacaaggttaacacactgaaataagcatgagttccaatagtcttactgggcttatataacaggaaaggtgaactttacccctactgcttggttgtcctttacctagggctccacaaacagtaaggataagaggcagttgggttggaaggaggtggcagagagattttagtgggtctcctgctctgagacacctgatatagtcactttaccatccatgtcaccagtgggactaacaataaccatcaggtgtattttagaggtgttgtttgctgagacaatatatatgggagcactttgcaaatatcctgtgttccctttcgcaaggtaccatcctatccttatcttcttagcagagagctgcagttttgaaggggaaatggcaagcttttctcgaaaagagagaaagcttgcattttggacccctccatcccgagtttcaacaatcgagggcatggcatgaagtcggggatcttgccaagaatttccaagggatcaatatggatatcagcaaacacagggcagcgagtgacttgtctggttccctccatttgatgagcaatgcttccttggggatgagcacaaatgtcatgttttctctattaatgttgttgacataatagtctagattacacttaagcctcactgtgtgtcctcttgggagagagaataccatttaaatgttagcattgaagaaggaaaattagataagcttggagaggggatagccaatgagttgttccctgtcacagcataccacctgcctggtagagcttccatccatccctatcttaccttcgccccttcgctgatgatcctagaccagaaatactagttccctttcactatgtgggactctggtctgtgcagcatgactgttcaatatgatacttatgaggagggaggcatatcactacattgattcttttcttgcgtgatttaaagtctttttcttgttaattgggtattcatgtgtatgtgtggcgcttgtgcatctgaatgcaatgcccacaaaagtcagaagaggacatcgaaccccctggagttgggatcacaggcagttgggagctgtctgatgtaaatgctaggagctgcaagagcagtacatcttaactgctgactcatctctccagtaccctcagtacctttatacatgtccactagaaagtaacacttgaacttagccagaaaagagagcttccttcccactccctgtagagcctcacatagcttaggctggccttgaatttactctatctaggacgattttgaacttctgatcccctgttttgatctcccaagtgctgggaccataggtgtgtgtgcccacacctattttgtgtgatggtgggattcaaacccaggacaccatgcatggcaggcaagcagtttaccacctgagctgcatccttagctccagaaagagagctttaaaggggcttgacatgtatgagtacagagaaacatccttcatttggcttaccattcaagctctggaagagtttaagcactaaatctttccctttttccttcctcatcgtttaattcttcctgtgaatcatcaggctcttgttttcattttttatgcttcaagacatgagaacgggcagtaaacatatcaatcaacattgctaggccctccatttttaagcccctggaccaaatgcctaatgtgccacaaaatatgtggtgctgccttcgatacatctccagaacttttctctgcctatcaaagctcaccattctgatgtacccatttgtcactgcagtagatataatggcctcccagctgctttcttgcctccaggttcctctgggtcttcagcattctcttcctggagaacaatttggctttactcggagtctcctggagcagctctgtgcctgttgctggcagggtccgtgcctttggccattcaggatcggactcagttggcagacctgctgcccagtgagtggcccagagtgcaggtatcctccgtgagcatccgtaagtgcaatgagtgatctgtgagccttctctcatcctcctggcttctttggccccaggacgctttgtttgcagctttctcgtgagttgtcttagtgtgtgtcctcacaacagagatcttgggtccccagccagccgcagtcactgtggggagcaaatgagacatgcagcaagctggtcatagcgcagttaaacttttgatgcatattagggtcttccagtagtcaggggtcctcaaagacatgaaaggagggatggggactggagccctgctggctctcagggcagggattagtgtagtcctagagatgggagagagtgtgattaactaacaagagggccttgaacttgagggcagtcatagcaataatgggaaaatggtggggcagggtggggtaggtggggtgatagccatttaaggctatggaaatacctcttcctctgtgtctcagaacatttgtgaggaccagtgtctaaatacctgtctgagcaggaaccctctgactagccacctccccggctgctagaaggtactgtccatggcaggctggtcaagggtctccgtccccaaggaggcgacaatcacagtagtaaaggcccagcagctctgctctgggattcaaggatgctgtgccctccagaacccagggctctcaaagactggtttgggttcccacacagccattgtcacccttcctccacaagaactattttgagcctctcctgtcatccttctctcccacacgttcccttaatacgactagaagatagctagttggtgctaacatatgttcttataattatgttgctagcatgatagattatttatttgacttttttttttttgagtccctgatccatgtaccaagactaaggatcttgtttaaatgaagaggtactaaggcaccttgacagcagcttgggttttttgtttttttttgttttttttttgttttttttttaaagggggaagaaaaaggagaggccccagccttcaagaggtctctaatctgcagctgtctgtttcatatgcaccctaaggtacatctttggggagactgagtctccaagcacctgaagaagtatcacagctatcagataatgctaagctacttgtttctgaccagagaagggggtcagagggcccccccctgttgggtgtcctcccgccttgaagcatcactcacctgtggctagtgcccagtagttggatctggggcagtgagctactgcaacattttctcttatcacagatgggaggtctaatgatctgagcacagtgcctgcctagggtgacatcgaattagtcaaaagtcagaccccacatcagttgtctggctttggagtccctgtcttcccatctatggagtgaacctttgtattaccgacttttctgttgctgtgattaaaaaaataatattaataaacaaaaccatgactgaagcgactgataggaggaagggtttattttggtttcttgttccaaaaggatagataggagtctgtcatgaccaggaatgtggcatcaaatgtcagacaaggcggctaatgcaggaacttagcatttacagaggagggacaggaggagaggggaggggggagggagagggagagactgaggatgctgcaagactctgaaatcaaagcccactccaatgcatacttcctccagcaaggccacgcccccagtgacataattcctcagcaaggccatgcccccagtgacataattcctcagcaaggtcacacctcccaaaaccaacccaaacagtgtcaacaagtaggaaccaattattcaaatactcaagatgatggagaacataattttttattcaaaccaccacagtcacggtggaaagttcccccagtggaaatgcattcccttagcccatctaggagtcaagcaggaggaaattaactcagcccaggaagtgtggctctactcttacttttagaaaagcctgttcccacttatctccttccattattctctcaaccagcattttctgagcatccatgacccaatcataatcaacccaatgaattgttatcctctgggattttccaatacggaggctggatgcctaagtcaaagagtcgttagcatccaggcgctatagtgagaagagccacatgagctgcacacagttctaagaggtcacagggcagggctcctactctgagcttaatagtactgaggggcttagcaatgcctcttttctctcatgacctcatattcctgctctgttgcaggtgtagatggccttcaagaggtttgtttgcctctttagacagtctgagcaaagtgtgcagtttacctactactgtatgtgcagaaggaaagatgagagtgaacccaggtttccaagaggcaggaatgacgctagggaaaggactcttcctaatggagcctgtgggaagagctcctggacgtcctgcagggcagagctgtgcagctcagcctatgcaataagatgaaagaaagccagtgaggcagtagcaggggttggaatgggcagaaagatctgggtgggaggaacggacatttgcttgagttttaaataaagcatcacatttgccaaggtgaagggcagatggaagagtgtgtgtgtgtggggggggctagcaaaacgtgccccccccaaaagtgacatgtcaggctgtgggatgaggactaacaggatattgatgactccttaacccaaagactgtccggcctctttgcaaatatacctccactccctgcgatgggggccctggtcctcgtttgccttgcgcggacctcatttaaacctcagccatctcaatgccctctgtatatttgtgtgcgcatgcacatgagcgtgtaggtatgtttctgtgtgagtatatgccacatgtgtgtggatacccatcgagaccagaaaagggtgttggatccttgaatctagagctataggtggttgtgagcagctcaatattggtgctaggaaccgcacttgagtcttcttggcttcttggcttctctgccaagtgttcacgttaaaaattactccaagaggaataacctccgatgatttatgttagacttgacccctgtctttttgtacttagggcatctacttcaagccatggtttatcttatctttgcttgcctgcctaggaaacgggggaacacttctggctctggttttctcctaggaatggatgtagcttatcctttcactggtggatcttcaggctcttcagagcagtaaacactaggggatcttttctctagctcagccggtccatcctctcaacgcccgagtgaatttccaggttcccagagatcaagctgactaaaatgattagagaatacagttctgtgacttgggaaacatttgagaattgtttggatagagacagcatagaaataccaggtggccgttaggaaatgagagagtggattccaaccagtgctgtgccatttacccccagcctcctgggtggccagggagggttttggagtagagaataaagggctgtgtgtggggctggctctttctcttgcagctggacaggcctggaccgccgctcacgtaatcacctcttacagccagcagggaagattctagtctctggcaccgtccacggagcacctctttatgagtactaaatttgtaaaaattataaatgaaaatgaggttgtgtgttatttcagcatgtgttctatttaatgaaataagatggtgatatcaaattactggctaatttaattgcctggaaaaattaatttctaaaaatgccaaatcagaaagaatagggaaacagcatctatttttgattttcatttgggatgaaagctatacagagatttttttttgttttaatctttctttaaaaacccatgaacaatcaccctgtcttgggatggagaatcaatttagtcaacaaaaagaaaaaaattttaaataaaattgtggtttcaatatgaattatacacggctcctcagtgctggttttttttgtttgtttgttttttgtttttgtttttgagaatcagtttgtgctaaaattgtgtcagtttaaccccatttgtgagctgatttaccagcttgtgaattatgtatttctgatgctatttggagcaccaaggtattaagactgcctggaggttgcccgaatcctaggactgggggtgcatacctgtagcacacagtggacagttatggtgacatctttgaacctaggtcagtggttggacaaactttaacccgttcttccttggtgaccttctggcttttttatggctgcagtaaatctttctcatgtgccccagtcagtactcagatactgctatggacaatgagacacacagtgaccaacagtggctaattagctgctatggaagcctggatctttctagcacagtggttctcaaccttcctaatgcactcctttaatacagctcctcatggtgtggtgaccccaaccaaaaaattaattttgtttccatatcctaactgtaattttgctactgttatgaattataagtaaatatctgatatgtaggatatctgatattgcaaccctcaagggggtcatgacccactcttttacagcatggttgcagatagactgataccatgtgctttgttcacatggcctctatacaatactaacactgtagcccaggctggttatagactccctgtggagccaaggataaccttaaaattctgatgctcctgtctccatctctcaaactctgggattacaggcatgcaccacaatgcctggtttatggggttcgggagatcaaactgaggtccttgtacatggtaagcaaaactctacccacagagcttcctccccagccatctttctgtttaataaatgtcctcacatacacaatatggtgggaaccgttgatgtagcattttagtgaacgatgacatatagaagcccacctgaggggttccgagaagtctttgctaaagtcacagaaccagggagcattctgtagcccatcagtcaggaacgaaggaagcaaacagccagctcagtgggtgaccttcatgtgatgcttatgagctaggctagtaagttagggtgagtcactcgtccttaagtaaaacagtacctcggtttagcctggctccgttgtgatgtgctctgctgtgctgttcaaaaaggtgacaaaattaatgtttctagaaataatgatttagcccttaactgatttaagacatttcaccacaaatgtcatcctgtgtggtactgatgaatgcccccaggccagctctaggcagatctgtgaagtaggccgagattattttccagtccctgcctgcttcttacggcagtcactttctgccaacaccatcctctccctcagtcccgtgacccctcctccattgctgacagtgcccttctaatgcccttggcttttctctaacaatgaacgaatgaatgaccagatgatctggaaacctccccgtcctgaggtattagtgacttcctgcattgcctttcttgagggtattgtattttaaaagggactcgtaaagaggccccctggacacccagagagtttctcccattcccttggttgtcacaattagtggctgatctctgggcgatttgatttttactgaaatcaaaagaggaaccttgttaaagtgtgtgtgtgtgtgtgtgtgtgtgtgtgaagtccaatgcctcctgacatggtttctaagggtactgtcagtagctccgagggatccaatggagaggtaaacagcataatcactacacagcatgcggaggctcagcacctggccagaaccacagtgccagccacttcttttggacagttcctttggtctcctgcttcctgagggatggtgaggaccaagggacttgatgttcgacagtgatcaaatagcatgggaagaggcctcagcaaatggcatcagcgatggcgcgtgtggagatagttcttatgatgactgcgtttgtacaagacctgtcattatctccagcccttgatttgggtgtgttttggggtctctgggtgcctctggacatcagccaccatagctggagttggagctgaagcattttactggcctcctttttgcagacagaaagaggctgagcagtcggcaccactgccacatcagactcaggtgctccaaggtttccaaaaccctggggttctgagagatgtattcatctttcagttaaggctccatttatttcccctgtgttcaggggctcaaggagggaaccactatttcctttattttatgagtcatggctgttctgtcattttgggaagggcctcgggcccctcaacagcgttatccctgtccaattatctcgagtgaaggcacacagcaaagagtatttcctttctaatgtagttataaatgtcgcgtcagtgggagattcgagaatgcgatcaggaattccatttcctagtcaaacagggtgtaattacagggggactctgggctcatccctcatgggatatcgtgactggggagggagaagcaagacatgtgggcacctcttttggatcaggaaaagaactatagtcttggaagtctctctctttgactttgcttgttcagctatagaactagtttgtatccccatggtgacaaaacctgttctctagagttgtagcaatctgggggcggggggacttttattcatccacacaacactcacaatgggggtgctacaggaagcagggagaggcataaaggttgtcattttgacttcccccagcagagtcatggagaaaacttgttactagagttctggtttctgctgagatcccccatgtctaatctcgagaaggactgtggaaaggctctacaaatgaagagtgctcagatggctaggccctctggttagaacgttctgttccatccgtagctgcttcccgtgtcttctgtgtaatggactccactccgagttgtgtgtcacagttgcctgctctcgcacagagaaggaaatccagaatgacagatcattcggggtctatacctgaggtccgattcaaattcacaggaagggaagacatcttcaactctccttgggattaagatagaaataccaattgttgcccagattgaggaatacccagggtggatgagaaatggaagagggttgcctgatatggcagaggcaggaggatggtgtgctacactgcaaaacttacaggatcgacacagacatgggagggaggtgctgcaaccaggagggaaaagggccaggtcatcaaaggattcctagttacactaaggtactaaggagtacactcctgggtacacaggtctgagagctgtgactttggacagtttactcaaaacagttcggtaggaatggaacgttatcaaatttgactttgagtaggcctggagtgtggggtttggtgagctatgggggagtcactaggggaccattagctgtaaccggaccaaaagatctagaggtctgattaaggcagctgctgttactagagagtagaggaatgaggtactttgagatagaatcacaagagtttgattgggtttgaaaatgagacttgagaaggaatttgagtcataagtgtaggattagggctaggtggctggagagtatgttagtctacattttgttgctacaagaaaatgcatgcagctaagaatctttagagtgaaaggaggtttctgagtctgattcaagtttaagggctgcgccatgaaatgactttctctgcttcttcccccttcttcaaatatttactcatttttattttatgtgtgtgagtgtttgcctgcatgtgtatatgtgtaccgcatgcatgcctgatacctatgaaggtcaaaagaaggtgttagatttcccggaagtgaagttatagatggttgtgagtttccatgggggtgctggaagccaaatccaagtcctctgccagagcatcccatgctctgaaccactgagccatctctccaggccttccttccttcctcttacacagccactggtattcaatgatgggggttgatcttgagggtcttatctaactctacttattttccacacattaaatttctagtgttagtaccacagtgctgattctgtttcaacacatgaaccctttagggactcaatagagttctaggtaaaccacagcagggggccaatgccacatagtagggtcattgagaggcaggatctggcctggttaatggtgatgctgtgatttaggttaaggaagctatagaaatcaaggagaggaaatcttttctcaaggcagcagttccccctcagccacactccggatgactggctttggtacgtttccatttctttgtgcaatatcttcttctcttgcagcatgtttgcctggataagatgggatggagcaggccaggcacaggtctcccattagagccaactcctgttcccaggagtttacacagtaggccctttcatatacatgctcctgactctactcctagctataactcacgctctctgtcccattgccaaggggtattgttactatgccctcccagatgaaatgtgacagccaagcttgggtgtttggtctagtagaggtaggtggatcttgtcttttgttgttcaattttgtgggatggtgccttgttatataacccaacttggcctccggatcctcctgcttcagcctcccaagtgcggagattacgggttcccatgcggatgcatagacttagatgatcctggaggccaaatcactgtgtgtgtgtgtatgtgtgtgtgtgtgtgtgtgtgtgtgcatgcgcgtgcacacgtgcaagtgtgaagattgcatgtgtgcatggtatatttgcaagtagggaccaggaaaccacctcagttgttgtttctcagatactatctcttttctggggggttagggaatggagataaggcgaggcaggcgctttaccaaatgagtcatctccccagcccctggggccctcttccataataaatactgagttctgaaatcggcatttcccatcatgctagacagtaggagtgatggtttgggcccatgaggacttgatctttattgacaggcagaccagggaggtggcatcactctgccagcttggacagtccttcaagctgcatcttgttgagtttgtttgtttttttaataccacaaggcagcataatgtattacttactgggaaaggctctttgaccgtcaatgaaagcaagacacttcagtggcttggggagtcccagatccttgtgtagcactgagagtatgaatacaccacacacacacacacacacactctctctctctctctctctctctctctctctctctcaacagagttggaatcagagtgattctccccccatagcatgcatttaactacccataattctagttggaaactcaaatttagtggtcctccgtaggcttcattcacacaacaaaatccccacagacccccactgtgccctcaacagaaactcactcaagttacaagaggtttgaaggcgaggagcaaacacttgattctgtgtgacagactcccttcccatgtgttgatattttggccaagagactctccatactggtgaatgtagatggtctctttcttgctttctagctactggtgccagaggcttcattcaggtgaagacccagaggagaaaatcaacagaaatgtagaagagatgggagccgttgccaggttatggagtctagccattcccagagaaacccatagaattgcagaggggaaaaaaccatcagaaatggatctgtcatctaataggaacttgtgtgaaaccagatagatgcagggttcagctctggggccacagcaaaggaatgctgacaaactaggcctatgtcaaaggacagccactagaatcttgcaggctccaaaaccagccgaggcaaacgtagtctgggcgataaagccttgataagctaggcaagagtctagggtgggggccacatagcagttgccactgtaaagaaataataaatctgtctttgtccttgtgggttcttcttttctttctttttttttcatttgtttgtttctagttttcttttgtgttgtttttccccttaagacagtgtttcactatacagacctggctagcctgtaactcaccatatagaccaggctagctttaaacttaacaaagattcactcacctttccttccatagtgtgctgggattccaggtgatcgcctagcatagtgttttctttttgagaacttggaatcccaaggggtccatgggtgttttgaatgcaggcctgagaacctgtgtcttctgccaggtcagaaaatcaggggtgctcagtggggtggaccactgtattgacaactgaatgcccgaggagtttatggaaagctgactatgtggggactcctgtgctgcacagtggggaatccaactgtgctctttgacctctgcttgcgagcactttatagtcttatcaggggaaaagaagatcgatccatcgggatgcctgacagtaaatcagtcacattgcaccagggagtctaaagggtcctcgaggtgtggatagaggatgctcttgagtttgaaggtgtgaatgaccacttgctgagggctggggcccagtgttgcccattaacttcatgctttgagtttacttcccatgcctggtcatcttgtctcttgtctctgcagtagcttacagctaggactctgcttcctgctttttctatgcctctccagagtccccagtatgagtggagctagtagcatgcttagcacatctgaagtgggaaggtattgaaaggatggatcttttaagtggagattccctccttttagagcacagaagagtgtgaaaagcagccatgctctgtgacatcacagagggtgtaggcactgggtggggaggtgtgagcagccactgtgggggtgtacagcttccatagccactttgaactgcagcctcccggaactgctcactaaattatcagggcaggagacatgtgtgcagtctccgctttaggcttaaggaagcacagaagccccacccactccatctctagagctattttgccatatatgtaactttgaagtagccagaggagggggctgggtggggactctgccccctacagcgaccttaggtggcagttaatccctatggagcctctctaaaagggggacaggccccatggggaccttgtgtccatttgctaatgactgtaaaaagctgccccaagcccccaagcaccagaggagtactctctgcagtgaaggaaatgagaaaaaaaaaaaaaaaaaaaaaaaaaaacctcagctctgtgaggacacgtgacctcgaggctttggagggacctttctcagcttctctccatggtgaaccaagttcagtgggactgtgattcaggccatttaaggacctagggacttctaggtaacacaactaagccctggaagaagaaggatcattctggttagggatgcaaggcatttgaggatatgagagaagttattggggataagctgctgatatatatatatatatatatatatatatatatatatatatatacacacacatacatatatatacatacatatatacatatatatacatacatatatacatatatatatacatacatgcataaacacactcacattatacatatattttacgtgtaagacactaggacagtaaatgtctgggagagtcctccatgtctctgggacaaacacacagaaagatgggctttgtgcagtgccacattccctcaaatctattgtaccccagctaggctgagaagtgaacgcactccctgtccccatacctgatggtcatcatgggccatacataaattgtcttagtagtcagcattccaaactagaaaagcttttagttgctagttgtgagtgtgtccaaaagatctgctatagagatacgtgtaaaacatctttaaagggggcttatggagatggctcagtggtaaagtgcttacgtgcaagcatgaagacctgagttcaatccccacaacctgtgttaaaactcgggcagggtggtacacactgataaccccagtgctggggagacagggacagagacaggcagatctctgagttcagccagctcagcctacctggtgagttccaggccattgagagcccctgtctcaaaaacaaaaaaatggtagacagtctgaagaacacacacacacacacacacacacacacacacacacacacacacacatacacacacacacagccactcagggtagtgtttaacaacacagtggggcttctgtccagttctctttggaagcatttctcttctcagcttcatttcctccccagatggagggctgacagcgggccaagcattataccgaaggcaattacatcgtgagctcagaaagtttactatctaactggtctcctccctttaacaaacaccaacctcaaccagagggggtttctttagagcacaggttgctgaagggacttgtaaatgtctgtgtgcgaactagaaggcatgctccgagccccgtcaagcgaccccatatgggtgtgtagtttctcacatgtgtttcttacacactgtgggcaagaacatgtgtacttctctctccaacatttgtgtcctctgctgtcctgtgaatcctgatgcagtgggaatgggctcttcccctctccccagactccagtacagtggcaattgctgacccacggagtgtgttctgagcaaacaagaggtcctagcacttgggaccactttgggacagtgcagacttgctttggacacctacattgcatttttaaaacaaaggttacaggtgttaccaacaatggttttctgggattacggtttctgtaaaactagaagaaagagaactagcaagaagggatagatgtggatcacacactctggcatgttggcgactaagaacttctgctggatccttctggtcatactgggcccctttggtgttcttccactcattggaacacagaacaggagtccagcaatggtgggaacatggcttctgttacacttgccccacccaggagtcttccttgagtgctctgtcttgtttccccaaacatatcagatacaaaaggaaaacaaagtttagggcatcatctctgctttgggagataccaagtggtcatcctgttgagtagcagtggccctgcagggtagcagaaggccccgggactgtagaaggcttgtcatccactcctgccactcactgctgtctacccttcccacccatgaggtttggcatcacaccccaccagctcactcacaaaataatatgtggagaatacattctaggcatacagtgccatacatattgatataaagtatccttataattgttattagaacttgccagagtgaaatagatctttttaagatgaagttgtttggcacacggggaaaataacccatgccgtcagccctgcacagagctagcgagcatttactggtccgctgtgggtggggggagggtggagacagcagtggttgggggtctctttccctgtacacatattccgcatgccttccctcacgacacacacggagaaggtaatgaatgaaatcattcttgccatcacctggtttaaatcatgacttgcccagtgaaatgggagagttgcctattttaaggtcttggagaactcgggcagaaatcaagcttttcatttcagatgggccactaaaaggacctctcccagccgtggtttcctttgtcacaatattaaagattaaagatggaaggaaatgatggcagagaatatctttcacctctgggattcagtttctacacagccatactgcccagtgctggaatatgggggaaatgatctggcctacagggaatgagtattcacagacccttggaagcatggtgcctgctgagcagagcagagcctccgcaaaggcccagcccttaccttactgtcttctgttcctatgtcagaaaactatacagtttggaaggtccatgtgagtctcagcatgagatatgaaacctgtattgtagactattcttcagttttaagtcattgctcattctggctctaccaccagcatcagggagcatgggggtccccagctattcttccccatgagaccctgttcagttctatttgttttcatttaaaattttattttttattgttgtgtgtatatgatgcgcgcgcgtgtgtgtgtgtatgtatgtgtgtgtgtgtatatgtatgtgtgtgtgtatgtgtgtgtgtgtatgtgtgtgtgnnnnnnnnnnnnnnnnnnnnnnnnnnnnnnnntgtatgtgtatgtgtacgtatgtgtgtgtatgtgtgtgtatatgtgtgtgtgtgtatgtgtgtgtgtgtatgtgtatgtatgtgtgtgtatgtgtgtgtatgtgtatgtttgtgtatgtgtgtgtatgtatgcgtatgtttgtgtatgtgtgtgtatgtgtatgagtgcaggcactcatgctgcacagcacatgtggagtggtcagagctgctggagtctgttctgtttcactgtggatcaacccaggtcatcaggcttgtgtgggaagtgcttctatccacggagtcatctctacggctatttttttctttttctttggatacaggtgttcatctagctcagactagtctttaaactgctatgcagctgaggctggctttgaattcctgatcccccttcctctacctcccaaattctagcattatcaagatacatcactgggcctggttttatcatgcagtagtctcgtggtaatattcctgagtgcctttacgacatactctaccggcaagatttgacttttctttttttttttttaatcatcatttacaacacatgcatatattaatgctgatgaacacacacatagatagcatgcttacgtataaacatagataattatcaatatattggtatgcaatatgtttatatgtactcatcacatgtagcttgtcagatgctcatcgtacatggtttgagtatctaagagtttcatcatcgtctagtcgcatctatttagccccacagaagttctttccagcacccttgaagatggttagctactgcaatgaggatctcgcccacagaggcagctggctttgactttggttctgtgacagtgttgcacagtcttcctcctgttgagccaggcctgattgtgtgggtgattacagccacacgttcttgtttctgccttctggagcacagatcatctaaggctagcagtgtgtgctctgtctcccgccgccctcactcacctaactccccctccctgctccacagataaggacacaataaaacgtcaagttgccagtccttgggtccattggtagtgggacatatcacagcttaagcaggactacctgccctgaggtttctgagggtactctaggacctccctgaaccacatacaagtaggctacctgtttaaagatgaaggtctcatttcatcttaccaacaacacgccccatcgtatagctttagcgtcctttgttaagtgttttcattacgtgattagtaaaaggtctttctgaacgatccagaccagctcatgagaatggatccaggccacccacacatgacagtgtgtccccacccaggttcaccctgcccctcagacacatgcaactaaactgacatgtcaggaaactcttggctaagcagtcttgtgttagtatttccacaccaaataaaaccatagcaagaaaacagataatacatagatagcactgaattttaaaataatgctctcagcctgaaaaatccccagtgatgtcaaagaaaatcattagaaaaacaagaagagcagaaaaggtgtgtgtgtgggggggggggatttgagctttgttggtcagaatatgaactgccacccttgtttgtctctgagttttgttaagtttctcattttgtcttaatagtgaggtcaccctgcagaaaaatgcacggtagctgtgttcttgtggagcagaagggaaagatgagactgaaaggtacaaacaccatgtccctcactgggagtccttgcaggggcagggcaggggtgagggcttctgagaaactcagcagtgagcagatgaaaagggacagtctccagtgtcttggagacagctgatcatgtgcaaggttccacagcatgatgaaaggagctgtggcaatcctttaagactccctatcttcccaggaccggtcataatttacaagtaaggacacgaaggctcagaaatctctagcgatgtgtctaccaccctgtgactaacatggcagagccgagattagaaccttggtctttgggtcttagcctgctacggtcaggtcctcactgacccctcactgaggagagcagatgactttgtcttatggttgggacgatggttcttcccatccttctgcaagaacaggcgtggatggcttcccctcagccacaaatcagatcttatcatcgtccccaccaatgaccagccacagctccaagtcaccaactgttaaagatggagtgtttctcatatttcaatttagtacttatgagattgggtacttatcatctgtatttgctgtcaatgaaggatgaattttaacaactgtataagtagagccaaaaaaaaaaaaaaaccccacaaggaaggagaagagaaaactaggctttttattttttttcaaagtaaaggaggaaaaaaaaaaaaaaccaacacaagcacaaaggaacaccctggctaagagtgggaggggaaagcggtgggagctaatacctcaagatgcattgaaacattttagggaattagggaattctgatctcttgaaaaaaaaaaaggaaaattaatattaaagacaagctgtgagtttccatctggccttgccgctttcgactaacgcttccatgacggaattcatctgtccatcaactgtcaaaaattctcctgtcagtaaatcccacgataccccggcaagcccaccccgctcaaaatattccttgccacaaactattccgaattctgaatcctttttctcagatctccccactataagacataaaagttgtggcttcctaccacctcagctccattttctctcttcctttcctctcccctccaacccatcctctagtatcagggtacaggggaagctgtatggtaaaattggggatcccccggtcgctgagagtctgcattcccaccaagattcgtccaagctcttctgctggcgtctgacaacagacagcccacatctgttttaaaacatggagtacttatgaagtgtgaactccctactgtttaatgtaactacgtgactatttaatgtacacagtggtagaggcactcagaatgccaaactgttgtgacatgcctgaaggacatatataaacacaatgtactgtggtttattgtcacaaagagcatcgatgccaccaataggaagatctgactgcttgccattggaggcaattgaggaaggaaaaatgtctgaggtgctttctctggacctgtcactccaatccatcccataattcatacaggatagatgactcgacctgtaatacttccagaatgggctttttaaaacattccgtttcaattgcttaaattccagattttttgcaatgagttgtcctttaagttaatctgagtgtgtgatgcagtggacacaggaggatgcagagctactaaaggcttggcttcttgtggaaacttggttcacctttgggggactgaatgaagagttttcaggtggtagaaacgtcaggtaacactttggtattgcttgcggctgacttggggacattagttttctatgcattattatcgacagagaaacatctacagcctttgcctgtgttaatacctaaataaaaggcaaggttttaaagctttgcaaaaaatttttttatacatttctcccaaaggtgaattctcataccttctgacatctcattaatcgattgaccagaatctgttatttttacattccgttgctacaattctaattaacctttgctagttaaatacttaccccccaaaattgtagcccttttcctctaatgcaaaaatttcaggaaaacctttttcttgttgttagcccttaattaggcattaagtgggcagggatgggtgcttcatggcatctactgctcctcgtaaagggtttttgaaatgttaggataaaatcttaaggtacaaaacacataggaagtgtgtgctgcaccaaagcttcggagatagatcaggctctccttagacatacagttctcacgcttttaaaattctaggccgacatgtctcagaaaataaatacattcatggtaagcaatatgaaatgtttctccaaagaacagcaacaaaacacaccccaggagaatcgctggaggctgagaaagagaaggacccactttaaagataaaccttaaactgatactgctgtggattttggaacgttcagcctcactcattatttctagatgcaggaagaccccgttattcagcacgcttatcccaggccctgcctatgtgatttggggttcctctagacttttaggttactgtgtcctgttgtttgaagaattttctctaataacttagctgtcagattagtgaatctgagtgggtcttttagggaaaaaaaagtggtaaatgttctcttccttccgtataagtacaggccgtgtcctgttcaagggctaaggacgttcttttaaagcttattttaaaatgacagtttgaagaacccaaggccagaaaaactcagccacacgaccctgaaagggcaggaaaccacttttttttttttttgcagatctggggaaatggaaagtttgggtctgaggtcttgtagaaacagattggcattttaaaaaaatgtagtgaatgtgctggtgtggcccggtcgcagtttcatagcatattctccagttttcacgagtatacgcggctcacgcccccccccccccccccccccagcaatcccattctgtgtaacacctcacactgctcctaacggcgagaagtttctggttacagggctgcagtggccgtctaacattaccagtcttccgcagcctccaaacgggacttgaacaaggctttttgttttaatctcctttctccccgctggttgcaactttgggaggggacgccaaggttcgccaggcaaacagggttagtgcctctttaaggaatatttaaattgcatttcctactgtcagttaagtctcatcaatcatgtttttaattaaaaagaaggacatctacatcccacttcccactcaaagtgcataatgaaattgtagattggggctgggctagagaatctcagctccgctttgtgcatccagtgggggaagcagggaggtcagaaacagtggcgcatacgcaagtggcaaacaaataacactcctgatagggccgggtgacatgtgtcaacccttgtcatcgagaaacaagaaaggcaatgtgcccagacaaagggtagggtggaatctctacacactggcagaacctgacccacgcgcgagggctttgtgtagcagacgcggtctctcattgttctgtgactgcctccccagtacccctgacaacagccatcgccgctggcattccaccctgacatctgttcagctttattgatgcggccctggaggaattcccagtgtaaacagggaaattctctaagggagccccgtgttgtaaaaggatgagctgcacaacgcagagatttaaccactatttaaaggtgtgacacatgattgaaagtgacttgatttttcccccctttccaatcccacctccctctccacccttaactgtatttggcacaaactagcttcagcgacaccccacctccctctgctccttgctttgttttcctgatgtataactgttaggagaaatgaaggatgggggttgggggttgctgagtaccaccatccaaaacagccattaaaaaaaaattctgggttacagtcaattgcatctagtttgttgcgctgggatcctgcctgctgcccacccacactcctggcaagaaacagcttgaaagtcacttggtcctgtggcagaggccagtggggtgggctttgtcctcccactaagcagcaagtgtggcagtttacagccccagagtgaaacctggtcggacaaattctggccatgctctgcttcagggacttaactatggaattttggcaatggaaccataggatggagatatatatatatatatatatatatatatatatatatatatatatatatatatatatatatctccagacctgatgggacgtgcaaagcatccgtcattgctctagcaaatgcatgtttgctccaaggccagttctaaaatgttgcagcttagatcaacttcttggcagacattcaagtatagggagtgtcgcacaagctctggccactaacattttgttgcttcagttaaatgtgcagcactggctgggccctgtgcactgtgactgcatggagtgagcattgaacttgacttggactgtgggggtggaacgtattttgccaggctgtgggtcgtagttccagaccctgctgatagatggcaaaattgaaaagctacagtgatttcctcttgggctgaatcagaataaatgaggttctgggttaccataatcaaggcaaaagaaaatggcaacattatcagagtatgaagtccaaagccacaaaagaaaagtctctctaggggagtgttttcaaagaacagaaatctaaaagaaggtgggtgtgtgtgtgtgtgtgtgtgtgtgtgtgtgtgtgtaaggggttatctgtgtctaagtggatagtgtatgggtgtatctgtgtatatgatggagattatgtgtgtctaagtgtggtgtgtatataaactttaattcgtaggctggttttcacctagtgtgttaatattggcattcagctatctggtctttcccctacattctacaaggcagcaggacttcaagtggaagtcttcagaagatcggactcacatctccacagtttaaatgtttcacttaaagcaatggaaacactgtatagatttttgtttctaaaagtaacttatgtgtagcatactcatttcacacagtttagaaaatatgaacaaaaagtacaaaatgagaaggaaatggccccagtaaaccaccgcccaatcagagtggtaacccttcagagttaccactcttcctgtcttccctttctctttcaaaaacaaaaacaaaaaaaaaatagtgtggtgattttacattctcgccctttaatctgtttacttcttagcacatctgccttttggtgtcatcggataccctcttatgacatcactgagtaactgtcatctttgggacaaatatagtttctactattttgtcctttgtaggcagtactacaaagaacatcgcatggcagggagagctttccgcataggaaaagctcctttaagacaaatcctggacacagggttctggggctggtggctgtgcatgctctcagagatcctcggtcatattgctttagagccagagagattgtcccaacttcgactccctctgtagtagataggagggttctggaatagaagcccagtgggcgcattcagggattcccttatagcgcagcagactgcacagggaagccagagtcccttctctatagatacacggcgcgcttctaattaatatgtccctttcccggtcccttcccatctgtatttttctgccacagtgatggaaagcagcgagtactagcatctccgtgctgataaannnnnnnnnnnnnnnnnnnnnnnnnnnnnnnnnnnnnnnnnnnnnnnnnnnnnnnnnnnnnnnnnnnnnnnnnnnnnnnnnnnnnnnnnnnnnnnnnnnnnnnnnnnnnnnnnnnnnnnnnnnnnnnnnnnnnnnnnnnnnnnnnnnnnnnnnnnnnnnnnnnnnnnnnnnnnnnnnnnnnnnnnnnnnnnnnnnnnnnnnnnnnnnnnnnnnnnnnnnnnnnnnnnnnnnnnnnnnnnnnnnnnnnnnnnnnnnnnnnnnnnnnnnnnnnnnnnnnnnnnnnnnnnnnnnnnnnnnnnnnnnnnnnnnnnnnnnnnnnnnnnnnnnnnnnnnnnnnnnnnnnnnnnnnnnnnnnnnnnnnnnnnnnnnnnnnnnnnnnnnnnnnnnnnnnnnnnnnnnnnnnnnnnnnnnnnnnnnnnnnnnnnnnnnnnnnnnnnnnnnnnnnnnnnnnnnnnnnnnnnnnnnnnnnnnnnnnnnnnnnnnnnnnnnnnnnnnnnnnnnnnnnnnnnnnnnnnnnnnnnnnnnnnnnnnnnnnnnnnnnnnnnnnnnnnnnnnnnnnnnnnnnnnnnnnnnnnnnnnnnnnnnnnnnnnnnnnnnnnnnnnnnnnnnnnnnnnnnnnnnnnnnnnnnnnnnnnnnnnnnnnnnnnnnnnnnnnnnnnnnnnnnnnnnnnnnnnnnnnnnnnnnnnnnnnnnnnnnnnnnnnnnnnnnnnnnnnnnnnnnnnnnnnnnnnnnnnnnnnnnnnnnnnnnnnnnnnnnnnnnnnnnnnnnnnnnnnnnnnnnnnnnnnnnnnnnnnnnnnnnnnnnnnnnnnnnnnnnnnnnnnnnnnnnnnnnnnnnnnnnnnnnnnnnnnnnnnnnnnnnnnnnnnnnnnnnnnnnnnnnnnnnnnnnnnnnnnnnnnnnnnnnnnnnnnnnnnnnnnnnnnnnnnnnnnnnnnnnnnnnnnnnnnnnnnnnnnnnnnnnnnnnnnnnnnnnnnnnnnnnnnnnnnnnnnnnnnnnnnnnnnnnnnnnnnnnnnnnnnnnnnnnnnnnnnnnnnnnnnnnnnnnnnnnnnnnnnnnnnnnnnnnnnnnnnnnnnnnnnnnnnnnnnnnnnnnnnnnnnnnnnnnnnnnnnnnnnnnnnnnnnnnnnnnnnnnnnnnnnnnnnnnnnnnnnnnnnnnnnnnnnnnnnnnnnnnnnnnnnnnnnnnnnnnnnnnnnnnnnnnnnnnnnnnnnnnnnnnnnnnnnnnnnnnnnnnnnnnnnnnnnnnnnnnnnnnnnnnnnnnnnnnnnnnnnnnnnnnnnnnnnnnnnnnnnnnnnnnnnnnnnnnnnnnnnnnnnnnnnnnnnnnnnnnnnnnnnnnnnnnnnnnnnnnnnnnnnnnnnnnnnnnnnnnnnnnnnnnnnnnnnnnnnnnnnnnnnnnnnnnnnnnnnnnnnnnnnnnnnnnnnnnnnnnnnnnnnnnnnnnnnnnnnnnnnnnnnnnnnnnnnnnnnnnnnnnnnnnnnnnnnnnnnnnnnnnnnnnnnnnnnnnnnnnnnnnnnnnnnnnnnnnnnnnnnnnnnnnnnnnnnnnnnnnnnnnnnnnnnnnnnnnnnnnnnnnnnnnnnnnnnnnnnnnnnnnnnnnnnnnnnnnnnnnnnnnnnnnnnnnnnnnnnnnnnnnnnnnnnnnnnnnnnnnnnnnnnnnnnnnnnnnnnnnnnnnnnnnnnnnnnnnnnnnnnnnnnnnnnnnnnnnnnnnnnnnnnnnnnnnnnnnnnnnnnnnnnnnnnnnnnnnnnnnnnnnnnnnnnnnnnnnnnnnnnnnnnnnnnnnnnnnnnnnnnnnnnnnnnnnnnnnnnnnnnnnnnnnnnnnnnnnnnnnnnnnnnnnnnnnnnnnnnnnnnnnnnnnnnnnnnnnnnnnnnnnnnnnnnnnnnnnnnnnnnnnnnnnnnnnnnnnnnnnnnnnnnnnnnnnnnnnnnnnnnnnnnnnnnnnnnnnnnnnnnnnnnnnnnnnnnnnnnnnnnnnnnnnnnnnnnnnnnnnnnnnnnnnnnnnnnnnnnnnnnnnnnnnnnnnnnnnnnnnnnnnnnnnnnnnnnnnnnnnnnnnnnnnnnnnnnnnnnnnnnnnnnnnnnnnnnnnnnnnnnnnnnnnnnnnnnnnnnnnnnnnnnnnnnnnnnnnnnnnnnnnnnnnnnnnnnnnnnnnnnnnnnnnnnnnnnnnnnnnnnnnnnnnnnnnnnnnnnnnnnnnnnnnnnnnnnnnnnnnnnnnnnnnnnnnnnnnnnnnnnnnnnnnnnnnnnnnnnnnnnnnnnnnnnnnnnnnnnnnnnnnnnnnnnnnnnnnnnnnnnnnnnnnnnnnnnnnnnnnnnnnnnnnnnnnnnnnnnnnnnnnnnnnnnnnnnnnnnnnnnnnnnnnnnnnnnnnnnnnnnnnnnnnnnnnnnnnnnnnnnnccccaccccacccccgctttcctttcccctgtttttgacagtctcatatagccatggctggcttcaaacgttgtatgtctctgatacaaaccttgaacttctaatccttctccctttatctgggattactagcctgtaacaccatgcccagtttatgtgttgctggccagcaagttcagggcctcatgcatgttgggtaagaatgcccctctctctgatgactgtgtctctgcccctttccagctccagctctgctgccctctccctcttgttgttttgagacagagtctcatgtgacccaaggtggcctccagtttgctttgcatctgagcttgttgtcgatttcctaattctcccatctgatcctctctggtactgggattacagacatgcatgaccatgccaggcagtccagtctattcagctgtggagtgagactggaggatgcaagcccctgtgttgctagatatgcctagttgtatgttcagatatagcgggcgatggtggaggagggcgggtggctggtggggtgggggtcaggggtggcggcatatgccacttcttcacttttgagttctgcgatccagagtcttccatcttcagaggtgcagttaactaaaatggttctttcagttctttgcactgataattgttgttcaaagtcaagttcattgagcagcagatgaggtttgtttgggcatagctcaggcatagaatgcttgcctggtgtcacctagaacagcaccaaaataacaacaaaaggaggttttcttgcaagcaaattatagtcattcatatatatatatatatatatatgtatatatatatatatatatgtgtgtnnnnnnnnnnnnnnnnnnnnatacatacatacatatatctatatataatatacacacatatatatacatatatacatacacacatacacacacacacacacgctgtataggaagcagctggaaagccgtagtttttttggtgagtcatgtagctactcctttctcaactaaatatccaatgttaaaggatgctggccagagataataagaaggattttaatgagtcgttgatacttggtggcatgtacatatttctggtttgagaggcactttcccatatactggcgtacttgtttctcataggcagatgttagcaggatctcctggaggcactgacatcacttccgaaagaccacagagccacgaagcattgaactccaatttgtgtctcccagaattatgtatcatacacgacttaagctaggagaagtcattgacagaccacattccaagcaggcagtgcagtccataattgcagaagggactggaagaaatgatctaaataaagccaaaaggccacacatccatgcctcagccgacaaagcgatttagagtaattccattttttatttttcctgtgtatttttcagaggacatcaatgtagcaagaatttatcccacactattctgtttctttactttgttgtctacctcgcttctacttcagctgccatgaggcttacacggctgtttagccccacctacttttctgtttccatagcagctgacagctgctggactctggtgaggaccccttgggctgtgccacattgtagcaggtgataccatagcaggagatcacgtgacacggagaggcggaactgcatagcaagacaggaagccagacaaggactgggaagggctgaagctccctcttttatggtaaccccctctgggcagaacaaaccacggtgtcacaagagcaacttcagtcccttccaaggacatgttgccagtgacaggaggatgtctttccaggccccatctagtaaaggtcacgtgaccctttaatactgcaggtagtaaatcctacaaagattcgcccaagtcgcggtgaaatcccagcaacccccacctcacccccatcctccttccccgctctcccctctcaggttccccgtttcttctctcataagcgattttctccaggattccatctctttccctgggtttgtctagatctgaatacttcacaggagccggagggtgggagcagggtgtgtggcgagagcaacgctgggaactttgctgaggatcccaattggtttccttctcaaatacgtgcaggtatcccagggagaaggtcactggggaccaatgcatcagtacttagagatcagggggcatttgtgtgtaagactgattccaaaagcaggagagaaaacgctacccaggcctgagagatggctcagtggttactgccttcacttctgggtaacgatgtcagccagcttacaaccacctgtaactctagcctcaagggaatataatgctataatgccctcttcttacctccaacacacacacacacacacacacacacacacacaccctgaccaattaactaactgctaactaaatataaaatataaaaaggaacgctgtgcagatccattatggacattccagaggcccagcaaccgaagaagcaaagcgaaagttccagaaacccacccacgctgtgcttcactctgaaggcaaacatttagttctattggattctaaacaatttcttttctccgctgatcaaggaaaacccattcctgactttttctcaaagcttgctacgcatgtgtagacgagaggagaggagcttacccatgatctttaagtagagagcagaggcaatcatgtgtccattttcaacaacgtggaaatgtgttcttgggttgttcttctatcactgagggtcacgttttattctggataaagcttttctgtatcccacctaggaaagcaagggatttctcagagaaataaatacataaaccaacaaacaacaaacaatgcatcttgatatactgagcaagctggacttaaaacctcatacaaactctttctgttggggtccaaacaagtatatttcagtccaaaaccagagattcatctgtcataaggccagtggcaggaatcatagagatgttcctgtagcccctccctgactccttctgtgagctggaaagcccatgaagttagctaggcctagcagcttaggctgttgtccaccagagcagaaaggtgcccgctgtttgtatcatcaggttcttttgcatcttcatgtttccatggtgataagattatctctatagtagagatttccagatggttcctttatagacacaggtctctggagaaacagagccaatgagaaattctgggtgttgatgtgataaggaactggcttattgaagggtaggctgaggatgagatcggcaagtgtgaaacctgtggggcaagccaacagactatggattcacacagcagttgatgccacagtcccaaagcagaacttctccagtcaacccaagtgtttgcacttaagccctttaactaacagatgaaacctacccattttagtgatggtgatatctgaccttactctcaggtggctacttatgttaaccttaaccacacttgtaaaagacccttggagaagagattttgtactcagaccttcaaggtgaccagtctgctgagtttgggttgcctcaaaggtgatggacagattctgtgtccttaccctgagtcccatacccatgacttttaaaactgaatggaaataaagtctccaaggaaatggctagggtatggagggagagttcgggcctttttggcctggatgtcagttatgggtgaattttgagaaggtgaactatgaggagaaggcaatggataaaggagatgagactgatgtagacttcctgaccaatgaaaaccctcaacagactgtataaaaggggcttcccattagatttacttagtgtgtgtgtgtgtgtgtgtgtgtgtgtgaaagagagagggggggggcgggggtgtacatatgtatgcacaggtgtgtgtctgtctgtgtgcaacagagaaatgtacacttgtgtgcacaagtgtgtgtatgagagagctatacatgtgtacacaggtatgtgttacctctgaaagagaaagctttataccatgtgtttacaggtgtgtgtgcctctgtgtatgtgagtttgtgtgtgtgtgtgagagagagagagagagaaaagatgtgcatgtgtgcacacaagtgtgtgtgtgtgtgtgtgtgtgtgtgtctgtgtgtgcctgtgtgcacacatggaggccacagaagggtgtgaggtgtcttctgtcactttcttggtctgttcctttgagacaggatctctctccctgacctctggggctcccattgtttctgctaagctggaagccagcaatcctcaggcatccttctgtgtgctccctgagtggagtagtgagcaaggcgtttggcttgttccgtggagatgggatctggactctggtctttatgattgtttaccaagtactcttaaccactgagcaatccttccaattcccagagaagggataatagaagacatggtgggtttatttttgactgttgaggtaaggaaacaaactgatatgcaactcagagacagggccccctttccctctcaaggctgtttactaagatatttgcttgccacttgattcaagagacagtgacatgtctcttagcagacttagaaagtatgggcaacaatgagggtgagaattcatgggctgacattttgttccccaaatatctgccctttgcaacagtgtctgccataggtgaattgttcggccttgggtttgggccgacttcatggacaggatgagacttttcacacctggcaatgtatacctgtaagtgtggagctcttgcctcatgttcccaacccctgtgaactgactatctattggagaaaattcattaaaccatcaatgaggaagtggaggaaagtttgcaatgatataactcagcaaggtagaaaggtaggtagatagatagatagatagatagacagacagatgacagaaagaatagcatgaaagtggatagagcctacaaagtaattaacaaagggaaactttcagggaattgggctgatacctgctcatatcaactgtatttcaggaccatttataagcagagcctgggtttctaaactctagagcagaggtagtcagatttgaaccttaaaatatactgtcacatagctgttcaggcttttaaaacagttttctttatctggagttggctgcctgttgcttatgccctgaagagctgctatgtgttttgtggtaacacacaggtgcataagcatacaggcacatacacatgtgcatatacacacatgcacacacacatacacacatgatgttcacaaatgcacacacatgttcacatataggcacacacgtgttcgcacacatatacacacgtgtgtgcatgtgcctgtgtaccttggtatatatgtacatatgtgtgaatacacatgtgtatatacatacacatccatatacacacaggtataaacacacatgcacatgaacactcatgcttgcacactcaagtatggactcatgtcaaaaggttgctaaagaaatgtgttcacagagctgaggcgtgatgaaacagtgggtgagggtgacttgggaatggaatgtagaagactggcaaatggggaggttctttaggcccccaagattcctggttctctgccagctccttgctgcatgtacttttgacatgctgagaaacgccccaggttgttgatagacccagggtgtggacaatcccttgtcttcattcaacagcttattctgatggcctctcctaggtcattttgttcacccatacttttgttcaggggtggggggaatctttcttgagttatgagatcctaagagaaattctccaacctcaggtctctttaggtataaaatttgtcccgagtgtaacttttcaaaatgacgagagtttagaatgggggagagtgatgtcagagtttcccatagaaggaactgttctctggggccttggtgaaaatggcgccaatgctctgagatatagggccccatccaatcctataatcagaaccctgggacaacgactgggcttacagggctgtggcggggctggaggaacagagcagtctgaaagtgaggccgaccccccaaggcccaaacaggtgtttccaaaacattctaaaagagccctgggaaactctgagctccacactgtagaacagcttcctttgtttcacttgtgtctggtgtgtttgggagtcccagcgggcaccattgtacttaatgctggttgcttaagcgtcaccttgcggctctgatattcggtgtgtgtgttggaggcacggaacagctagacctataacatcccgtgccaagtcgtaggctgcaagagtcagaattcaggctcagacgtctggttatggaaccagaggatttggggaattagctatgctcaggaaaactgtttggccctgttttctttgcgaacaaagcaatctgcattgcttcatttaatctagcatatatctggcgattattgacgctaaattgatttagtgtttttgagcgatgtttcagactccaaacacggaactcccatttattttacagctgaatatggaacacggatccctgcctgatgtaatcagctttgtatttaaccccttaagagtaagcattgatccctcctcaacttgcaacttaattactctccactgtgctcccctcctgtgtaatttattctttggaaataaacagagccctttaggtggagggtcacctgtctaagctccagggagaggatcgttttgactgagtagaaagacaattctccaagtgtggcgtggttatttactgcaaagctgaagccatgctaggaacattaacagcatctgctatttcaccagaaagttcttaaaggtgttttaagtcttccccaaagctcctaagtaattctcctagcatccctcagaggtattatccaattttacggggaagacatgtgagggaacacgcacaaggggtgagagtgggctggcgagagacagagaagagattgttgtgaatataggtagtaattggacactatccctttactcttaatttttatcctgtagatcacaccatcacctcattatgctgtctgtatgaactcacggcggcagaggaggttaacaccatgcaccatgcaggtgacacgggtactgttttccattttcaatgactcatctccttaggaaaaaaaaaacataaacattgaattccgatgaagacagtagcgttaagagcaaaatcaatctattagcgacatcggcattaaaatattatagctatatagggctgagagatggctcagtcatccaactgcttgtcacacagacatgtagacctgagtttagagtccagtacttatttagaacagggcaacctagtcctgtaatcccagtgccgtggaggattatgggtgctcattggccagccagtttagtcagctccaggttcaatgaggacttgtctcaaaacataaggctaaagggcgcgcacacacacacatgcacacaaaattttaaacaaatttcaagatctggagacatgggatagccatcaagctgtttgtttagtgctgtttgttagtctttgtatgtcatgagtgatgtatgcagtgggtatgtaactgcatgagcctgtgagcctgtgcacgtgggtcctcccagcagaggatgttggatctcttcccctcttgctctcttgagacagggcctcttgctgaagctagagctcatggtttctgttaggatggctgccagcaagctcccaggatctgccggtctcaacgcccaagtgctgggattgctggtccctgcttttcacaggggtgttgcggatttgaatgcattgcctcctaagcaggagctcggccagtgtttgtacccacggaactgtccttgccactctcgggggcgcttttcttatgttccctctggcatgatgtgggctaattttaaaagaacaaaagccggagggttccaatctgtctgatttcaaggctgcgtcctccagaaggcatggtggatttagagcagccaatgcattctgactcatgcatgggacaagatgatttccttgtcatggtgttgggccagagccatttttaggagtggtagttctgacagggagtgtagggaaggtccccgatgtcaggtccctggtgtcccgagtcagcagaggacgctggttgagagtggcttttctcccagcatgcctgggctgggtcttgtgtgtcttcccgagggagtggtggcttctgtttcccaggcttccaggcctcacttgctgctccttgagaaagcctctgagtgaagggctgggacatttcacttccaggtcagttgctgactccctaagggaagggttttgtttgcttgtttttgtttttaatttaccacatagggagaggctaccaactacactccaaactccagggcccccgaaggcccctgtggatcaaaggagctctccactttatcagaccatcgcctatgagacaagttcaggccaacccactcatattttttgtgtgcttgtgatactgggcattggtttgaagacatcaagcaagccagacaagtgttctaccactgagctacattctaagcccgctttctgtatcaattacagagaggaggaaaagaggaggttgatggagacccatggcccgaagctgaagtttggctttggggaggaaaggggagagggagtcagggagagacagtgggagggacaactaagaactctgtgtgtgtgtgtgtgtgtgtgtgtgtgtgtgtgtgtcaacacaagtgcggaactgtcacagtgaaccccagtactctgtgtgcttactaaagaccattttcaaaacaaagagtcagccgggacaaacattctcatggcgtggcaaagaagttcctggctttggtactaaggtctggaagccttcccaaagctggtaattcctgccgagtgaatagaggttccaagagccagcaaagtttgtacaacaaattggaaaataaacgtatgattcttctaatctcatgcaggctgaggggctcgggtcccattagactaaatatgaccatggagtcctaaactcacaacactctagaatattattagccatatccaaatgcttttgtatcaaactcttgacctgatttttgtcccagtttcacttttatatcatcttggtttagttcttctttaaaaaaaaaagttaaattttttttttaatgaaagccagttacctctaagtaatagaagaatctgttttgctaagggagccgcagaatattgaaatacccggtcctatatttttatgtggttggcaaatgcagtctaaaggtggctaatgtgatacccaacctggtgttaatggccaatgataattccgtatgtaccacctgctacctgtcaggacacacattctctcttttcccttttttggcttgaaggtgagactgactgtggatgtgtctctatggctggaggtgaggcctgctgtcagattcgccagatgagctgagactgctgtcgtcaccacttaaaaaccccacttaaaaaaaccgcacatcctgagtgtgcgaactggggaaagtcggggtgggggaagcgcagcttggaaggataaagaaatgaggagccctgctcaggaaaggaaaccctcctggtaaaaattaaaattagagaagttcctgaggaagttcttttaggggagaaacacattagctgaagtgatggctttagctaaccattttatggctgtgcatttcgatgcctcacagtttcagtttctccttccctctaacaattgcccagggatgacgcacacggagctaactccatagtcaagacggcttcttctcagaggaatatactctctcctatgagtatataatttaagatttactgggcatagatgaagggaaaaaaatctctaaacaaagcctcttgcccattcataggtaggacttgaaccctgtaagtcttttcaactctcaggtctgctccatagaacccaggactcttcaggccagtacttcatggaggaagcccgggggcttacatttcaccctttgagtttaaccagtaagcatttctctgtttcaacaaaagaaaaaagaaaatccaaaaaaccagatacactcctagtctgaactgtaaagaaactagattccagtttttcaaaatgacatatgagacagttcacagaaagtcctgcacacccagatgagttttcatgaatctcgttttttaatttttttaagggatactttttgtcttttattagcattgtttgtttgtttgtttgttttttattagcattgttaaaccagtgttccttccaggcagccacaattagcggcacactccctgcccttccccgacacctttgtttaagttttaggaacattttttggtgaatcatttaatctctttcaacaggactgaccagaaggcctactcagcagtagggaccctgagctcacgaaaattgttacagcctttcccaagtgttcccaaaagatgtatttttgcactcgagttagttgttcaagagccctgtgaggtagctgatggaacctctttctccagatgaggagaggaggcccctggtgtaaatggtcttcatggatacgggcgggcagggttgacctaagagtgtgggcctggcttcctgtctgggccaagaggagaacccgagattcatttcctcgactcaactctcaaactaattcatctcttacttttacatctctttcatccccagctctgaacaagccaggggtagtgctggcttctaccagtggttctcaaccttcctcctactgtaacccttcaataacagctcctcaagttgtggtgaccctgcccccctccctaaaatcattttcgttgccatttcataactgtaagtttgctactgttacgaattgtaacacaaatatctgtgttttcagatgatcttaagcgacccccctctctctcctcccacccccccccccatgaaagggaggttcttttgacttcctaaagtagttgagacccacaggttgaaaacagcatccagtctaaacctacccaggccagagccagttgatcagaagttcaagagagccgggtgtacctcagcaactaatctcaggctaggcaatccttaggttactgcggatgctgtttcactatgtgaaaaactcaaattccatgttctccacagtgaatttttccttttctctaaagctttcttaacctttccttggccaccaatggattccccaggctgtctctctagtcttttttcaaattgcctgactactagtccagcctgcctcagccttccatatccttgttttgcatcggatgtttaatatgttctctttctaggccttgagctctcctgagcatgacttctgtggagtcagggaccaagatgaagtttcctgctttgtcataaaactctacagttttacgtgttcaagtgcacagatgcctaatttgggttttcttttctagactggtagttttggattttcttttctagactcgactttcctgcatggaaggggggggggcccttcattgtaatcatcaccaaatggatacagtactaatggaacttaattgtttccactagacggatctcgggtgtttttggcagccaaaatgaaaatgattccaaataccatcaaagaggcttctaagcccccagcatgcacagagtgttttgatatacagtacagtgttaatagcattatctcatctaatacaacatacggttactttaatcctctcccgcctctctgatcttggaagatccgacggatagacagcaaagaatgaaacactatatacaaggagacaaagggagtcttagcccccatcctctgggtgtgattttttttttttgattgttcgagtgctggcttcaaatacgtaccattatcaataccgacttctgcatcctccatgctagtttgagtttgtatgcgacatcaaacataccttttcacacatgttccttccagattttttttaacacttacttagcagtttatagaaggaagtgaatgatctcctcaagctgcttacaaattaaaaaaaaatctgtgcttattaattatgcaggattagtctaattataattcagcaaattaattagcgacagaaggtgttctgaaacattggagtacatttgcatgttaaatggagaggctagtctgtaatatatgtaaatttatgcatggcttcatagtttaatttaaaaatttgcagctgcatatggtatgggagcaggtgaaaagtcagttttagtttaatgacgctaacaaacattggatggtgtcctgtcttagccagaggatgcactcgtatctgctaatctctgaatctgtcagatgagcctcttgttacagagatgctcaaggtcactattgagtggactcgtaggtgccataggtatacactaaagacctgggcgggagagcggcgctaggagaccagtacccactcagctctcttcctcactgtctcctgtagtgcgagcttcctcgctgcctttggtttaaggagaggtacattccagtctactgaaacagggctattttttttgtctccctggtatcaaatctggcaggtgtaaaatagctgtccaaccttgattccctttccaaatcttcacatttgcacttcatttcaatttcccggagtcgtgggaaagttattactgagttatgaattaatggtagggtagagagttttacacactggcctcaaccatctggcaaaacagtaaaaaccagtggaccaggcagcagcaaagggctcccggtgtaatcggtgttcactgctcagcctagcagagatgagtttagctgggagggcagagaaccagaggggaaggggaggggaagcctggattgacggggactggggctgaggacccattaagccgatgactggctaataacttcatttctctccttcatccaaggagtcatagtagggaaaaaaaatagatttgtatcctcactctgaagtctcagtgtgtgtgtgtgtgtgtgtgtgtgtgtgtgtgtgtgtcgcaagtgtgtaggtgatttggttttactgggttctttttcctttcggtggtgagaagggaaagaaagggacagggtaaaggaagaagtcctggtttgaaaattaaagaaagattggggtatggctcagtggtagaatgcttggcatagcagtcgcaaggtccagggtttgattcccagcactagaattaaaaaaaaaaatgataaaggaaaaagacagatctaagtacgtttccaggatccccagagacacagtcagagacaactaaaatgacaaactcattcttagggtcttttccaattcaaatccaaagaactctgtcatcagtttcactaatggcgtcggattttgatctgagtgtaaaaccagagacttgtcctgagagatgttttttcccatggtgctgaataatggaatgagactggatatggagtacaacacaaatgttccgtgtagaagcctggtcttgagcagccaaagtgtgttgttacctggtcaggattaagagggcagtgagaagaggtgaggccccctgcttttaccgcttagtggctttgtgcacagtcagttgtttgccactgaggctgtgggagaccctttggaaggcatcgggaaatggctttgaaataaagtctatcgataagggagtcagatttacacagtgctgggaagtcctgcctcctggtgcctaaatgaatacaacagatcctacccaggaggcaccacgttgaggagcagagatctatggccaaactgaaatgccaggagcttgtcactgaagtacacaaggaatggaaaatgatcctgagggcgtgttgccagctaggagctatgcgtggactctgagtcatgaccaggtttgttgcagtgtggaagactttcaccagccaccgcttgttggttgtctcctgcaatcctgttggactggattaattcgttgctgttttttttttcctttttaatatgtcccccaacaattgagggaagttcaagtagagagtacatgtgagggttgaggggcaccctgtcctgagggaaaccaaatctaactttgtggcaacccctgtagagtcctgatgttttaaaatagagtggggagagggctcagcagggaaaaatgcttgcaaagatgaggatttaaaatggagctttagaacccatgaaagaaccaggtgtgctagcacgtgcatgtgatctgaatgtgcgtttatgcaggcatgtaatcctagtgtgatgctggtgttgggaggtggtgtcaggaggatacctagtgcttacaaacgagccaccacacctatgtggagaccacgatgacaaggagagaccctgtctcaaaaagcaagataggaattgattgaagataaacatcatcattgacctctggcccctgtatgcacccttatatgttcctctggcccctacatgcacacacatatgttcccccacaagtatcatgggagtggaaggcacaacacagaggagaggaatagaaatgtgcctagcaaaggatgccacctcactgcatgccggacacttacccagacattttacacagatagcaaatgctggcctttgacagtccctaattttgtgatgaatattaagcaataataatcacactgccattcacagtggccttgaagtcacatgacagaggcttggtaagggctcccctttagctgccacacatgacctgggagttatcaactgtcaaaggaagtagttgtttggtctgtttaaaaatctcaaccctcaaagagcatcctttctcttaattacttaaaactcaagtttagtgttttctaagatcgtcgtcagcatcccatgtaccactcactgatttctgccttcttcctccatgaagtttggcgaacaaatggtctgaatcgtcctcattcgattgaggagctttccaggttttctccagggccctgcagctcttgggggccatgcttacatcctatttgaattcttgagatgtcttctaagtgtttgatggagctcccattttcttctacacactccagtgtcaccactggggctccagagctttccagaccctgatagaaacaataagcactttttgtttatgtgctcgtttggttttgcaaagagagaagtgacttcacacttgcttccagaagaaattgacatgatggtccccatggagacctatggggcgcatgtcccaaaagcgaagagctgcttggcaatgtgttaggagcttgaacaaactccccatggagtaacaatttgctaagagtcagagagactggagcttggctctctacccactcttccacagacgaatgttttcaccttggataattaatctggtaagtttagagaagttttgagtttttccatagaaccaggacattaaggtgcctgttccaagtcacaaggatgtaatgaaaccacacacggcaagtgatgtgacaggccattattattactgtcagcatagactttgagtcaagagggcctagggagattaacggtagttggaagcaagaaaaattgttgcttaaaaatatttctgttgccccagtgtgagggcacacacctttaatcagcacgtcggaaactcaggcagatggatctctgtgaattcaagaccagcctgatatacataatacattccaggctatccagaactacatagtgaaaccttgtctcaaattttaaaaattttcaaatcccagttgccttttactgaaataatccaggtaaattcgtgttagcgataatatgttttcttctttaagaaagtctgagaatgccgggcagtggtggtgcacgcctttaatcgcagtacttaggaggcagagtcaggcagatttctgagttcgaggtcagcctggtctacagagtgagttccaggacagccagggctacacagagaaaccttgtctcgaaaaacaaacaaacaaacaaaccccaaaaaagcaaaagaacaaaaaacaaaacaaataaaaggtctgagacgaacagagatagttctctctgctcatatatcatggttatagtttaaatgtcttttctttttaaattaaatggagacgatagaatatcagcttacaaaaaaatgtctgcaaccatccctccttatcattgtccctaaccatttcgccatccaccgataaggaaattatcagatggccattcaagccagtcagtcagaactttctatccaccctgcccatgagtcttgttgggccttcttgctagctgcttcggccttgcttaggaaaacctcaaataccaacctctcccatgctatacccgcagcttgtttctggaggtaacaagagaccattgggagcttggctattcagtctctcttgccagctgtcaagagttctcactgggtccttaaagctccagggccctgggtggactccttagggatcagacttctcaaggttactttctcttcaggccaaggctgggccttatgtgtcttaaatttggagtcttttggaggcatttacttattgattgattgattaattgaatggttgatgattgattaaagacatagcctttatttttttaaaaaaatgtatttatttcatgtatgtgagtacattgttgctgtcttcagacacaccagaagggggcattagatccccattacagatggttgtgagccaccatgtggtcgctgggaattgaactcaggacctcaggaagagcagtcagtgctcttaatcgctgagccatctctccagcccaagatatagccttcttttaaatgctggaaggctcagaaaagacactaaagatcaagattagggagagcactctggtgtttttcgctagtcacaagggtaagccaaccccacgaaggctttctcagcactaacaacggggtccatgtgtccatccagcacagcttctcaccttgaaactagagactcgattgctagatctcctgaaagaggagactatatggaaaagttctcggagaagagaggacccgtccatcccttttccttggcactctgccatctggtgtggccatccatacatttagtagctgaaatgcattaaaggaaaggggctattgtctttcttggatcacacatgaacaatgaaaaacaactgaattttaatttagtggacttttaaaaggttttgatagctaatccagataaaaaaggtatcttcctcacaaatccatgggcacatccctttatatatccacatgatctatgagaatacagtagccagacatttggctcagcttagagactctgcctgcttttgtggctatgcagtaggtatagcatcattgcgcttggccttttgagcacgtgtggcattatcttgtctatagcatatgagacatggttatgtcatgacagaatctgagaacatacaaagttagactttcctgtttgaagggagtcaggaatgaagcttcaaagggagttattttacatgaggcatagttctgtgtgatgacagctgttactcatgtgcatctccttggtgtgcacagctgtacatggtttttcctgagtcttctgtgatgggtgactgacaaggcttggtattagaaaatttaaagaaagaattagatcttagattttaaaattggaggtacactgaacagtctcttccataaaccccgagaggcaggacagtgcctgggatcctcaaatatgagctcagagtcctggagtctgaaaaggatgcccaatagttgtcttccctgtgattttgtggtgcatctgcctcaaccattaggcattagctttgacctctgttgtacaatagtttgaaattcaatttctattcaagatgggtcaaggcaagtttaagccatctgagaatgtcatcgtgttcttaaacaatgcagaatatcccaatatcccagagattgggaaggagaaggcatatttccttgaataccatgtaataagctttgatcttatttggactcatgtctagatgtttctagaatcatttgagaccctggagtaaaagcacattctgagtagtttggttgtgtgcttcacaaggtcaagacctttgctgctgtgtgtgacctttggtggcatccagaacacacttaatcaacgagacaagaaacagaaccagcagaggttttcaaagtcaagggtgttttccttggtgaccatctttggcctaatgttttcttcttgggtatagtgtaccttcatgggagggtaccagattcctccttcctcattaccctgttcatttatttattctcctcccccccttaagtagatggccttctagagagagaaaatttgctttattgagatgtaatttacctattatgatgctgaccctttgaaattttttttttaaagtatttgctggtgatgatggagccatcaccactgtgtaaggaacagagagcaccagatggcgctggttgccagagagaaccaggttccaattttatgtccacactgatccctgatagtttcctcaaatacctggggccttcctttctgtgactcatgagatgattcttctcggagagaattgttttgagacttaaaatgatgccctgtataccaagtacaatatagtatctctttctctatggcctcactttttttgggtatcaattacccatgatcagttgtggccccaaaaatatgaaatggaaaattccagacacggacaactcatggattttaaatttctctacatcacagtggactttaatgactgttttatttcttttcttttgttatcagtattttcttacctcaaagcggctctttctggaaggctctcacttctgccctttatttaattttccctatcatagaacatggatattgcaatgaacaccagattaatccagttaaacatttccttaaacagtcagagaaactaaggcccaggaaaggcgggaggggtctagtcacaaggtcaaggctagctcaattctagcacgtatttgttagagtggagcaaagccttctgggacagggcactgccccagtgatctaggaatccggctggaatgccaggctctggagtccactcattgaccccacatctcctaacctctttctgcaaaagcaaggctacccttgctgttgtttgggttcactagttaggaatgtagtcagaaggctggcaaactgcagcatgctaagtgcttataatattcatgaagtcactgttgtttagaaaaagtggaaaccactcccattctgaggagaatcagcacatttggtctgaatcttggaatttgtgggggggggttctgtttctgaatagagagggctgacattctccaggcacctctggttttggagggatcaagactcaggggattctgagagaatctgttccttgcaagttactctgtggctaatgaatgatatggatcatgaagagttttgcaccaagcgattgggaaaagggtgtgtgtgtgcatgtgtgtgtatctgtatgtgtgcacatgtggtctatgtgtgtgtgtgtgtgagagagagagagagagagagagagagagagagtgagagagagaatgtggtatgtgtgtgtgtgcatctctgtgtgtatacatgtggtatgtgcgcgcgcacgcatgtgtatgtgtgtttatgtatgacagaagtcatcagtaaaatattgagagaagatttgaccatgtttgtaagccttagaatttcttttaattaatttttaaattcacatataaaaacatccacagcagcacttccagtgttatccatttagcagttatatatttaataatgtaacatttccccatccccccactcctctcttccactgcttctttctccccctttgtgagccaaatgctacatccttggtatgcaggggtctgctatataggttacaaacagccctcagacaagcaagagaatcaaaattgggtgttttccgtccgaagaactgtttagggttctaatttaaaatgaataaagcctttcaccaggcagagtgtttccctaaatcaactggattttatgtaaacatttatctctttcacacttttccacctaccacaccgtccccgtagtaatggctcggtgaacattaatgctttcaccagatcttattttggaacaggagtgggggaggagagggaagtgcgcacggggcacgcagaacacattttctggagcccagttgttgaaaaggcaaaacttcaaaaaccaaggagcaaatgagaagatgcactcaacctggctttgacatggggaaaaatgtaaatgacctctggcaggtgtgtgtgttggggagcagatatggtgtggggtagctgtgggcgtcttgtttggaaagaggctccagcgagcaaggcaagaccatagtagatcctcggaagcagctctgagggtttgtgagtgctcatggctggtgactataagggatgcatttctccacccagaacaaaaatgcttgctttcagtctcgacttaaacaaaagcctgcctccctcctaagcccacccaagtgagcccaagcagacatcccctgcactcctgaaagctggggcaggttataagcggtccatcctgtgcacagcaatgaactgatttctttgcgtggtccttctggagaattttgatcaacaccccctcaccgccatgacacagaaagtcatgtctgacctcccacataccccatacaagatagccctagagacaagcccaaaccagatgttaaataatggaaaaaatttaaccgtcatttccaaatttgaatccaaccttattcatagatagggttgggagtgtgttgcccagtgtttttagcagagattaagagatcaactctccccctcggtctgttaccttactggcatcttctcattggctttgtgtgtgtgtgtgaaacatacagttaattggagtgctttcaaattcttttgtgtggttgttttttttttttttaagcaaaaaacaaaacaacaaaacaggcagaaggtcatgtcaagagcctctcaccaacccgtgcttttaaaacagaattttcttaagactggttcatttctacttatttttattggtaaatcctggggaaaatgtatatcttttcctttaaagttctaattcaaggcgtagatgcgagagttctgaagggaccttgggactgcggtaaaatttcgttgtcatagtaacagaaagggaaataggcctagctcacctgggacttcagcactgcaaaagctggattttttttttaaaggactctgcaagtgaaataaatgaaaaacttatttattttgaaacaaaaaaattttaaaataggaatgaagcaaattcctgcaaaggttccttttgccatatttcttgattggtgcaactgtgtggctcgagcgagatgcccagttttgcaatgacacagatcatttaatggaatatgggcttcaaaaaagaaaaatcatgtcttacaaacaataaccacagattgtgatttgagttagtctggatcgtctctggagggactgaggggccgtttcctatttgctattaatcatgaatgcctggggtatcctggcccggtggacttgagctttagataattatatagtattttattatttctgcacatgtcgtgggaaactctgagaccacctttaggtgtgagcataaaggtattgtgtggccaaccaaaggtacagacacgaggaatgtcataggttctgagccttgtcctgtcatttttaacccagagtgatactttctgtccagcaggggccactgctgtattcagaggcctcttttgcagactgaaggtgggtgggtgtgcggaccagagcccagattgggaaccgcttaacaaccccccaccgtgatggagcaagggggctctgagcttgccatcgaaaacattcaaatttgcaaattacagagggtcagcaatgttcctctcccaggcatggctggttgaaattccccagacctgaaacacaatcacctattttttttttcctcctcaaatcaaatctaatagaacacagatagagtctctcgtttaaaaatgtttactggaaaaaaaaaaaaactaacacattgctttctcttcacagattctttttaaaatttttcctgaagtgcaatcagaattgtttgaaaacagcgggaaacccaagggacatgaggcggttccaggtaaggggccctgaggatcacacctattaaataagtcaccctgttctctctctctctctctctctctctcttctccnnnnnnnnnnnnnnnnnnnnnnnnnnnnnnnnnnnnnnnnnnnnnnnnnnnnnnnnnnnnnnnnnnnnnnnnnnnnnnnnnnnnnnnnnnnnnnnnnnnnnnnnnnnnnnnnnnnnnnnnnnnnnnnnnnnnnnnnnnnnnnnnnnnnnnnnnnnnnnnnnnnnnnnnnnnnnnnnnnnnnnnnnnnnnnnnnnnnnnnnnnnnnnnnnnnnnnnnnnnnnnnnnnnnnnnnnnnnnnnnnnnnnnnnnnnnnnnnnnnnnnnnnnnnnnnnnnnnnnnnnnnnnnnnnnnnnnnnnnnnnnnnnnnnnnnnnnnnnnnnnnnnnnnnnnnnnnnnnnnnnnnnnnnnnnnnnnnnnnnnnnnnnnnnnnnnnnnnnnnnnnnnnnnnnnnnnnnnnnnnnnnnnnnnnnnnnnnnnnnnnnnnnnnnnnnnnnnnnnnnnnnnnnnnnnnnnnnnnnnnnnnnnnnnnnnnnnnnnnnnnnnnnnnnnnnnnnnnnnnnnnnnnnnnnnnnnnnnnnnnnnnnnnnnnnnnnnnnnnnnnnnnnnnnnnnnnnnnnnnnnnnnnnnnnnnnnnnnnnnnnnnnnnnnnnnnnnnnnnnnnnnnnnnnnnnnnnnnnnnnnnnnnnnnnnnnnnnnnnnnnnnnnnnnnnnnnnnnnnnnnnnnnnnnnnnnnnnnnnnnnnnnnnnnnnnnnnnnnnnnnnnnnnnnnnnnnnnnnnnnnnnnnnnnnnnnnnnnnnnnnnnnnnnnnnnnnnnnnnnnnnnnnnnnnnnnnnnnnnnnnnnnnnnnnnnnnnnnnnnnnnnnnnnnnnnnnnnnnnnnnnnnnnnnnnnnnnnnnnnnnnnnnnnnnnnnnnnnnnnnnnnnnnnnnnnnnnnnnnnnnnnnnnnnnnnnnnnnnnnnnnnnnnnnnnnnnnnnnnnnnnnnnnnnnnnnnnnnnnnnnnnnnnnnnnnnnnnnnnnnnnnnnnnnnnnnnnnnnnnnnnnnnnnnnnnnnnnnnnnnnnnnnnnnnnnnnnnnnnnnnnnnnnnnnnnnnnnnnnnnnnnnnnnnnnnnnnnnnnnnnnnnnnnnnnnnnnnnnnnnnnnnnnnnnnnnnnnnnnnnnnnnnnnnnnnnnnnnnnnnnnnnnnnnnnnnnnnnnnnnnnnnnnnnnnnnnnnnnnnnnnnnnnnnnnnnnnnnnnnnnnnnnnnnnnnnnnnnnnnnnnnnnnnnnnnnnnnnnnnnnnnnnnnnnnnnnnnnnnnnnnnnnnnnnnnnctcactctgacttctctgctgagtcataggagagacaagcagtaaatgcagtccgacttcttggggatctgcagaaaggccccagctctggaaatttaccatacccagggttccaaatgttactacaaagttaaataaatttttttttctaaagaaaagtgcatagtaacagagtctcatattgccaccaggaagtaaatatttgctacactgctggaagaaacacaggctagagaaacagaagcaggcagcttcgatcctcaggctatcttatgctgctgcaccgggcagcgtttttcatttgaagagcctctaagaactgggatgtgcatgtactggacccttctgatttttcactgccacccccaatttagaaatgtcctgagctgggcatggtggcacccacctttaatcccagcactagagaggcagaggcaggcggatttctgagttcgaggccagcctggtctacaaagtgagttccaggacagccagggctacagggctatacagagaaactctgtctcgaaaaacaaaaagaaaaaagcaaaagaaaaaaagcaaaagaaaagaaatgtcctcctgaggcaaacacacgccagtgttgcttgtttctgcaggtctttgctatgtgagcgttactctgctaatgtgcttttctggcttagagttaacagtgctgacttcagagccaccagagctcctcagcctttcagggtgtggtttagcttcctcattcatggatgaacagaaaagctctcaagtttcaggaccctgttatctccagggcggacataaccacacttgtccattttatttcacattctaaatttacattataaggtgatgttcacgtacaacacacatctccatcgtgagtacattagtgagtgagtgccggtgactttaacacattggcagcgttgtgtgactatcacttctgattccagaacattctttacaccttgcgaattactctgggctccccactttccgtttcttttcagttacctgaaatcactgatctgctctttggcctttatgagcttattccatataaatctacagaagtcataaaaatcaaatctctcaatatctcaggggtctgtcacgtagcatagtgttttcaaggttggtaaggttcttttttatagctgaatactattccactgtctgtgtagatctcattttgcttacccattatgttgttaactaatatttgtgttttatgcctttaaagtttctgtgatattgagttgtttttggaacatatgtttcagttctcttggggacagagctaggagtagcatttctggatcacagggtaggtctatctttaactttttgagaaactgccaaattctttttcacagtggctgcaccagtttggattcctagcagtcatgtgtgaagacacaagttttttctaattcctcctggctttattacatttttaaaaatgatttattttattcataattgtgtgtgtggaagtaagtgcaatgcttgaagaggccagatgatgttgttggatcactcggagctagaattaacaggtagttgtgaaccacccaacataggtgctgggaactgaacttggttctctgcaagagctgcatgcactcagaactgctaagccatctctccagacccttgttttatttttaaaatgaatcaccctacagcactagggtagactctcatgggtgtttcagtctgtcagtcactcacgactgaagcaggttctgccaatcaccgtctgttatacttatctctcatttgctcatctcctctggaagatgcccattcaagtcctttgctcattttgaaaccaggccttctttttttttgttgctgaattgcaagaattcgtatgtccctaagatacatagcgggggatcctccttagatgtgtgacctagcaattttagaatcttctcagattccaggaagaaatggtcaacagcagctcttttatgcagggaagattttcctgaagaagggactgcctgtgtgctgttatgatcaactgagaaaccaggattggatttcaaatgtgacacaaagccaggcatagtaggtgaacacagagggggaagagctatctacagagaaggactggaccacatgtgtcaccctgattgacaggggtggcagtcctctgcctcacagtaaaataacttcccctaatgatcaaacacacatttggttgaagaatgcttttgtgcagatctgaacagaacacaagtatttctcaaaaaaccatgaacctaatcaaatattttctcgtttcctaaaactaatagtaataacaatctttatccccaacccctacaaatcattgaacaacactaaatcattatatgaagtacatttccatgactgaaccaatctcttcagttccgttcaaatcctaaagaccataggatatgtaattaattgatgacaatggtctgtggaaatatctgggtcttaatccttgtctcaagtccctttgggaatctggtaaaggatgtgacctttgtgccaacatggaaccagattttcataaaagctgaacattatatagattctccagagtgtgtcccagggttccatgggctcctgttctaaagcaatgacgttcaactagtaccaagtagcagcttcagtgttactcagaccctcatttcagcactctgtccacacagggccctgccccaatctctcagcccctctctggggtttaagtgtcacctgttcccaggtgacttctggctccatacccccactctccatcctctttgaatctgtagctaaagcttcaactgccttcccgactaatgagcatgtgcccaaacaggactcaacgtttatcctctgttcagcttcctcctcttccactgggataggatcacttcctccttctccgaagtgtctggcaaacccacccctctctcctgtgatggctccttccactctttcctagaacagttccctgtcagctctaatgacaagtgatctattaaaacactgcatgcttatctactggctatcaacacaaaacccagattctaaaaggctgataagataccctgcctgcctcagtctctccacttcagacaaatcttccacctccctcaaccccaggaagctcccatatgtcatccaccactcacacgcaacaccccactgccgtctcttccatcttagcatctctgcgcatgcccacatcgctaaaatggcatctttgcgcatgctcacatttctaagatgtcatctttgcacatgctcacctctctgtctgagaacccgtcactgctttctaactgctgactcctcgcccttcaggaccaaatctgcatgttaccttcttagtggggtatctttcagctcctcggagctattggtttcttggccaacacaccattctccacaacctctgacgattgccacatttcccagcaactagtatctgtctctccagcatatgctgcttgaatgtagtttctgtggtctcacctgtacatagaatcataaagacgctctggaggtctcagcacactgttgttcactcaattcttaagagagaaaggaagaaaaagaaaagatggagagagaagttaggatttccaggggatccgtcctcccgaaaaaggaagaacaccgatgtccagtataagctaagtcagaacgagctccattctttatttctctgccgtatggctagagaacaggcagttaataaacccagggacaggtcagcacattgctgtttcccacatttgtgttctaaagcacatgtggagttcacaacaattttgggctcattgttactaagtctccatcactgatgggcaagctgatctgtggcaggtaagattgaaaacctgcatgcgcccattctatcagttattcatctaccatgtgcccgttctattagttattcatctgcaaacatcacagagaacattccgtgtgctggacacctagcacaggcaacccagaggcaagccatcttcatagggatacaggaagtagaatttgtgaatgctttcaaatgctttacaaagcccaggtctgcttctctgcaatctttttttcaaggagccctgtgtggtgtagttgtcctggtggtgcctgtgggagctcagctgtacagtcagtgaatatgacacagagttcaattatacccatcagtataacaacagttaagtgtgagtgttcttcccaacataagttcttgcagaacttacttatgatatcagaagatctgccactcaagacagggcactcatttctatacagggctgggctgtctaccatcttagaggcaacattagattttccattcagctattctggtgttgatctctttgatatgtatcctacccctaaatcatttttgatatgcgccctacctccaaatgaaaacggagggcaggattattgtaggataaatattaggaaaaagagggaggactccagatatcttaaaattatcccacaatcagtccctttaagttccaccgaatgatttgtttttagttccagtggacttttattgagataaaatgaacagcaagtacaacaatcaaaattttatcaactgtttttttttttttcctccccactctgaccctcatatgctcagcaaagactcttgccaatgcccattgtaatttgtattgctatgttaggtggagaaccatccggacaccgtatcttccttgactttaagagataagctgtaactcgacacagaaggacccccgagtttctagtataagaaagggttatttataagctgtatggggaaagatggaggagctgagttggctcttggactgcatctactcatacaggatgaggtatagaagaggcatcctgaggagatttacaggggctccaggggagcagctggcgctttagggagcatgcccatagcaggcctgtcaggcttctgaagcaagaaatctgtggtgctggggagaccaaaatcttagacacagatctgccggtgtaagaactgacagccgtggagtagccggataagacgacggtcctcgtgtttatattgcagcgtgcctcagccacacaagaatgatggagaaattagcttctctgacaaaaacacctcgtccacacagctgggtgttcaccattagtctgtttgactgaatgaagcaggagcaaaggccacggctactcatgtcttggaacggggccaacatctatccaacaaccccttatgattttttttttaaaaccctagctcttatataaaactttttaatggcactaccatctattttccttaaataaaaaaatgttgaatgtttctctcacacccgctgaagagggaaaggagagtttaaattaactccaaatggtacgaatttaatagagccccagctgcctgcaggtttcttcagtgcaaacctcttggtctgagagctgccccagctgctgtgtgatcttgcagcccgtcccatttgaaagtcaccgtgctaccaggccacagttctaaacacataatgaaaaccacttgacttgggcccctctgatcagcagctgagcccatgatctggtcataaagcaaaccagctagtcccaaggctagcagcgatctctcaggagttaaggggaaaacctctgaaggcctgaagggctttctctctagggagtacttcatgttgtggaatgctgtgagccccttcaagcttttctttgctgcagcaaccttctgcctttatacctcttgacatttggtatctcaaatgaggtcaggaatcaggatgataccaattttaactaacttacatttttgttttgttttgtttttgagaattttgagttctctttgggagaaagggagatgtccaagctgatagtcactcacataaacagcttttagggaaagatatgccagacttcagacaggtgaaagcaaattctaaaggctcaaatgtctcagaggatgtgaatttgggtgccaaacttgacccttgcgcccatcctagtacaatgagatccagaaattactagaatacagaccagagctttctcagttctgccacaggagggaatggctttaaaaactgcctacgaggaggctctgtgcttctgatttttgatggacagcaggtgactcataaagtcctccgggagaaagtgtggtgggagaaaacttgtggcatcgaacgaagaactgcatcaaatgtattatacggctcccgagaggctcccagaaacgtttgctagtgaaataccgcccttgactacagcatccttcttggcattcagttttgatggggaaagcagtgagggtgatgggagaagatgaggtagggtggcacggcaagtgcctaggcctccaagaggacgggagctgagagttatgaagcaaatgaatggactagaggctctctagggacagcatgaaaagctggctaaaatgaaagttctgcctctttatttcactacatattcaactggattttttttaaaccaaaaaaaaaaaaaaaaaaaaaaaaaaaagcaagtctgacctaaaacatttctagtaagtgtaaaaaaagaactaaaataattgatgtaaaaataaatacaagttctattctgaagccaagtttggcaaaacagcccagtggaagacttttgtgcacaagactctgcctgggttggctctgagcttttgcttggttttgctttcaagtcagaatagcaccggggagatagtttagtcggccaagaacttgtcttgcaagtgtgaggtcccaagtcctatccccagaatctacataaaaagctggggacattgccatcagtgggtgacgtgggaggcagaggcagaggcagaggcagaggcagaggcagaggcagaggcagaggcagaggcagaggcagaggcagaggcagaggcagaggcagaggcagaggcagaggcaggtcctcagaagctcactgccacttagccagcctgcctggtgaagtcccaggaactcaccaccctccaaaacctgcatgggtgcacacacgtttatgtatacaaacctatcatgtgagtcccctcaacttgataactcaagttttagaattcatcatgacaatatctatcaaggcttgaaaggtcaggttagttcctctcattttgcggcggggcgcggtgggggggggtgctccagggtgttgagtgatgcacaatttagttttcgtggatatattgctgcccagggagagttgatggtgatatcatttgtttatcttggtccatcctcctgtaggctgcttgaagcattcagtgcctggaagctcagggcaagcttgatggcagcatacaaatggtacacatgcatatatgtaggcaaacacgtatatccataaaataaaaccctggatggcgtggtgaaatatagcactgtctggtcagttataaataatcttgtcaatgctacaatcttggtgtcaacaatcccagaatctgtctgccagtctctatggcaaccagttttgtgttctcctgtttgggacttgatacttcacggaacagaaactttacctgtagagaatgtaaaataaagcctgtttctaagaatcctgggaatccttcaatatttttttatgggggaaaaaaaaaaacccatacttgtgggataggcattttaaagtaatttgagggactctggagcccagtcaacaaagatgaatctggactttgaatctggcttaaaaatacatgtgccaacagtgaggtgggtaccaagaaacaaactgcagcagctgaactgtttgttgttaggttggacagtactaaggaaggctcaggcagaattgtttcattagactcttctcatcagttatgggtattagctagcatattaaagccacaatgcatagttctttctccaatgtgaactcccagctaggttgtctctcgtggcagcggtctaccccggtcccctctctctttaatggcctctatgtctcttttctccttccacaggtggaatataaaatccccacatacagttgtgctttgggaaagctgaaataacatatagagcaactgaacagtaataagggaaaagcacatcatgaatctaattccatttccagatgtaaaatgtcataaaggttttttccccccacacttggcagaacaacgggaatttttgagagcattttatttcgctgcatgtatgcatgttcctaagtaagggtatcagagaggcctcgcagtgatcgagctataaatgcctcctgttactgctttgctgaggccccacattgagctgagaggtgtatgaccctcacagaaatggcagaagccagtgcctggctaatagtagaatctggcgtgactttagagtaagcactctaaagatgcaggggtgaggggcggggacgagggggcttctaagcagagtcattactctctgcaaacaatggggttgttgtctgtttcaaagagcaaatcacttagccttcccacccatttttcttcctgacttcttcatgtttaatcatcttcacacaggcgcctttggagatgcgcctgggtatggggtgagaaaggatgacggaaaggaaggaggagatcactcccctgattgacgcaaatcaacgaaagtcatgtagtcggaactttgaggatagagctttggataagtggagcagttccagaagtgtactgtgaggtgtgaaagcaacccacagtggggagaagtccattttcatgtctgcttgatgcgggtataattttaataccaaagaaaccacgcctctattggaaaattaactgcgaaggcagattatcgggtgtgcccactggcgggttactcccaccgtggccttgtacgagctggaaagagcatttttcccactcagctcctgcttggtataaattattagggtgagaaacatggactgtcttaagggtaataaagataaaaataagaaggcagttttcatgtgtactttgtaagaaactgctcgcacgattgtcggttctattatcacatctggctttgtactctttaagggaccagaccagtgttacactcccgtctctctgctaatgccaccttatcattcgttgactcaaaatagagacatacaggggcagagaggcaagtgaattgctggtctatttggggccagcctgatctacatagtgagtttcaaactacccatggctacttagtgagaccttgccttagtggaatacacacacacacacacacacacacacacacacacacacacacacacatatttggagagatgacttagcagttaaaaaccttggcttctctttcagagaacctgcgttcagtacctagcactcacatggtagctcacaaccatctttaactccagtcccaggggacatgacatcctcttctggcctttatgggcagtgagcacacacacagtacatacacatacatgcaggcaggacacaaacataaaataaaaataaataaatctttttttttttaagtgaggaaggattagagcctacaatcacttgtctgttaggtctatgtttactggctaaccaaaaattagaggtgacagtcaaaatgaaacaatgagttgcaaaaaggaaggaccactctcacttaaaccttgagtgatttcaactactctcacctcccctgccctagaactctggcctgaggccatcttgagatgattgaattgcttgctgcttgtgtgctgaagtgcctgagctgaggttggagctaccatctacaaggacttgtgcagatctgaaatacagacacatcaaccgagagagataaatggaacttgtcaccagtctgagcagcaaacacggaggtccatccctcacggattatggacatctgtattcctaattggcattctttcgggctatgccagcagactggtagtgccaggagagcaatagcctcggaaaagatgagatgtcacgtttaggtgacaagaggcgtggatgaggcatgggcaccccattgtacggaatcttggtccatatggttgctataatactggtgatttggggtttgagggacctccaaatggcgtgtttcatccagaccgaacgtgctattttcaaagcagatgggtttatgatcttagaataacaagcggtttggatggtcgcatgaccagcagagtccgtggtaagacgcatataaatagttaacaaggtaatggtaagaaatgttgaccttgatttgtttagctaagatgtaaagatttttgaaggtcaaaggtgtccttgtgtagtgttttggagtctagctgtgtctgaccctctaacattaagctgctgtggcctgcagttttgaagagtgaagcaaaccaggggaaagtggggagggggagagaacaggaaatggagtgaggtgtttcaggaagttgtcaggggttgactgattgattccagatggaaggggtcagccttcatgacccaggaaatactcactaggggaaagaagttggcttggggaaggggaaagcctgggagtgggatgatgttggaatgtgcattctacttcctttagccttaaaacatggagaagtccttactccttgggatagaataatatcagcgttgtcatcatccatcagagaacagagaaggaagttaaacctgaagccttgactgagccaaatgggtcttcccatgcgtaatgtagcttattcttctagaagtagagagaatggatgtaaaatccagtgttcaagcatgaatagggataacaattcatacctgatttcatgtgctggaatttgtgaatcaaatccattaatttttttgcagatttagcttaattgacaggctttcctaagtacttcacagcctaagatatttggaatatgaaaaatagaacttcacacacacacacacacaaacacacacacatgcacacacacacacacacatgcacatacatttggacataatttaaaatcttgtaataaattttgcagacactgaaataattcaggttaattcccttgctgtcacgagaggccagcactagccagcaaaagattaaaatttatttccattgttaatagaaaataatgaagtgcatgtgaaccaccagggtatatcattcgggaaatgttcactttggaactgagtctctctccacccaaagccgatgatgatgaaatctgctggctagagaaagctctgcatgttgtggccaggatgcacaagaagtgtcaacagacagtgtgacaagcttatgcaatgacagttcctgagtgtctgcccctcacagcctcgtcatcctcagatggagctgcagttctctttggtgttctcggcttgttaaggtgtaatgcttgaaggtctctcatttttgttttgtgtttgaaggtctatttcgcacacacagcctgatgccagccccctccctgttctgctattctcagaggtagcataaacataggagatgcttaacacacactctccaatcctgtcaaaatgagttctctttcttcctctgactcaaggcgtggtcttgtactctctgaaatcactctgataagcactcaggcctggtgtacttgccaagagtgatggatgtctgttttgcggttgccaccactggataggaattatctagaaggcctattctcagacattcacatgttaacacagacacaattggaaacagacctaaggctagacaggctacatccctgaattgtgagcaattatatgggcgataattttctgaatgacaactgagcttcctttaggtttgttctctgagtccccagggcctgtcatgactcctgatgtgttgttggagctcaatgactatctgttgagtcgaatgattgaaactcatttacatccatgtaaaattttcatataggctacatcaagcccacagagtgaggctacatgaagtgatttgtggagcacaggtccaggggattcttttaaaatgagactttaaaatgagtcttataaaatgtttaaagatgccatcctggtggctgatagctcagtcagtaaaatgcttgccacgacggcacaagaacctgagttcagatctccacgttaaaaagctacatgtaatggtgtgtgcttgtagtcccagtttggggaaagtggtgacaaggtgtatccctagggctactgtcaagcagcctaggctaattggcaaattccagaatagtgaaagacacaagacaaggtgactatcacttgagacatgcctcccaaaatagttgaccttacatatacatccacatgcaaagggggacacacacacacatacacattcacacacatttacacacactcacacatacatatacatacaataaactcagatatacacacacatattcacacacatgctcacatatatacacatacatacacacactcacatacacactcaaatatacacacactcacacatacatatacatacaataaactcagatatacacacatgtattcacacacatgctcacatatatacacatatacatacatacacacactcacatacacactcaaatatacacacacatacacacacactcataaaacccactcacacactcacctatacacacaaacacacacacacacacacacacacacacacacacctgaaattctcgtcgaggcaaatgaaaacaaaaggagggaagaatattccttgggattatagctgactggggagggatatgaagtcattttctgaagggataaaacattccattcttaagaggagaatggattacgccatgaaggtttaccataacactctcgaacctgtgcttgtcacagtttttcatacaatgggagaagggaggggaccatgcgatccgtgggatgagcacagtaatgcctgaatgggttttgaagttgaatgatgggttcttgaattttgttagctgttctgttatcttatttgcctgaaattatctgtaataaaaaggtgtttcttgggaacgctgacttccttcccattgagatctgagcaaggtcatgtctctccaccctcctctttcatttaataagttagaaggcgtggcagaacaattacaggtaggatgatagtctgcaccggggccataggcagcgagagtcatcctgaagcacggctcattagattattcaatgtccttcctggaaagggcaatacatatttatgagcatgtgcataatacgttattttctccaaagagccacggaaaagctgctgtgcataactgcataaactgagtagcagccatccttctgagacattctctttccttggtcaagtccaagggtagtaggggtggagatttgaaaaggttcaatgatatgtactcaagtttatgttaggactcatgtggcctgggatctcagttcgatttttaatccaagtccttactcttcaacgctcttttctgcctcccttggttcaactctgcctttgaacttctttcatgatctgaccagccccatatgtaatagaactatgtgggctagctaccattctgcagtcaggccataagccctctgagagcactggtgtgatgatgcctttccattgctgtgatgactagtgctactatctctctttctagaaccttctccagagtttagactatgtaagaattgcactggataatgtcctccatcttactagctggacatgggaggcaggagtgaggcaaatgggtcacaaatcatcatacttcggcctgcctttcacatcgtgccaaacgttttccatgcaccatcaaatgctatctcattcgggcctgcaagagagatagcattatttatgtttcctagataagaaaaactaagatttgaaaaggttcagtgatatgtactcaagtttatgttaggactcatgtagcctgggatctccgttcgattttcaatccaagtccttactcttcatcgctccatgcccacccctgcccttacctccagttagacactaaatattccttatctcccataatgcatttggggagcctcatcttctcacggaatctttatcactgttcacgaatgctgaggggcagctgatcagctcgtgttccaatgatcacaacccaagggacaggatccctgtttccaagcttggagaaatgagcttcccagtgaagattttgtctcggtccctgcattacactgtctgcagctggggacagatgacagtctcactagtgatgaggcttctgcaaacagcagacagaaggccaatttcccttgttgtgacattgacagagtttgaactcagagacgtaataacccacagggccaaaggctgcctcttgtttgactccaaaattttgcctcgtctctcacttgccttgcagaaatgttttacaaggaatcctgttccactgataccctggtgcgaaactgacccaactctccccttttcactttaaatgcaggtcgtgttgtccacaacagtaaatgtggatggacatgtgctggctgtttctgacaacatgtttgttcataacaattctaagcatggaaggagagcaagaaggcttgacccatctgaaggtaggactgggatatgacccggaccttgtttgcaccctttgtttatagacaaagtctctagcccagactggtctagaacttactatctagaaattacctttcatcttcctacctccgcctccccagtgctggattgcaggtgcccaccaccacactcagtatatgcggtcccggggattgaacttgggacttcctgtatgctaagcaagcactctaccacctgagctccatcccgccccatgggcatttctaagtgctgctgctgtacacactgactgcactccaccccactcagctcccggccagcatacagctctcagtctcttctgttccaatccctgtttttctttcagcgagagtggtatttcaggcgatcgcgggcctatgacatcttagttaaacaggaacagtacagtgccagacgtgcatgaataagtgtcagatgtgcctttaaacagattgtgggcaaaacaaaacagtgtgtggagtgaagctgacactaattgatttttgtttgcttggacaagaagaaatcacgggctgctctgggtcgttttccaagtgcattaaactaattagaaatactggtaactgttaaatttcaagttgtccaaaaaaattaaagtataccaatggacagactgacaaacctaagtgaattccatctcacttgttttccctgcttttctcaccccaaacctggtggtgttggaagacattatgctatcgataagaatcaaatctagctatgagtttactgttgatgcgccgctacatgttacccaccagccttcctcccagctcagcccttaaaatgtatcttatatcatttaaaataggaattaatgaactgaaagaaaatgattgaatcagtaaagaatttgaagcggtgttaattctcccacagtgggcactgaaaggaaagaagaaaatccccgggttcagagctctgagcccttcgagtttcttttgactgattggatgtgattgactggccgttcaaagggggctcatgtttttggagtcctgccaaagttctcctccacctttgaccctgtcaactttggaaatagagtgatggattgagtttagttatggcctgaacacagtattgggttcctgttgggatgcaaagtccagaggcctcgaacatatgcatgaatggaggaaactctgtctatagagttgggggagcaattagaggttgtctctaggtggggttgagcaaacccttccactgcgatagatcccgtttcctctttctttccctagcatgttaacaagccctgtaaatcttaacattgtggggcagaggaggtggggagagaaaagggatttacacttttctagagtgatcaacttataaaaatatgggcaaaaacaacagagttttaaaaacaccctttacacaattagctaagtgtttcagtcttttatacataatggccaactcattaggctttaatgaccttgtaaaaaccaacagccaattagggaaggatgggaaatcaacacagcttcttggaatgaccgacagctttccaggacagcacctttccctaaccctagttatcactcacaaaggacacagagctgacttgttctttctcgtctttccagctacaccctgcatcaaagccatcagcccaagtgaaggctggaccacaggaggggccatggtcatcatcattggtgacaacttttttgatggtctccaggttgtgtttggtaccatgcttgtatggagtgaggtaggtcaaagccacttactcccatgatatcctttggctccatagttcttttgggctgggggaaccagtggttcctggtgaagcagcaccacaaatactcagtcctgtatacccactatgagaaagacactcagggtatcaagacatgcaaagtcatgacatttgggggatgaattccttaaaatgatattcactgcagtattataagattgtgaaaaaaattagggtctaaatattggattataggagatgatggagaaagaaaagtatctttccatcatcgaaaattacgttttggaaaaattctaacgataccagagaagagcatgtttatgctatgatgctctgtgtgtgtgcggaaagtcagaataacagtggatacacataatccaattctgtgacacacagccatcgaaatgtctgggcaacacaccagatcctaatattggttgtctctgcattatataattttagatttctttgcatagttctgtaaatccccaattttctaaattggatatgtttggcttacaatttataatcagcaaaactaactaagtgcattaccaaaagcaaagtatggctgcagagttgggcttggcagttgtcaaactaatatgaggccagaagcagtgacctctttctttggtggcttgtctagtgactgtcttcccctgcctcttcccttctcagctcataacccctcatgccatcagagtacagacccctccccggcatatccctggagttgtggaagtgacactatcttataaatccaaacagttctgcaaaggagccccgggcaggttcatctacacaggtaagaaagagaatgatttctaaggtagctggttcctagctcatctttgccctaattatcagtatttctattctgtaaccagcctagttattctaggtctttctggtactgtggaagaatggactaagtgaggggcatcaaatggaaaatgaagactcaattctaaatttgaacttgacctgagaaacttctgcatggtctgttgatggctatggcaactcacttcgggaacatccccttagaaacgcatctctgttataaccatgctagggactttcgtatgagcaattggatagacgtaatcaaagttgttggctgtgagttttcttgacagcaactcaagcatgttgcacagtcaagtggtacaaagtattttaaagccttacaagagtaaaacccacccaaccattccattttcactgaatgtctttttcacagtgtctactccaaatcagttgaaagactgctttctctcagtgaggacagatgacacataagacaggatttcttccttgtctggagggttaggaagttttggaggatgtggttggttggctgccaagtgcaggtggagattttctaaatttgaaatgcaaagcatccattgtaagaagtgtggggctcagaaagagagctcagtgtggattggatcatgggatttgggacacccacctggtctcagtgtggctagcaagtgataggaaagaaaagctaccctatagttcctaccagggcacagttcacccactcatctatgccttttgtgaaatgacataactctagtttatgagatatgagatattgaagggatggaagtagaatatgcctagtgaagtgaacattctggggttcaaggcagatggcacagtcaatgaatggtgtgatatcagtcagataaaaatatgggcagaatgaggggactcaggtgggtcatcaggagactcctctgaagaagggacatcaaggctcagaacagtctcacaggaggggaaaacccacaggaacacactacctcccctgtgatccattcatagtcttcctattaccctatagccccagagagctggcgggtcagtggtgtttcctgaaaccatacctggaagcccatgactctgttggagtgatagggtgtgcctggcaaagaacacaagatgatgagccagaaatttaaaggagccaagtaccactggataggaataagaatgccagggtattagaatgaagtccctggggtggggagcaatgggaaatgaggaaggcaggcaggatgagggggatggggaagatgttgagccagggaggatctagagaagagtaagaaatgcaaggacgggtgttgccgtggatgggaagtcagctctatagtggaaggaagcttgagaaggccctttgggaatcccaaaaatgagggccaaggacagtgaggaggagctgaggaggagcaccttggggaggagcagcctgggaggatggactgtccctgatgtctggtgaagaaggccctttctccaggacacttaacacattcttggtatctccagtccaagttcccttgggagtagatgatgggtctagccttggaagatacagctaagtattctaacaagtactttgcagccagcctccaactctactgaggttggcaatgatatcagttctcaagggactatagacacttagagacagannnnnnnnnnnnnnnnnnnnnnnnnnnnnnnnnnnnnnnnnnnnnnnnnnnnnnnnnnnnnnnngtagggcaggagactatagacacttagagacagatggtgtgtgtgtgtgtgtgtgtgtgtgtgtgtgtgtgtgtgtgtgtgtatgtgtgtgtgtttgcatacttcctctcaaagctgagtctcttacctctagttgcatttaattgccaaaacctaccttggctctcagacaaatgatgtcaaatctcttaacctctgactgtatagtgtagtatagtcactggttaaatgtgtgttcaaaactatgttcaagatacaagacaagtaacattaggatacctcagcatcctattgttccagaagagaagatagatgctcaagatcccaataattaggttaagtctcataagatatgtaaaagccaaaggggttgttggaatgtctatcagggagagactaacctagggaaaattagaaaggcttcttggaggagggcaatatacaaggacatttgaaagcagtagttttccaactgagaatctgtatttcttaaaagcaaacacagtgctaatggaagtcagacccatgatgtcatagctgctaagtggtatgcctaagtgtcagtgtcagcaaagaactctcctcctggtttaataagacgtgatttgccgtgcattgtcacattactgacatcgccatgtttgtatgcactgagtgtgcatgatgctgagcctcatgtacattgaacatgcacatcatgctcaacactgacaattgggacacatcagaccttcagacactcaccttccaagacattaggatgtaaaggtaagctgtacatgttgtagagtcagcaggcctggacccacagcttgactggcctgctaaagagttctctgccacatcttataaataggacatgtatgccagagaattgaggagaggacactgtaaggtgaaggctggggtaggatgccaatcatcaagcagccagcttgacagtagattcaaaacaaaggttgggttgcagaatttcctgattttcacagtgcaggcactctttctactgtgatttcaagctactgcgtgacaccataggttcctgggacttcgaccacctgttctcaaattctagaaagccggggctttgtaagcacttgggatggagtgggtagacagtgagaagtatgttagacacatgcgcagatgtccatcaatgtttcgttaattctcatatcggtgtcattgtggcctctggtttgaacaaggaatgtcaaatgtggtaaatactgaatacttatgtgagaagttgaagttgtagcaactggatttcaatttgtttgtttgttttgttttgtttgtttgtttttaaaacagggtttagctatatagcccaaagtggccttgaacttgaggtcttgatgtgttgagatgaagtaagtattctcaaacttaaccattaaagagaacttagaataagccaaacagagggtcttgacatgaacggctcttggaagggaagggaaacctgatatttggcccacaccgtgagtgagacagaaggcctgagtgtaaggcagctttggcacaagctgaagggatagatagtacatcacccaggaatattctctcagctcactgactcctgtggggaatagtgtcatgatcagacttgactcttcgaaggcagtattggggttaggggatggctcagagtgcttgccatataaacatgagggcctgacactgaaacatagaatacatataaaaaaaattcaggcatagtgacatgggaaatcagacaagagaacatctggggctcattggccagccaggccagccgaactggtaaactccatgtttatcaaaagactttgtcccaacaaggaagcaattgaagaagacactcagtgtagacctctggcctccatgcatgcacatagatgaatatacatgctctcatacgcatgagtacacacacacacacacacacacacacacacacacgggtctttctggctgtggtgcagagaatggctcagaaggcagtgtggatgcagagggtcaagtggaggccagtgtggtggcccagaccggcaatgacagaagcttggaccacagtgctggtggtggggacaggcagaagtgaatggaatttaggaagtagcattgacgggactcgctgattgattggatggggtgatggttggcgggggagggatgcagacaatgctcaggtttcacatttgaaaaattgggtgggtagagttggaaagtgatgtgttttaaggtagaaagtgctaggggagttcagagggagggcacagtgcttccagctggtggagaagtgggaagatttaatactggaaagatgccgattaatgaatgcatttagcgcactgccaatcaaaataccaacaaaatgtttggggaaactatacaaacgttcatctgaaaaggtgttaaactagaaagcctggttttgaaaaacaaaaggtgccttgcccctgcagacattaaaacctatactaaggtttaataattaaaagaatatggggttgtgtgggattgtatggaaatgtcaggtagcagaagagaaaaatatcaaaaacaatttctgcatacgtcaagtatgtcagtacttaagtaccagcatgctggggttcttctcatgtcagtgaggaaaagatttacacaatctgctaggccaactagttagaaattatcaggaagaaagactcagctttctagttgggcattgtcaactagcaatgttttaaaatgaattattgttcattaaaatatacatatttcaaaagaatatacaactgaaatataattaccaccatgaaccttgcttatctgggcccttagaagagaccattgagtcaaaataaaaaagatgagactatctagataaaaagtaaaatttggcacatcaaaaatgtcaagcattaagagcaacacctggagcacgttcagctttggaaaacacagtcttacacacaagaagattcatccatttgttgagaaacaaaaatgatgccttctattgccaactgtccttctatttcactgtggataaagaagtgaacactcagcatcttacacattgggagataaagataaaaaccggggaaggaggcaggaaatatgatcagaagtaattcatggatgtgactggcatgggaatgcaaacatataatcccagctctcagaagggagaggcagcaggattatgagttcaaagttatccttggttacatgagtttgtggcagctgtaggggacattatccagaaggaaggaaggaaggaaggaaggaaggaaggaaggaaggaaggaaggaaggatcgatcaagggagaagggattgattttcaatgtacttattccataaatggcaataagagcaagaagagtagtatagattttttttccatatcaaggtggtaaagtttttttattttttaagcaaaggaaaatacacagggtggtagaactagaaaaaggtggagacttctctcatacagggcagtaggaaggtggatagttagagaagtgttcctggatggtcttagccctaaagaatgtgtgtgcctcatgatctagtggttctactctcagtgatgtctactcagaaaataactgaatttgctcagagctcttcattggagttctatttatagtagtaaaaatttaaaaatatcattgatgtccagtgggggattcattaagtcaaaatgaggatgtgtttatacattttaaacatcaaaaataatagtgtaaatagactcttgtttccatgagagataccatgatttaagtttttaagaagcttgtgcacagcctgctgggcacggtggttcttgcctagaatcccaggcctgggaatcggaggcaggaggatcaggaattcaagagtctcctcaggtacgataggaacaattgaggccagccttggatacactttttaaaaaagtagtaatttaaagatcttacactgagcatggtagctttcatcccagcacttaagaagtggaggcaggagcattacaggcatgggccagctgaagctacacagcctacctgctctgtttgcacaaaaaaaaaaaaaaaaaggaataattggaccaatatataagtaagcaactatgggtttgggggtattggtatttttacttttttcatgttaattgtgatgacttatcacaattaatcacaaatgtgtctatttgtgattttgattttaaacaattacaagataaaaactgcatatcatggatgtttaactatggaaagcgtgtgctcctcagcccgactctttgtgtacaaacaaagatgctctttgtggatggaggtcagggagtctccttgcctttgggaggccatgagaggctgaatgagaaggctcagaactttagctgatacttttgcaatagagaagaaactaaaaatgcaaacactgagtcggagagctcggacctgagccagttcttccaccttgaggtcactgggtcaagtgcagctcttactggtggccaaaagaaaccggtatcatccacagagaggtccgggtccccagggaatgggttcatgtcctcttgtattccttgctgaaagaaagcagcctcgtgaaagctgacttagttttggcgtgatggctggaaaggcaatggtctccacagaagactgaagaaaacagctttccaccagacctgggtcctcactccagccagcccacagaagactagctgcattgtctatggagagatagaccaaggcctctcgggcttctagctggtctggtctcctgccgctggggttttgaccataagctgtgttctctaagcacctttcagtcctgtatctggggcttccctatgggatgatactcatgactgctgtaggtccagacaaaaggctcagctccaatatgatgtgcaaaaacttacccagatctcagagcaaagagaaccttgaaacctggagagctgtgctggtcacggtagaagcagatctaaaagaagatgtatgaggtcagccgggaaagctgcttccagggactgttgcagcatccgtttttccttgtttttctgttaagtcctttctgagcctcaatatctgtatctatgaagtgtggatagcagttgtacaactgtccacgaatagttccctaatggaactgatcacaaccatcaaatcacattttttgaggatttcagcaactgcatctaagaaagaaatgaatttaggagatgtgggttctgctctggctattgtctcagagactttgtaacttggagaattggaaggattcttaggggacctagggcatgtcaccatggacacaattgtagttcttactcttaggtggaacttccaagatgaagatgtaaaaaggagggcaggaagggaaacttcaataaatatcccccccttgccacacccccttcttcccaaacagctctgtggtccatagtctagctgtagatggttcaaagaagcaccaccatgatggagcttaaccatcagaaatacctgctagcgctaagtagactgcagtgatccaatctcgaggctcctgttgccaaggatgacgtaagctccataggactcagataaacaacggttctcttcacacatgcaactttgtagttttgttttcccttcagccgaggtttgctaacctgcaactcgctgctttggagttgagagtcacgtgggactcagctcatcagaagactccaattgcctgtgtctggcttgaaacccagaggcaatatgccagctgaagctgaggtgggagggaggaagccccccccaccctctgctcttctggaaaacttttctacaaacaactggcaatggagaaggtcgtcctggtatcggtgggacttcagtggttggctggtcagagttctcattgtctgtacttgatgtggcagccagtctatgaggaaaggctgccctgagcatggtgtgtgtgtgtgtgtgtgtgtgtgtgtgtgtgtgtgtgtagtgtgtggtgtgcatgtacgcatgggtgtgcttgcccatgaagatgtgtgtggaggccgttgtttgatgctggatccctgcctccatcacctccccagcatattctcctaggcaggctcttttactgaaccccaacggggcttactgactcagctgggctagccatcatagcagcacctgcaatctacctatttctcccttcctcccagtgctagggttacaagtgcctaccactgtgcctgcccttctatgggggtggagacctacactcagaccttggtgcttgtacagtaaccatttccccactgccttatctccctagccccaggctgtccatttgattgcaagttaagtctctgataaattctatcgtgagataactaagaagaaagagagagagagaaaagcagtgattgtaatttagtaattacatctgtcgtctgttgagctcacagggcccgactcttcttgtggcctctaataactgccacctttcccccgtgatgacagttttattagtaccttcacttcataggtgagaaaccctttgcgcagacaaattaagtcacctgccgtggttgccaaataggttccttctaagccgtctaatcccaaagcttggcccttaatcactagtcttccagtactatgcaaactggggcagaaggcggatggagggttgctgtcaggctgtcgggtaagcaaagtgaccaagataagaggggcaagggtctttatccaaactttgaaaacaacatttattctctctctctctctctctctctctctctctctctctctctcggtgtgtgtgtgtgtgtgtatgtgtgtgtgtctctgtgtgtgtgtctctgtgtgtgtgtgtgtgcgcatgtgtgtgtgtgtgcatgtgtgtgtgtgtgtctctgtgtgtgtctgtgtgtgtgtgtatctgtgtctgtgtgtgtgcatgtgtgtgtgtgtgtctctgtgtgtgtctctgtgtgtgtgtatctgtgtgtgtgcagatgcttgcatgcccctggctttcaacctcttctttaagctttacatgggctctggagactaagttcagctctctaggcttgccccacacctgtcatgacctgctgacaccctgctggcccttaccctcaccgtgtgtggagagtcatgctgccatcctttgcaccatcttcctaacctaaagaaaaatgggggagggaggagccgataggggatgccacagtcagtaaagtgcttgcagcaagtgtaagaacctgaggctggaccttctgcatccacatgaaaatgccaagcatggtggtgtgtgcctgtaatcctagtgccggagaggtggagggagagggattcctggtgttaattggacatccaatttggttgactcagtgagaaccaggttcagtgggagaccctatctcaaaaattaactaattaattaaatggaggaacaattgaggaagacactgatgtcaacctttggcctttgtgtgtacgcacacacatgtgtacttgcatgtgcaaaatcatgtgtacacacacacaaatgagaactgcctactttaaagggaggatgaaggcaaggataattatgcatggagctatgaaatgatggacacgatcagtatgcgaagctctggcaggcagagagacatcccatggctatgttgggtccagatgctccccccccccccccgccttattgctctttggccagccataaccttttgtgaatcttctagtctgtaaaatctgaattatttattgaaaaacctgccacattaggcctttactctctgtttggattaggtggggcgggggggggggggcgggggtcacaggtagaccgaggagcagaagaaaccgaaggtcccagctggtctgggtgtgggcagctgctttgtaaggtgtgcaattaaatttaaaagcgacaggatggcctggctactgaagacaccgtggaaagttgtgttagctaaccctccgtcccccaagacttcttatcttttattttagcagaggcccaagtgttgattaaatagcactgttcattattggcgagaaagcatccatcaacaggaaaaggcagcagtcgggaggagaggtgggcaactctacataaaactctactcccctccaatcacatcccagacagcctgctccccaaggctctgctggaggtgtggggtccccccctcaatcaacctgcaccatgcagatgtgaaaacttgatttcaaatgttaatagctcatccattttatatttcatttttttcccctcatagcattatcatggggggaaaaatcccatcaaagaaatgaatctgattttcagtttaaaatatccagttcagacatcaaaaactggcccgagtacaattagtccccgttcaaactggaagccagttggatcaacagctcccttggtagcctgcacttttacaaagttgcccatatccctagctctcgtgcaaggcagtttcttcttccgctcagtctagagaataatgtcccccctgccagatccggagcaggaagctgttgctccacgagagaccgcccagctccttaatggactggcgctcgccgctataatattccgagcgcacgctacagagcacgtgtgcgttcataaatgctgcctggtggcatttaggtttatgcctgaaatttatctttaatttttacagttgtctccttaaccgtgtatattactcccttcttcaaacaatctgtcttgtgactgcagtttctcctgaaaccaaagcataattaaatattaaattaatatttcatttgaaattaaatatcaaaggcttccgtctaatctttctctcgtgcacctttggttcccttgtgttctcactcctgtgtccacaaagcgggtgccacctctgagtaattcgctattgttttgtctttattcctgttatttattttttaaattgctgctactacctgtttgctctgttgactcaaatggacatgaggggaggtttcagtatgtcccccaaattaggagtggtacaactcaacaccttatgactgcgatggtgccgttagtggtcactgctgatatctaagacagcttctgtggtagggtcagatgctatgaaagccctatctctggagcattagcatgctgagttgtacaggttgagcatcccccatccaaagatttgaaattgatagtgctccaaaaaatgttttgaacacgaacatgatactgtaagaggaaatttccacgcctgacatcacattattccaggcaacatgcaggtgtggtaaaaatgtcgcacaaaacattctctttgtactgccatgtatacagtatacattaagttcaaatgaagttcgtggtacctgtagatctcattacgaatatgtaaagttttcaaaataaaaattcaaaatctgaaataaccgccagccccaagcatttctgataagggacattcagcctgcataagtttaactactggatggattaggacttttgacaggttgacaattggttaagaaatggagaacaggcagagccaagtgacagagacttcactggaatcaacaggtaaggccaggggaacttgaagatatggggactgacggactggagaaaggagaagttctgaggcagcagaaggacagacgtttgtcccaggacctctgaaatcctcccaaagctgggcctgtcacctgtctttctgctgagtgaatagccagagaagcccttcttcccttcctcgctacatagattctaactctttggctttgtgcttttggaacaatgagcgagattcctttcaagtgctttcttatttttgaaggagttgggatttggaactgggactgtggggtcctctgattcggggtactgtccccttctgtggactgtgagctttgtaaacattgtctccagggcaagaccaatttctgcagatgtagatgcagatgcacagctgagtacagagttgctgcttttcatagccttttgatagaaattcatcagctgcacatgattctaggatttacgtggggacgcaactactgagtgagccccacaccagtgctgtgattcgccagcagctcagagtggcaggcagactgaccactcagatcctccctcacccgtttcaggtttttgttttttcaaattcttacaacagtaaccccacaatgaactctcatcaagccacgttttggtttgagtgacttctcttattaaaagacttgtttttagttttactagtgtgtgagtgtccatctgagtacatgccacatatatatggatacccaccaggatgggtgctgggaatcaaactctggtcctttggaagagcaggaagtttttaaccgctgggccatctctccagccctcggaaggttttcctgtaataccagtgttttgttaatgaggtccattccagaacaccaacaaatagctcttttttccacgttcatcaaaacagaagcagaacataagctgtagaaggtctggtctgatcctcgtagctcttctgaagatacgaaaatctaaaaatcatatagaatatatgaatctcatcaatcctttgggagaattagtacggaacactagccagctgtctgtttgtttatgagtagtttcccacatagatatttttagttaaatattatttactttaaaagcaaccttttcatgcatttctcaaagtttcgatctctttgttgggcccaagatatgtgaggaaattcatatattattcccacagtcaaaatgagaaatgaactaaagatgtagcctctcaagagatatgttatgaaatctcaaggtattgatgaaagtttttcatggctgatccaaatgggatttagactctgtggcagttgaatcgtgtgttattaaactccttaagcaaacccgaatgattcccagtggaggattaagacattctatgtatagcaaagacagaattctcacgtcggaggctcctctattgaattcccccttgattagcttctgtaatatttaacttcatgccatgccgtaattatttaataaaaggtaaatataaattatacttcaggagggatatgaccttttaccttaatgttatgttctaaagaaagacatagataaacataacctataggttgaagcgtatttttaatttactctatttttgacttgccagcagatctctgtgtccctgtcagccagagcattggcagaacttcacagcatcccatactccgtgtggtacgggaggttgtaaatttacagggatgatggcagttaatgacctgctaggtccttcgagacaatcttggtgctggtcttggacacctcattagctaattgaggtttgcttggctcaccttgggtccccaaagccggagaacacccagggtgatggggaagaggggaagatgggattcaaggcagagcctgggaagttagtttgggaccaaagtagacactgtccaactcagctttacagaatggaggtctgaggtggtccggtgctggttgtaatggtctggtgtctgtaagtagcccaagtgggtttgatttcatgatttctacttcaagtgtgtactgcatttgaggggaccatggaaccttgtgtctggtggttttcagcctgctaggggaagacaattgggaacaaacgtgtaatacattctattcaagagaaattgtagtgtgtgctgaccaaagagccctcctgtaagtcctgggaagactgagaaagaagattagtagtgggggctgtgggggcggaaccccacactgctctccctaggaagtgtgagcttgctggcaggaagtggggcggggagcaaacgggaggaatggctgatttaagaatcagccttcttactcctcccattcatctttcttctgaacattcagaatgtacctgtgtctaccttttttttttttttaaccaagacaatccttgcgttggataacaagcagtgcagagctcacatgagatgacacaatggttaattctgaggatgatcgtggagtgagtcagtttgccctgcagctatcaggcagctgttgtgtttgctggttgatgccacatggtgccttttccaccctctgtggctgcagagtcaggtggcacaggcaggctccacagccatctgcagtcctatccttgaagctgggaatgaagcacagagtgcagacggagggacactgcactctcgagaaaaggctaaaagtacatgtcagagggctagagaagccagagttggggtgccatctttgctgggtgcctgtcatggcatttagcgtgaggagagagcctatagcatggccgtgagagttagagagcgatttggggggggggagcactttgtcaaatgccccctcgtagtgacccttcagtgcattctaatagtatcctaatgtgcttgttgtacaacagcaactgtcatcatcgcacatgacagccaccaaccatgtgtagactaggcttctgtaattgttgacatcataaggttaattgacacaagtttacagaatgattccagccattcaaatagcgaatcttacatgtattctgggtaaggggcgggggctctgagcgcatgtgtatcatacacctcccaccccaaaatatgttgggggacacttttaagaaaaaaaatatagcatgtcagttcttttcttcattgccagagctaaataccaggcaaaagcaacttacagaaggaagaatttatttaggctcatcgtttgagggcgcagtctatcaaggcagggaagagaatggaaagctgagtacttgaggcctatggatactttgcatctgcagtcaagaggcagagagagagagagagagagagagagagagagagagagagagagagagagaggagagagaaacaccagaacccagctcactttctccttgtaattcagcctaaacctgcagcctctaggatgatgctacccacattcagggtagattttctctccacagttaaacctctcaggaaataactttcatagacatatccagaagtgtgtcccgaaagtgattccagttggccatcaagattaactcttgcacatgctattactgcttggtgctaggctagtgctgctgacatgataggaattgtgtgctatgtgctggtatatacagggttgctcttgagcatgtatggaagctgagcttgagattcttttcttggaaaagaatagtataagaaacagaataaggactagagagatgggtctgtggttaagagcaggcactgctcttctaaaggatgagctcaattcctagcatccatatcaggtgggtcacaactcacacacacgcatgtactcacaccacacacacacacacacacctacaataataataataatgagagaatgaacacacatgtgtacacacacacacacgcacgcacacacatacacacatgcacatgtgcacacacttgaatgcacatgttttattagataagacatcaaagcattatccacagaacacagataaggctagtgtgtattaatccacaaggaactcaaaaaacaaaacaaaacaaaacaaccaaaaagccaactagaagtaattagcaggaatttaatattgtactacctagaaacttgaagagactacttagaaagttaaaacagaaagaggaggcagtgaaatgctgggtgggatgctagaaatgttaaacaaatcataccaaaactgtgttaagatgtttagtgcttggggaacgcccccttccccctcttaaagaaaaattacaatactggaaaaaaaagagttccttttggttttgtgttaatgttatagtaacctcaacccagacagggttgggttttttgtttttgtttttgtttttttttctttttcttccaaaatgttattcaagagatactctctggatcagagagggagctcagtgagcctgtgcttgttggataagcatgaggatgtgagttcagatgggaaaaaggttggcttggtggtgtctgcctgtaagtcccatgctggggaggtagagacagaatgatccctggggtgtgctggcaagctggtctcactaatcactagctctgggtttagtgagggatcttgtctaaaagaaaaaaaaggagcatagtagaagaagatgctaaaatttgagctctggcctccacctgcacacattctatgaccaccacacacatacatttgtacacataccaccacatatatacacttacataccatgcacgcatgttcacatcacacacacatatgtataccacaccgaaatcgtgatatgtaaccatactgattaccttgtcattttgacagaatacttgagaggagctacttgaaggagaagggatttattttggctcatggcctcagggactgtgagtccaccatggtagggaaggacagctcatcctttgttgcaggagttggggacaaaaggcaagaagcaggcatgggtgttaccttcaagactattcctagtgaccagcatccaaggccacagtcccacaagtcccacaacctcccaaacaacgtaacagccagggagcaggcattcaatgtctttggaggacgcttcaggttcaagccatcataaagtgttcttgagtcaaaaaaaagaggattaatttttattaggaaaagaaaatagaaattaccaagtaaatgcctcataaaaatagaaatttaaattgtagaaacataagagaaaatcagcaacctcattgatgagtaaagaattatcagttgaaaattaaaaaataataataattataagttgaaataattacatgcatagtaggaaggagtgtaaatttgcatattcttctaaggagtgatttgccagtatgtgtgaaaagccttaaatataaatcataatttttggtccagtaattctaattttttggcattttctgactgaagtaattaaagttatgcacaaatgataattattgctttcacttttataatagtgagaaattaggatcacattaaatgcccgaattaggaagccatttaaataaattatagagcatgtcatggaaaatatgcaggaatttaaaataatgttgtaaaagaatatttaagcaccagagggaaagcttatagcacacaccattgctaggtgggttaaagtgggctatgcagcagactaagtcacatttctcagagtaattttaagaatgtgtgtttaatctggaaggatatgagcaaaggtgttaaccctgggcatcctactttctgtcacccaaatggaaatactttcattatttcctctattacagcgggagtacaatttcattgtacaaatatttcgttggtacaaagaagtagaaagtgaaaatgctccatactgaaaattccatcaatacaactttaaaaaatagactttgactaaatcttttatcatttcttatcatatacttgggttatagtcctctctccccacattgttccccctaacttctcctagattccccgcttctcaacttcctgtccttttctctttaaaatgtgtgactgtatcaagtctgtgctgtctatagactcataggtgtggggccatccactgaagtatggttgacctgccaggaaccatcctcttacaggagccatcaactctctatagctcctcagctgggtgtggggacctgtgaaaccctttaatcctctgtgctggaacgttgactaacttaatgctgtgcaggtcttgtgtagaaaaacacaactgctaagaggttatgagcgccaccggtcctgtcatgtccagaaagcagtggctcttacaatcttgctgctacttctttctctgaggttcctgagctttgaagggaaggtttgcaaggtgcacctcccatgtgtggatgaaccccgaccctctacactttgaccagggcctctaatgacacccactgtacaaagaagcatctctgataaggaccgagagctgtactaatctgtgggtagagagatcacaatttatcgagaacagtttggtagaatgtcaatttagcagaactgtagtataatagagtagtgggtttaccctaatgccaagagcttccccgccatgggttgctggccagaccacagtaccaagcatgtatttcctccagtggagttggccttaaatccaatcataaagtggttggttaccctcataacattctgcctgctactgtgcccagtacatgtgttggcactctgatcactatcgtcgttcacagggttcacagctggacaagacccttggttacctcctccccacaacccaagaaggctatgtagcaccttctaataccacaaaagccagcctgcagggagggagcacctgaatttcatttcttcgtgacctataaccgaagtatagtggcatcttgagcaattgggtcgtaccatcaagttctgatgggccaccaagaacaaaggcaataacctgtattgtttggggtatttaaccctgcttatctccaagtggtgggtttacatatgattttattcttttctgtgtaattaaaatggcttattatttgtttaaagaaaaggtatcatttgatagcatagtagcaacaggtatttataaactatgtatggaaacagaaaattttaaaaatatacttctctgtatttgctttgcctaatgagtgcagaaagttgttgttttatgttttatatttttgtccttgctttggtcatgaattattttttaaacccataaagtttaaatgaaagggaaggtacggaggaagaaaagggatgtactctgaagaattcttaaaaatagaagaagtaacggcagcatactgttcccttattcaacaacttgttttatatttaccaagttaaatgtctaacatgggtcaggctctctctttagccatgagacacagaaatgagacagaatgaattctgcttctctgagcctttcagggtagtggggagagcctgaccccttggagaaagcacacgtagtcacaatcaattgcaaattaagacagtgtagtttgcattagaacagcattgatgagaataagattccatacgaatggaaatatttaagagaattattgagaaaggggggcattagaaagataaatagatgagaagatatacttgggaaagagaagagaggagcgagaaaaagaaaaatgatacaaaagtagttattgtctttctaaaaaactggagaatagttgggctgaggggtgtggctaggtggcagagtgcttgcctggatgcacaaggctctgagttcaacccctggcattgaaaatgatggggggcggggggaaggaaaggagggaaggagggaaaggaaagagaggaaggggagaaggaaaggatggaaaagagagaagatactaggggacggacggaaggaagaaaggaaggaaggaaggaaggaaggaaggaaggaaggaaggaaggaactagaggagggagggaagacagaagtaattggtgtatgactggctgtgtaacactgctgacctaagagtgagcagaggattgcagggacgtgtgctgaagacagggatggtgaaacatggacttgttattttaatggtagatggagacttaccacacatcctaaatttatgtgtgaattaaccaatgtcaacaacataatcccctaactgaatgtaataacatgtattaaatctcagaaaatatcaaaactcttccaatacccgtgaaagacttcatagaagagttcctttacagcccaggtgtgtactcaaagaaaatgttttgtctttcagccttaaatgaacccaccatagactatggcttccaaagattgcagaaagtcatcccaaggcacccaggtgaccctgagaggctagctaaggtaagaagcactgggaaactgataagcaaacatctttttgtcgacactcagcaaatctagacaaatctactcatttgaatcccattaaaattaattaagctttgaaactggctatgctttagataagaatatgaacataaggcttgtgctcattttgaaatatattatgcttaatatctgagggagtgtgaaatctgaaagtttggtctcataaaacagatacactactagaatttgggggggaaggacttgagacagggtttctctgtgtagtcctacctgtcctagaactacctctgtagatcaggctggctttgaagtcaaagttatctacctgcctttgcctccagcgtgctgtggttaaagatgtgcgctaccacacttataaaacatggctaattgtataaagataaatatttgcagcattgcttaaaagtgaaagtttcactccttcatatttaaacaggaattttacttagcctcaactgctgaagttcaccaatattcaggcaggcattcttgaagagcctattgtgtacattaaaatttaatgatgattaagcgtctccatacaaaactcttacgaaagaggtcatttgtgagtgaatttgctcagaaaatgtcaccttaaatctagctcatggcatcacctttctttatttaaaaataggtcgatctacctgttgccatttgactacagggaaactattagatttttttttacattcatatttgtgcttcaagtgtgcagattatgaaatggcatgctctttattctgtatctgaataaaaacccaaacagcagtggtttcaacaacacactctttcttttcctcctggcaaaatactcagcatcattagatcagacagtacctgaacagcagcttaataacaatttaaaaggctataaacaaaacaacaacaactacaaaacttcccacagaaaaccaaggagtggaacagccaaaggagaggagagggattagcgattgctacatttttttctgcttaaaaggaaccgggggaaatattattgaaagaattcatttttactagaataaaagtttgagtaggtattgtcaagagaatttcaggcctctgttaactccttggcaagcagctaaagacccatcagtcacttgaagaatatctaattaattaaaagtaccgggattttaaaatacaatggtcttaaagtcgttttcaataaaatatccaagacattatcgattttaactaactttgccctcaatttggtaggtttttttggttgttgttttgttttctcttgttcttgggttttttattttgtttttttgggggggtaatggctttttttttttgtaccagaaaccattatggaaccatcatagtgatgaatatctacagctacttatttgtaggatttgtaaatttgattatatcctattcatcaaatttaatatcggactacttggcttattatatttgtaggtgatgtgtggacttgttttcaattatagttttttgtttgccatttggggctgtctctctgattgtatcccccctgtgttttctttcaggaaatgctgttgaaaagagctgcggacctggtggaagccctctacggcacaccacacaataatcaggttagctgcgtgcatcttgtactctgttgagtttgactcttagttctggataccatgcttaccccagcgtgcctttccgtaggacatcattttaaagcgtgctgcagacattgctgaagccctgtacagtgtccccaggaaccccagccagattccagctctttccagctccccagctcacagcggtatgatgggtatcaactcttacggcagccagctcggcgtcagcatttcagagtccacacaaggaaataaccaaggtactaccctcctgaaagccagcctccaaatgggtcttctccatcaaaaggccagctctctggggtgtgcagagttaaagagtgcatcatggactacccagtaggggcacataaaccccagtgttacagatgggctatttcaccattacaggtagtttgcagttagattctgagctctctgggaactagatagtgggaatattaatgggtaaagttgagtatcataaacttcaaagagtttagacatgtggaaatgaggctccgtggaattcattttatactgatgctatgaggtaatgtgactgaatgacagagagagcagatggcagcatattgttccctccatgcaactcttggtaacccagagtggtgacttaagttttccttggttatttccatcacgcgtgatcttatgtggaaatgcatggcaaggcatttagtgagctggattttgtatatcaaccctaccatatgttccaatgaggttggttttataaggaggtccatctaaatttgttatatatagtcctttgaaaagaataatttttccaatactgtccttaacatatttatttcttttttttcaatcactatgatctatatggtaaattatttttcatttgatgatatattttagactacttataatatgttctatatttgctgattagttgattgatttaaattttttgagactcaggcaagctatgtagtctcaggctggccttaaactcactaggtagtgcaggctggccttgaattcactatgtggtccaagtttgccttaagtttatagcaagccttttgtctcggattctcaagcactgtgattataaatgtgaactgtaatgctcaacattctttataaatttgttttatatgtgtgtgtataaagagatatgtgtgcaatatctgtgatatatacacatatacacatgacacacacatatataatatatagtctatagacataaaagatatttatctatctatatttcagttctgggaattgaacctagagccttgcccatattaggcaagtattctaccactgagctacatcaccagatccaatcacacttagacatagtcatcccaagagtttctttcagtgatgctggttctgtgccaggcttcagaaccgcaaggagattcttcatccttcatatcattcatggcccagatgtctgtacttagcactcacaccccagagccctggatcaacagagctcactatgaccctcagtccttcctgattacaaatgatttccagcctggtggtgactttgaagtaccatttttaaactgctcggcagaatgcaaatggccccagatatgttgctaggacaccttcctccacccccagaaaagattctatgctgtgttaaattagcagaatactagattgtcaagttttgagcaagatatttaaaccttagaccctttgtttgacaatcttcaaaaaaattgcttcggtacgtagcatttgcccagctttgtttgactgctgaatggttttctcagtgacagccattagaaccttgtagaatggctttctcagtgacagccattagaaccaggtagagctccagtgtctgtgtccagtgaggtaccgcttggcaggttctcttatcagctccatgcagagagagagagacagagagagacagagagagagagagagagcactagtaatgctggggagagaaagctggatatggtagtgtacagctgtgcactctggatgtcagggcaggaagagcatctcttctgggcctgtctggaatgtttagcaagttctaagccagatcctgtctcaaaactaaattgtaaaatgaagtaaaacaaaaaaatataaagcaaaataaatagaaggggctgggagtatcagaggcatgacgtgtatagaggaaagaagttactaaagcttacagctttgttatcaaggaccagaatgcagactataggaggactacttgagctctcgtgttctgtagcatggtcaggtaatagtagttgacaatagttcatcataaattccaaataggcaacagaaatttgtgactgttcccaaaaccaggaagggattagatacttgagggggtagatgtgccagtcaccccagtgtgatcattgcccattgcatgcattaaaaaacaaaacaaaacaaacaacaaacaaacaaaaacaaataacgggtggacagtgactacatatcaatgaaaaataaagtgccgcaagggagcttcacttcccactggtgcatggccccggtaacctgacaatctggggtgggtgtggacgagcgcaatccacatttggacggtggtgggtactgctttgtttacctggcctgtttcttctgttgtcaaggatacatccgcaacacaagcagcatctccccgcggggatactcctccagctccacgcctcagcaatctaattacagcacctccagcaacagcatgaacggctacagcaatgttcctatggccaacctgggtgtgccaggatccccgggatttctgaatggctcacccacgggctccccatatggaagtaagtgacctttgccatccatctggcactgtacgcctcccccgcaaaggtttcagccctcagccttttaggagatagctgtattcccagatggtatgaacgcatgggagatagtctcattgcctgatgaaaggtcctttctgccttttgttcttttctcatggctgaacttaaacttcccagttggtgtcctcctgggggaggataggaagcaaacccattcccttgtataaggtacatgtggcttgtgtatgtggggggaggagtggacatttcatttcagctaacagtgtgcacctgattcagcgggcattctcacatgcactatttctttctttcttcctttttttaaaaattttttttggtttatttcattttagctgcatattatgggcaaagaagtttggtgccgtaactagcctagccaccctctattacacagctagagtttatcaggtggtagcagacacagaactggtggcctcccactcctctgtcatgtcttaatttgttattttctttcatagtttcttacatataatccactttgatcatacccccaccccactatctcctcttatcccctccccctcccaccaaagcccttcttccttgtgagtctctcgttgtgcaccattgcagttactttgagtagcttgcttggaagagggtggtttagttgaccaagggtgactcgtcggcggttacaccactgaggaatattactgccctttccctggcaagcatttccagccttcagttcctctgggagaggtgggaccctaaacaggacatctgtgtcgtgctctgcttgatattgtaacatggctctgtctgccattaagcacctccagagagatggaagttgactgtgtatagcagcatgctggatttagacagagcctcttagccttaatctatagcagcaaagtcaatggcttgagaagttgtgaaaaaccgatttgggtcgctctgggagctaagttgggagcttgcacaatggtccctggagcctgaaagagtgtgtttttcaaacctgcttagggaatacttgaggccaggggccatgctgacatggggagccaaaggatggagcagagagctcttgaaatgttggctgttgttacaagtcctgcccctgcccttctctttacccagagtgactccctcgtgccagaaacaaggacacatcaagggcagcacacagccctgtcagccatggctcaagtgacaggccttgggggctatttctcactgccttcagaaccttggttcctgggcccacacaatcccaaaatatttctgagctatgcttttaagtcagtattacccagtgtggtggggattcaggaccaaggagctgagtgcagcgcaggccctttctgtctgtagctaccatgtgtcgtgtgtgtgtgtgtgtgtgtgtgtgtgtgtgtgtgtgtgtgtgacatggcctagactcactggagcagagtatacattattgtttattggtttgtttttactccacttagaaaacaaaagaagaaaaccacaaaacttctttttccaaaagtatgtggtagaatgatcatccaatggaccataggaatgtgtaatatgcaagccaatgggaaagcgaggctaggggggaaatgcatttagaataacttcataaacctaagtctgggcatcgaggccgttctatgtgatgcgctctggtttcccagttacaaaatgctattgcaaaggctgttctctgtgctctgtgtctatcagtatgaccgtgttagagaacgccaaagaaacatagacagtttagctgctgagaccagggtgggtttgtcacacacttggtcaagaatgaggtaccttgtgtgacaatgaggctctccctctaacagaccccacaaggagcatggtggcatgagagagagagcgcgcgcgcaaccatgcttgcttcacggtgattctgacagtgattcacgtcttcctctctacaggttaaagaacaatctagagcctaatcagatcccctcaaccactttgtggcacccgtataacaataattacgaccaccactttcccttataagagatggggagttgattaatgacccactcaaagagtcatagtaggtaaatggctcaaacggaaccacaacacctgtcaccagactaggactggaatgccgtgttttcaaattattcagtaacacaaaggatggaaactatttacactgtatcattaggttaaaacagacagaattttcttctggccattttgttaaatttattttatgtgtctgtgtgtgcgtgtgtgcgnnnnnnnnnnnnnnnnnnnnnnnnnnnnnnnnnagattccatgccacatatagaggaatcagaggacaactttcaggagttgagtctcctcccgtgttaatctcaagtcagcaggccccttacactgagtcatcttgccagccttcatgtgaccatttttgatatccagaaatggcagtttttcatggctcaatcataggcctatgtatatacaagttgaatatattaaatagttgctttgtagattttaaatagtttattaattattaatatgcactctactgggcatcctttcttgttactggtgtgtgtgtgtgtgtgtgtgtgtgtgtgtgtgtggtgaaggttagtggtgtgtgaagtgggggggtgttgaaggttcagttgggtattcgcctaatgtttcttactggatcatccctccaggagagagaatatcaactgattcgaaaaacagtataccctaaatctttaagtcacctgttgatatggaagacaggatagtgtcctgagtaaggagacttcagaggaccccttaggatccctgctgccctgaaagtgaccattgtacccctgttctggagggagggtctgagggggccgaagagtgtgaatggcatttctagtggtgcattcgttacgaccaaatccgcctgttgtaaaatcccaaatgcccagtggagttcattacgataacacctgacctgtatttctaaccagcaaggtcttcacttctctgggaaagattttttttaaagcccaggggaaaaggtttcgtcagttcagttgcttatgtctgaaaacacagtcctatgtggagggtttttttcctcagtattttttttttcttcttcttcttctaatgagcctgatgtggctgaaccatgccatggggcaatcacttgccagagacattaaaaaaccaagagagccaaagctcgctttctcagtgaagtttgccttgcattacagccaacacagacgatcaaaaaccctgagtcttctctgcttttgctgtcacgctccttcaaaaatggccgaacagatgttttttcaatcttacatacgaacttcacttcctggcggtagctgtgtgtgccaagttccagcttggtgcaagtttttatgcctggattctaagcccctgacaatagggggttctaatgagatgctgacagaccccttgagcgccagcaactacgctagctggatgcagatgcaaaggaaggtctgggagttccagcagaggctgagctggccaatcaatccttgtaagaagaacagtaatttttcttcaactcccaggttcacatagatttctgggccagacgtgcttgcctttgcttggcctctgtccacagatggatgtccagagacattctcaattggaagcccgtgtgatcagctttcccaaaacggtgcgctccgctgtccccaaacatggtctactcaacaagcctgcaacacccatggggactatgtcttccaagcagaataacccccgagccaacccaaagtttgggatagaatccattcaggcaaccatccaacctactttacttacagtcttagaccgtgccctaggcttcagtatttttatattttcagaaataaatattaagttttccattataaagcattgagtgactgttatagaacatgccaaacacagagaaatagtttttaaaagagagaagactcctccctgcaaaacataaactcaatattttgatgggtcttatttgcaatttttaattttttaaaattttcaaaaattgttacttttatgtgcattggtgttttgcttgcatgtatgttggtgtgagggggttggctccctagaactggtttatagacagttgtaagctgtaggtgctggaacttgaacctagatcctctgggagagcagccagtgctcttaggtgccgaaccatctcttcaatccctcaggtgcatttcttaagtaaagaaaaaaccaaattctatgatactagaattctaactcaagacattctgaaaagcatgtctaggctcaaaagaaagatagaaatgacatgccaagtctgtgcaggtgtaactactggttggttggttggttggttggttggttggttggttggttggttggtttggcagtactggtgtcacacccagggccttgtgcatgctaggcaattgctctaccactaaatgacatcctaagtccaacaaccattaattttgaaactgcagccttgtggtcatgctagacacactttgaaaactatgactgggtatatgcagagaggtgcatggaaggttagcagacaaatgaccaatgtcatagatgtggcaccagactctaagaagcccttcagtggtgcaaatgtaagtcctgagactggagaaaaggaactaggagtaacatttgccttaaaaagtcaattcctggggctggggacccagcttagcagctaatgtgcttgctatacaagcatgaagacctgagttcaaatccttggagcctagtaaaaagctagctatggtagtgtgcctataacccaaatgctggtggggtaagggtggggtcagatagagacaggagcatcactgaggtgttccatgcccacttagctccagtttcagtgaaagacttatctcaagggattgagtttagaaagagagcaggacacatgatgtcaacatctggttccatgtgtgcacagatatgcatgtaacatctgaacacacatgagcacatacatcacactttctttctgtctctctgtctctgtctctctctctttaacacacatacacacaatcaattattgccacactattttcccacaggaatttgagaatttattaatgtctttgtgtttcttttgctgtgataaaacactgtagccaaaggaaacttgggggagaaagttttgatttcagttcacagctttcaggtcatactccattcctgaggaatgtcaggccaggaattcaaggcaggaacctggaggcaggtactgaagcagaggccatggaggagtgctgcttactggcttgctcttcatgacttactttattatacaacccaagacattggcccagtggcagcatagcttacaattagctggccctcccacattaatcaagaaaatgacccacaggctgaactgatgggagctttggtttgttttggtttgtttttctcaactgaagttctctcttctcaaataattctaattagcatcaaactgataaaacaaacaaacgagctaaccagaacagttagtcttttgctcctttgtcagaggaattagcagagttgtttctttccaggatataaaaaggacagtggacacacaggaaagctttggccttttgctaatgacctgttagttctcaccattaaaaaaaatattttttttccacttttcagtttggatgcctttattttctcctatatcacaagtaattgtgttcatcacagaaaggcctggaaatatggacaagtgaaatggatgcatttgaaaatactcaaaagtttgtcagtcagagagaccacaaatcaaaagtctatcacatccctcggcactttgctttgtgtatttttgttttaagtagaagtcaggtcgcgatgtatatcttcttgtgtagtttgctttgattatccaagggaggggttttcggcattgttaaaatctgttagtttaactattttgttcacaccccattgtatgggcttgatacaggttactgtactgtgggccctgtatttcccaacttcttattgttatgaaaagtccttgagtcttttctcctttttttttttttttggcacatttgtgatcatccctttgagattaatttctagagattaaattagtgggtcagatgatatgaacatactctgctatggattgccaaagtccctctggagggattgatctcttcctcgggaaagagccagcatgtggttcccgcccctcagccgcgtcttagcttccctccatctaataaacgaaaaatagcattttgttaccattgtcattactgttttataattctccacttggaatacttctgttcgggtccctcggccatttttgttggtattctctctactatctttctctcttttccttctcctacttgactgacagaagcgtattagccgtcaagggcataagcacaggaagtacacgtcgcaaacattttcttgatttgtcatttgcttcctgtgcatatgtgagttacagaagctttgtccctgcacgtcagctctatccttccctcatctgctgtgactttgtggttcaaagaatcgcacacgtcatgtcactttttgaggtgcccactactaatctgcagcttttttttgcaagtagtttggtattctacacagatttgctttcatgctcaacacagggaggactctaggtttttttgtatttaatctcccctggtatgcgaactagctttatgcatccactcccaacaacatggcaccatcaggtctcatccctaaccaaggcacatttctggaccttgtttcccccccccaactttttgtctacctacttgttagtagagtatatttcccacatcttttaatatctaacatcagtgcttgccttggcagcaaagcttagttatgatatggttatcaaggtataaaactagaagttccattggctgaaatgcacagaacggtaacacttctgcttcagatgttttaagttgtaatttatgttgggtgtcatttgtcattttcacagaatgtttgagaaatgtctttacaagggtttgcacttgtcaactctgccacaactcttctgtgtcacttggtaaagcatctcttgagaagcttgtgtggctcaagccatattgcacgttgatatgttgatgcatgtgttcatttgtgtgtacatttgtatatgtgtgttgctacatgtgtttgtacatgttttattgtgtatatatatatatgtatatttgagtatacatgtgttcatgtatatacatgtgctatgtgtatgtacatgtgtataagtgtacatgtgatatatgtgaatacatgtttatgtatatgtacatgtgtataagtgtacatgtgatatatgtgtatacatgtatgtgtttgtgcatctatgtattgtatgtacatgtgattgtgtgtatgtgtgtacatgtgttatgtatacataagtgttttgtgtgtacatgtgtattatatgcgtatatgtgttttatgtgtacatatgtgtgcacatgtataaatatgcacacatatttaaatgaccaaaatgtactatatgcacatatgaaattctcaaagagttaataataatatcacatttttaaaaagaaccttctctattactatgcttgagtgaggctattacaacagctggaactatggtgtcattttggtatctatattgagatttcagtggtgtagaagttagaccatagtcaagaccagaggctcctgattcttggcctttctttggcctctaaatctgatattaagggaagggaaatatttttatatcattgttttatgttttattgatgctaaatcaaaagctttagaaaatgatattagacttggaatcataaacaagatccaccccccccccccaatgctgagccctgcaacttatgtagtacactgaattggtcccgtttctcacacatctccatgcacgagcacgacatgaagttctgccttcctttccaaggttgtttttctatttatatttgaaaaactacctaagcataagtgttctgtagaaaaagctcttcttcttgctgtcttaggcttatgattctactgtaatgctgtcattctgggtgctggagagatagatgtctcagtggttaagagctcttagggctcttgtagaggaccaagttcagttcctagcacccatatggagcagctcacaactacctgcagctccagctccaggagatccgatgccctcttctggactcatgtgcacatgcctatacacagacacacacaattaaaaatagtaaaagaaatcattaagaagaaagacctcaatcatattgcacatattgtctgtgattgctagcagtgcagttgagatgcagaggaagagcgggtagtgtctaccttgggtaccaaagcttctgaccttccgttcaccttgtacttagctattgatgctgttttcccatctcatctgctccttctgagcaagcttagtaacaaataataagatcctctctcctgatgtaactccatggagtgtgtgccatggaggggtggggcccatcactgtttaaactgcctttatttttcttggaaattaccacacttcgcctttggctccccttaagtcatttttaatgttaatattgttaatattggtggtttctttctgagcattatgtcaggggagactgaatttcagcttaatttcccaagtgcactgaaagtccagagagggaggtcatcttctgaatattaataaactcccacactgagtgaagaagtggtccacagagagagggtaatcatggcgaccttagccctggacggcaagtccaggctaagagatgggagatgccaggggggctcagagccccacatagagcttctttctagtgtgaaaagttgcccacactgcatagagtttttttcttgctatttctatcactaatgaagatctatcacatcctaccccctactttgactcctgcctccctggactccagttggaaaagcatcctgtcttcttacagggccttcctttcctctaatgggatcattgccacagtgattgttatatgtgtctaatcctcctgggcactattgtcatgtgaaacattttctctgtttctctgttttattagtatatagtaattgtatacagttttgggattcagatagatgtaaattgaccatccataatagaaattggtatgaagatccctcaagtttgctcttgtttttaatcactggaacctggaccactacctgggagctaataatttttcaagcaaattgaggggaaggtacaagttaagaaacgatggcttcctgatgagccccctcctaaagagtgcccacctctgcttgcagtcatgtcttcaagccccaccgtgggatcctccagcacgtcctccatcctcccgttctcctcttcagtttttcctgctgtcaaacagaagagtgcctttgcccctgtcatcaggccccaaggctccccatcgcctgcctgctccagcggcaatgggaacggattcagaggtaagccaagagaccacttggcgtgctgcatgtgatccagctgcccaggggggctgcaaaggctgagcaagcaccccagcttgacgcaacagctctgagcacttgcctgcagagcacctgtggtttatggtgggtcatgaatggcagacgtgctggcctggtgctacaccaatgctgggttagtatgggggtgaatgaaggcaagacaagcatctgcaagacatggagttaagggtgggagaggcatatgttcaacctagaaacatctgggcagctcaggattgtgttttccatagctagggtcattcgccatttctggaagccgcctgcccaccccttcaaatgctgcctgtggttatttcttatctaactggcttcccatcggcagttcatgttcattcccatggcacatgtggaaggatccaccaggagcaaaaactccagttatgtgctggccaaattgatagcaggtgcctgatgaaggggaaggaagagggaagagccatgctgtttcgaagaacaaaaaaaaaaattaatatcacccgtcaaacccgcttttgagcaacgtcctaaaatgtaatatgacatgacgtaacccaaatgtgacgagtacatgagaatctaatcatgcctccgagaacaggaggcagctgatggcaagagagcaaattggaaactgctgagcaccgcggttcactcgtgacccacattattttaggctgtttctcggggcttgacatgaaaacactcatgacaggcagtgttggtcagcagagatttgtggggacctgggataggctgtgcccttctggggaatcccagatcttggtggcttgttggaagcctgtgtgttggggggtgggtgggggtgggggataaccctgtgaggatagcagaaagaacttgaaaggcatgttccatttccgtgccccttcaccaagaggggactgtgacattttgacagagatgagagagaaactggcaagtccattcctggaaacccatcttgaaacagccacttagaattcctctcagtaggactagactgctggagctccatgccacccaacatgtgggtagttggaaacatctgtagagtagaagaaacttttttttttaatccagatgtctaagccataagaaacaacacagcttgtaactaagtgtctcaactctccctgtctctcatcaaacaccctcgggctccctcctgtcactcagagagggattagacctttctccatggggatcatgtttacatcctgggcaataaacaccgcaggggacatggctgctgtgtccttctcctcaccaacccccttggtgacagatgtctctgctctctaagttccttgtcttcattcatccactttcagctgaaaggagaatggtgtgaggacacacggaggctccagcctcacagcccacagtgtagacgccattccctaaaacttgccctgtatacaaggcaccacactgagtgccccacagaccccctcctctttcgggtgcctatttagctgaatggctttgtctgaggccatgcaacgaggaaccaatgacttgaatttagacactcagactctagagtatgctctgatagctcactctctccagggacagtggtggtggacttcctctcaatgcccatccttcactcatatctactttgtcaccaggacagagggaggatattgcttttctgtaaaaagctcacagtaaaaatgaactggacaatgcacagttaagcatctctcaaccatgaaactcactgatgaaaatggtctcccaagaatttccatctttctgtttgttggttatggtttgccctgttggcaaagtcaagaccatcatctggcaaagttccaacccatctagtgctgggtgggccaggaaaagggggcatggattaaatgtgtggtagtgaagccttttgagcatctttggccttctgtgtacaacttggtaaaacctggaaagaggaagggctgaagagcactgagtgtaacggggtaggagtgagtcagtattcagccacctaaacactattgtgacagtgttttctgtgccactctctgctttacttctctggcgtttatagttgatgaatatagatagtcaaggtgatcttatatgctgtgtgtctgattcattttctagctccctccagaaacacacacacaaaagcttcctatactcctagataattacagcagttgttatatctccaagtcatcagggagtgtccagaattgaactgcctttattgaaaacttacatcgattcaatatatagtaatacaggcaaaaataattaaggctttgctagctgtgtaagaccttaatccagatctcacaaacattcaataaaggctgtatgggcagggaaacagacagctgacaattttgcccgagagaactagctgaggtagagaaagggagcgaggggaggggaggggagggaaagagaaaggcaagagaaagagacaggcttagggagagcatggatggtcagaattttggccatttgcttagaggcatcttggtaagcgtcactcagaaagacgcttgtataagatttgttattcctctctgtgcaatgtagatagacaagagaaatccaggaatcaaattgtagagaagtttggatacaaaggactttggtaatttcctaagtaaaattctccaggctcattagagcagagacaaggacagagggatgtgttatgctatgtgatcccacgcactttgttcatgcccacgtagagggaaaacattggacctcattctactcagataagtgccatccacatcctcttcactagacagagaaggcagcaggtgatgtatttggatacagcatagggaataatggggactagactgactcccaaattctttttttttttttggtttttcaagaccagggtttctctgtgtagccctggctgtcctggaactcactctgtagaccaggctggcctcaaactcagaaatccgcctgctaagtgaatacttttccaggagaccagcatttcttttttcttttcttttttcattcagtatctttatttattagatattttctttatctacatttcaaatgctatcctgaaagttccctataccctccccctgctctgctcccctacccactcactcccacttcttggccctggcattcccctgtactggggcatataaagtttgcaagaccaagggccttttcttcccaatgatggccgactaggccatcttctgctacatatgcatctagagacacgaactctgggggtactggttagttcatattgttgttccacctatagggttgcagaccctttcagctccttgggtaccttctctagctcctccattgggggccccgtgttccatcgtatagatgactgtgagcattcacttctgtatttgccaggcactggcatagcctcacacgaggcagctatatcaggagaccagcatttctaagggaatagctccatgtaccatcagtgaataccagacaaggacaaactcttttttttttttaaagcactaatccagttgagggtacaatgttcatgaagaccctaaggatggagagaaaagcctggttttttataactgatgcctaggaacccagcaggttcagcatctgggtttttctactggttccacctagtgatgcaggacatgtctatcacaatttagtttacatgtttacttccgtcgttccaagatgacccatcaacatacagaaatcgtaagcacctgccaaacaaggataatataggttgctagcaccaaagcttctgttaacccaatcctggagaaaatgcactcgcatatgaacacctcgccatctccctgggttgtattagggtctatcatccccactcctgcctcccctctctgtgatcagtttcaccaaaaaagtcttgatgtttcaatcctgtgttgttcttttcttgcagccatgacaggacttgttgttcccccgatgtaaagcggaagaagaactgctttctcatagcacaaaactacttattccgatggaccaattatgaaggaagcactctgagcttgttggggagagttgcgcccccaagcggccatgttggacagatttgggaaggcagagagccgccatcttggtctcgtgttcctcatgaagcattgacagtcactacacaaactgacccttttggagacaagagcagagaaatgtcattgacgtggtcagtgctaagagcagcaattctttgttatgaacattacaaaaaccaccttcctatgtttgtaaaatatttaagaaaaacattggcaaacattcatgcttaatattttggatactatttgtttttctttgtaggaaaaaaaagttgaaagtttctattttctatgaatcctttcagataccaatttagtttatgcagaaaaaaattgaacaaaacagggtaccagcatggaagactttcttaaaatgaaacctgaattgaatgaggaaatgttgtatgtgtgtttgcttatactttaagctcttttaaaaaaaaagggaaaaaaatttaaaatgttttacagttatttaaataaataaacgtgtaacttattgtaagtagaggtagaaattaagaccttttttaagaagagaagaatttctcttcctgatgtaaaatgaaattgacacacgtagtgaccagttttaaaggtgtgttgttattacagttgcttattagattcttatcctacatcccacacccccctctttttccatcactttatcaacccatgcacaagaatgtgtaacttgtgcagattcccacagaatccaccacagaaaccagactcagataaacgccagcacaccaacacttcaatccaccactccattcccagatctgctttctagttcacagatcccttatggtgtccaatcttggtgaagcgttttgaaaaaatacattcctccctgagcaatgcagggagtccccatgttaccctctcagctttgaacatcctcaggcaagaagtatctcacctctaaggagagtcaaagccccatggctacactgaccaaggactcttcagaatttctctccaacagagccccacagtccttcctctttgggtactcgattcaggcatggaggcaggaagctccatagaactttggagaaagaacttggggagcttggttgtgtttcttggactcttaagactcagtctttgactgtttcctttctatgcagagtttttcttttatgttagtaaactcccttggaaaagcatgtatctcacctgacactgtttctgagatgagcagggtggggtgaagaggaacgaactcaaaaccccctaagtggctctcttattgggagattcgtggcagctgtgttccaagcggtgcagttacccagcctgccctgggagccttgtgctacctacctagttcttagcagggaaaaccttgcagtagttgctaacagtggtagactcttgaaaatgtgtgtggtcctggagatgcatctagacttgcttggcttgccaataggatgtcatgattttccaggtgtcttctctttgattccaatgacttagcttggggttcttggttaggcttctagcattggaaattgatgtgtctttcacggaaaaaaaaaagaaaaaaaaaacaaaaccatcattagtacttctgagccaattttagatgaccctctcattgcccgactggcacatgtcctcatccaaccctcaactggattatttgccttcagtttgctagaattacccactatgacattttttttctatgcacatgagaatccacaattttagaaacctggcatgcttataaccactgctgacagtccttcataggcagggctcacagcgccaaactatacggaaatgcatgagaaaaacctccctggctaacaacctggtacagggaaagaacgtgtggaatacgagcattaccatcccacaatggaggcagaatacaattaagcatgtttagacctggctttgagccaacccaacctaagaactttttctttctttctctctctctctctttctttttttaaaaagtagcatagcttttagaacctgtgaatctttctcttgcatgaggattagtgcagttctgtctccagaatgatcgtagaatctgtcagtagctttacaccgaagactgtgtgtaactaaatactggacatctttgaccattcactaggacatcggcagccacagatctatttaattgtacaaacgtgtgtaagggttatttttagtgtactaataaattaaaaacaaagccactctgtcctctttagtcattgctattaaatgattctggtcccaggttatttttatgccacttggcagacaagtatctctataggtaatgacaaaaattctgttctatttttgagaggagctgtgtaagatttttttcatttaaaggtacaacttactgcattatctcatttctttggttacagcatcgaaattcttcccagtttttctttgcacatttcaacatgcatggtttaaacaccattacctttaccttttgtacagtaaggcctcatttccaaactgtatagttttgggtttttttttttgtttgtttgtttgttttcttgctttgtcagttacatacagtataaagttgctatgcacagagctttttgtaaagacagctttttttgtttactgtttttaatggtcttccttatgaaagaatatcttgtttgtaaaatgaatatgtctacttctgttttaaactttaaattatcctaacaaaaaaataaaatttttgtactg
